United States Patent Application Publication US 2005/0208558 A1 - sequence listing, part 11

SEQ ID NO: 10162 - DNA, 21475 bp, DROSOPHILA
cgagcatagcaatcaacagcattccttttaatttcaactttttgctgagatgcgccccgaaaatcaaaaagtccaaatcaaaaccaataataaagttaaatcgataattgaggtcatgttggagaaggtatttttggagtgtgtttcgatcggacgcgatccggcgaaatgattttcggggcctttggcgtacatacgtgatcgtttaactgtaaattaaatataatttaccaataatcataatcacaatatgcagtttctgtatctgaatccgattccgcgtggtttcttctcgccaccaagagattgagagctgatccaaagtgatttgatccccttgagccagacgcataaatcatcatctggcgtataaattttgtgaattctggatcgataactgtccaaacgcgcgcctcgcagctgatggtcagataataaatgtaaaaaaaaaatataaaaaaaatagaaacacaaaaagaatttgccgggttcgctgatcgattggttctcgtatctctattttttgcggctatctcacgctcctccgatgagcgcgtctgcctggtgctataattaaatgctaaaatcgcatagactggcatatgttagaccaaatcgaggcaccgcacacaacaaattaatctgcgaagcataaagccatttctatagacagcaattaaacaaagatacatcctcagccaatgatttcggatcattaactcaagaaatcagcactataaacgcttcctgttatgcgaattacaccgcccgtttttttatttaaaatcatttcgtttcctttattattaagaggaaattacataatgggtaacttagcttaccttacctgtgctattcattcaagttccttttaaatattttcaagtttaaaatgctgccaaaaatagccaacaatttaagccacattaattgcggtccacattttgttgcacccacagacacctccagaaaataaataaaaacaccgtttgtcgctttattatttttgcaataataatttattattatatattatttttaaactttttcgcttggttgctggtgttggttttgtctgtcggttgtcggctgctgtattattttaatcgtatttattataataatttctgtgttttcactgcgagcggcgaaatgttgcacaatatttgaaccgttattgttgtttgctgattcgcggaattatttgttctttgactattgttatgactaaagttaatgtgtgtatatatatagggtgtatatataatagcatatgaagcgtttaaatagttttttaatgtcaatttttgatcatttttccttcattacgttttttgttttgcttttgcaacgggcatacaagtttgttttgtttagcatttattattaatattctttatttgatatatatatatataatatgaattattgtttatcgcctaggcaagtgaaatacttgaagttattaatttttatatgctaatttttagtattacgaacttactgcactcctgctaggctagttaataaattaaaaccttagcattagaaaaactacatcgtaaaataaatcaaagtttcttccatcatctttaaaacactaaaaagcggcccgtaagatttattttctttactccctaaataactacgtattactttatttattatatatttctgttacattaatatactcgaattgaagctaaatcgtaatgtttataagcaatgctaaaaatggtttcttttcggggaagttaaatgctaggtatgccaactctgcctacacgggtattcagcttatcgttttttcaattcattaaaaagtctttcgtatcggctgctatatacaacgtcactataagcttacaactgctcgctatcgcatctaagcactcaataagggatatcggaagttctgcatcttttcactacgtcctttctctatgtacaaaatggccgctccaacgtttgcaacgttctcaaaacttcaacttttcatcttaggtatgtacacgttttcacttcacttcatcacccactcaagagccgccgccgtttgggattgcactctgagatcaaataaatcctcgccacctcacctgaccaggtgtttagttggcgctgccgaagagcacggagttcttgtagtatgccgtcggtcgctccgacagcggactcttcacatcccgctcggcattggcggcacggctcttgcgctccatttccagctcctgagccagggattctgcaaggagattagtgtggaaatggggaatctttatttagaggcaatttaaggaaaaataaaagtatcagtataatcattccaagctgctcaagaacatttgcattgaaatactattaggttgaaagtgacaatgtgttttttattgttacttaaattagttatggaagtactgcttttcaggactatgatatcctttataattccgaatttcaggcttgtgctattactcaacatattaactgacatttatcccacaatcttaaacaagataatatgtttcaggctctcaactcaccggaatagttttgccagaaggcgccggtggccatcagatcgatgcccggatagctccacggacccttcccattgctggctgctgctgcagctgctgctgcggcggccgctgctgcagcagccaagctgccctctgctgccacagaggctgctgatccgctgggcggtcgctcgtcccgatcgcgactgccgcatctgggtggaaacaaagaaatggaaaatttttatagcatatgaattaataaatgaataattacactgatttttcagtatctttcaaagctaaataaatgtaataagatacaaaaattaagaacacaaacagtaacgattcattcccccatttaaaacctaaagtggcacagcaataaccatttaaggacaccccattgatacaccatgatcattatgaacgtattgttaatgcataattccacatacctttttgtgttgtcctcgtcgtgggcggccagtgaggcggctgatgatcgtggttggcgctccacggagccctcgtgatcggaggacggctcccgtttgaaatgggtgggggaatccgggcagttgaggccggcggagatggaaccggaaacggatccagccgaatgtccggcggtcacatcacaggaggaattggaggccagggacttgtccgatttttcactgccagcatcgttttctacggaagatggtcaatagaagaagagggcggtgtgttggttaaaaagcatagggtggcaatttgggcgtgggccaggtggtttttttttttatcaattttccaaaatacctagcttttgatattaatttcgtaatcaatatctaattggaacaggtggttttcgggtgttgtatgtgttttggaatggataataagtggtggggaatttatgggggatctgttagccatgcgtggtgcgtgtccttgaccctcgtaacttacctttcattgtctccacgtcgccgccgtggctgctgctgttgctattgttattgttgttattattgttgttgttattgttacacttggcatcaccgccaccgccgccacacgcctccgactcactgcaagccgatccagatccaccgcctccgctcccgttggcattcggactgcccttcaccgcaccgctgccgccaccaagctgctgctgatagcggatgcggatctttcgctcgcgtcggaagcgcttctggtaaagcactaaaattgagagaaaaaagaaaaaaaaaatacttattaaacatgattttaagcgcaagttaaaacaatgatagcttatatttccaaaaatacttcaaaaatacgcaagtatcgaattgattgcacttcgcaggattgtatttctaaacagatagattgctatcactgacccactgatccctgcgaaagcaccaccattctgcacaaatcatgatgcgaacattaacacaaaattccttccacggaaatgtcaggagataggagaagaaaacagaacaacagcaaatactgagcccaaatgagcgatagatagatagatcgtgcggcgatctcgtactggtaactggtaatttgatcgattcaaacgattctgggtctccccggttttctggttctggcttacgatcgggttttgggctttggttgtggcctccagttctctggctcgttgcctgtgccaattcaagtgcgcatccggccgtgtgtgtgggcgcaattatgtttattgatcctgacttgcaatcattccagatcgcgggccatagaaaaagtgcacagaaacaaatgaacgaggcggcacaacagctttgtattttttttagggttttaaagtaattttcaaattatattaaaaaaatttaaataaaaacaacctatttcaatcttaagtctgttatctacaaaaaaagaaaacatcaagctcctgaaacagcaaaagtttcagaaaacttctgtataaagtttgtccatatagttcaataatttatttaattttgatatgaatttttcgttagcacagaacatttttgccagtgcacctgatcgactgcaccgatgcggatggatgcgatgaagcgtggtgacagccgttttgagggtggagccacaaaatcaacctcaaatcaaatccaaaatctgttgctggcatattgaatttcagcgaggatcggctgatggcattgccctccatccgcagcaccattccattccatattccatgcgatgcgattcgattcgattttgcgccattccaaaacgccagcacccacgctcacccacagcaaatggccaattgttgccatgttctggaactcgaaaagtggaaactcaagcccgtacatggctgtgatttttatcgccggcgttattattagttgcaattagatgtctatgtatgcgtgtgtggcattttgcatagttgcatgcaatttttttttcggttttcgtttgctgatttatgtgcggcatttccctccataattttcccacaaagtaaggggaaaggcggagattaagttatggccgggtcggtcagtcggtgggcaattatagtctgccctggttccctttgttttcgcattgtaattctgctgttttcgtttctttcttggttttttctctgttttattttttttttttttgaatttttgggtggagctctggtttttttgggtggcggtttttttttgggcggcttctaaatttgagggttgcaaactttagtagttgtaagcctaatgaattgcgattattgattacaaagtggccgccgatatatggatcaatttttaaaaagtgcaattgaaaaattactgagtaaaatagtttttgattggaacattacatgaaattacttcaaactagttaattttccaatttgcaaatcgaaaatttttcttaaagccatagttattatttttgtgtagaacaacacattatcaaatacccttttcaattcatataaagcttctttaagttttatgtttggttaattggttgagtggattctgttttcagaacttttctctcaattaggcttagttctttaccatcgctgccttttcgaaaggtaatcaacccttaacccctgacaacccttttaaggtcttttcaagaagtcatcacaaggaaacgccagaagaacaaccaattaaaggatttctgtatgtgcaactcggattccacttcccaatccccattctcaactccaattcgctccacatttttgtttagctactttttgccaatcattcgagtgtaactaaataatgaaatgatattaaattcatttgaattgtgatttctgttgaaaaaggccaagagacagaacggcagcctgagccctaaaaccctttatatttttttttctttttagcccgcaacctggcgacgaccaccagagtggaggggttaagggggccaacgaggggttaagaggggggcattcgcagacagtcggcatatcaggtgtcattgtcatttgagtcagattgcattaagtgcgcccgattggagtcggaatcggcataggacgagcgaaggagctggccgtgatgtgagtatgaatctgaatctggagctaaatgtggacatggatgcgaatgtggcgcactgtcaggaccgatttgctgcaccaactgtggatggatcgccactcacagtgaaatgacgctaatgtgaaccggtttgcggttcaagaagatttgaagacgcaactagaagatatctatcagaaatgggaatacatattctaaagcttagggggcggaattttcatgagtcttatataattaattaattatattaatttatttactcacctctcagtttacgttcatcaaccagctggcgttccaacgaatctttcacttcgcgttctcttaaaacatccatcttgagctcagctaaaagtatatttgaacggagattttaaaaattagtaatgctggaaattaaatcattactttaaaaaacaaactgcaatttaaactcgaaacatttttaataatatacgttttcatgcagtcatatatactttttatcaaatggaactcctactaatatatatctagacttcaaatcaaagactcacccttttcgtagctgatttgccgctcctgctgcctggcattatcggcggccaccttgagcaggctctgaatattcctgagcagcgtttccgtggagctggctggcacggcggcatgggcatcgatgcccaaggggcccagggccagacctccggccagggcggccgcatcgttggcggccaggagcgcctcgttgggggtgagggcaccaccgccgccggtgggcccattggccaccgcaccaccacccactgccgccccgtttgccacagctgcagctgcggccaattgggagtagttcaaggctctttggtgctgaagcgcggctgccgctgcctccgccgatgagggggagccccgctggtgtggaggcaccacacccagatgggacagacccaccgtctggtggtggtgcgaggcggcatgctggtggagctggtgtgcggccgctgccgctgcagccgctgcagcggccgctgagcccgtggacagattatcacgttccgtgtcactcaaatctgtcagaaaagacacgaattccgaacgaagtcagtcagaaaatgtcacatttatcgtttatcgctcacattgtgcactgctgcttatcgcacaagtgggatcggatcaatgtaaagtccactcaccttcgtcatctttggccaggcagcgttcatcgacttcggattggttctcgtcgctcaggttctcctcttcctcctcatcgtcctcgacgccgattatgccgccgcccacatgggaggcaacgccacctccgacgccactgcgactgccctcgtccaggctgcgggagccccctcttgccggtgatcctgccaccgagtggcaatcgctgcgctcactgcccgcgtcacagttgcttccgccatggtctgtgtttccgccggacttgctaagattcagcaccggactctgacgcgtgggagagcctgaaaaaaagggaattaaaaaacataaaaccttatttgaaaactcgtgtataagactggtgtattgtttctagtttgctagtatgttaatttaaattatcttgtagattacaatgcttctacttacaattcctggagctgagatccctgggcttgtgctcggccaccatcacatttcccacccgatcgacgaccgcaccacccacacccatcgcctgctggcgctcgtccgttcgctcctctcgcaatcgctccaaatgcttgacgatgtcctcgtaggctgcacggcaattctcccagattcccgatctggccaaggcgtccatattggccgccgacatgccagcgttctgtgcagcggccttgagcatctgactttcgggacgggcgtgcaatccgtggggcggcattcccggcgacatgagagccgccgctcccggatggtgggcgttcatctgcataaaggccatgtgattgatgggcggcggattgtagccattggccaaaagtggcgatttcatatctggtaaacataaaaaatttaaaaattaagttatgctaatccgttctatactttgcttaactaatatatttttctagacagtaccattccattatttaaattttaaaccattttactttaatttgtattagccacatttacttggcagtttaacgttaatcaatacttcatgcctctgtcctgagctctgctaaatattttaatttcgaaatacatattcactcgtccattggcccatcctcgccaatatttgcctttcattttgatggctcgcccaactgacacctgttcttgtctgtatctgccacatataaattttatactgtatacatatatatacatatatatatatacctatacatggcctgtctattgtctgagcggccagactaaacacaacaactaaatgcacccacacacacacggcaaatatacagatgcttttctatctggcgtgtgtatctacggctgtcatttgtttgcactatgtacatatacatgtatgtatatgctgtcatgtgtactatatgactatatgcatttagacaatttagtgggccattaaatgctttaaaattcactaaagtgctaaaattgtaagttggcgaaaatccgttggcttcggaatgcaattaaacgatggtcgttcgtatgtgaaaatgcagttaaaaatttagagaaatgccttgtgcactttttattaataatgcaatatcactcaagtatcaacgccccataattcacttcaggcaaccttttctttatggccataaatgacggggcgaaaaagagcaaacagttcttcagacccatcttcgtttcagaaggcgccggcggcgcatggttctaaagaaaaagattttgagatttcattcgattgggctttttgtggctgttcgggtatctttcaatattatgcgtttcggacacattaatagaaagaggcgtggacgaagttgtcagctcggcactctctctccttctagcgatcatagagaaatatgtaaaaaaaaaaatcaattaaatataagtccgcttgtacttatcataattacagacacagatacaattcgaaaattcagttgaatgcgatttcctgtgccagtacaaatcacagtgtggaattcgacttgattgtggctttggctgccatttatctgtggtgtggtggtggctctggctttagctttggctgggaacgtagccaaagtatctgtatctgtgcctgtgtatccgtttcgtttttgtccgtttggctgtgctgtgtaagctgtaatcagccaacaagcagcgaccacaaatcacaaatggcggcagcgacgatcatcgatcgacgggctggggaagcacagaaatacagaaactcaacagccgccgatccccgaaagcgagttatgtggccaatctgggaatgatttcattacaattcgaatccgaattcgtggcccctgcggccatgccactcaattgtgtgagaattgcaattggcagcggcaagtgggaacttgaagtgcacggtaaaaatagtggtagtagctgtccacttgaatgttgaatgttaatgttatgtatgtcataagaaaaatctccaaaattatacttgtttttctacatgaatgtcacactgggtagttcgtaatgtatggtcacaccaatatagattatattcaattactcaccacttatgtgcccattttcataggcataatcgccgttgtccaggcgatgcttcttcaactgcggatgctgcgatagatgagtgggcggcagggaaagcccaacgggtccccttttgggcggtctacccggtctggaactgcggaattgcagagagttactgttgggttgagagcaatggacaatatccgtggtatcagtacaaaaaaatgccaaatgcctcagcacagtgatcgcaattcagcaaatttacgggtgggatttagtaatgtagaacaaatgcttattttggcattgtgctgctgcattttcacgtttattattagatatattagataacacaacttgagagcttaaagtggaaaatgaacaaacttgaaattaaatgaaaatttattgtttaagcaaagcaaaatggcttccagtacatagagctcatcttaaaattggtaactctttcacacaaaaccgtggtaagcattcaaaggtaatttatggccctcgccatgatttatatatgccagaccgtgctgaatatttaaaaaaataatattgttgtaaattcttttgttttatttgcttctgtaaaagccgagcagttccttcgccaaaaagtgtctataattttttgatagcctgtctcgccgtaaacgcatccatcacggcttaacttttccgaggaatcttgctgtttaataattttcccctccgaaaaatgccatttttaagccatagtccccaccactcgcccgcaagttggattgcctaattaagcttcaaccaactttagtgagcaccccgttgacttgagacaaataaaaagccaaaaacgagtagaacgaaaacgtgctaccattttaattatgtgccataaaaaaatgtacaacccgaaacagcaacaacaataaagcgagccaacaacggagcctaaagaaaaacgtatggaaaaagaaagagttcaactatttttttaagtaatttatgcctgcaattgctgctatttgtataaaaaatatttaaacaagtcttgggcaaatacttgacgcaggttaagctaaatagttaaccgaaaaggcataaacaacttggcgcagcgggtggaagttatgacaaacaagagataaaaccccccaagcagcgcgggggtcggattcaaaaaaagcccaaaaaataataagaataagaagcaaaaactgactaagtgcagcaaatactacgaaggggagccgggtcttgatcaaatagagcgaccccttccatccagatggtttctcttcctagcaattaaattatggaatcttcattccatgtttgccgctggtacacaggtgtccccttagaagccaaaagacagcggcgatgggcaaataaacacaggtagcaatgatcgtgtgcacgatataaattatgccatgcatactccatacacatacatatgtacatatgtactttacatatatgtatctaagtatatgatggcgaaactcttgaacaatttgtaattgtgcgttcttcggataacgattctttcaaatatttacagttacatattgccacagccaatatttgcgactggattttaattgtgctccattaaacgtttaaccacaaacaagtcggattgttgtcttggcccctttgggtcaaataaagagactccttagccatgaatcattccgagaacgaaagaatagcagcgaaagtgtttcttagttctaatcggaatcggaaggccgttgttcccccgcctgtgacgtgcaaaaaagaccgagacccgtgcgcctgtcagtcagtcaagttgtatgaatttatgggaagtgagttggaggttatgcgggcaacactttcattggaaagttttcggttctatcaggctgacatgtttgtctgtttcagaaaatttcgcttcacaagaatatgtcttttgcataagtttcgggaaagattggataattgggtcgaggcgtatacgtaatggtcacatgatgatgcaatatctacgatctgcaaaatgagctttgatggaactgagctgatctggttaggaacatgctagtatagacttatagaaaacactcggtaaatttagggagtttatgcttttctgcgaccgaatgccaagtaactaatttacttggctcagtaaggtaatttcgcaaaatcgaataagctcaaaaataattatctcttaatttgcattccgaaatgttcagtggttaataccaaattgcaatctgtcgaccagagaccaactgccatttttgctaatttatgcaccgttgtcactcgccgtgaatgtcattttgcattttttttttttcgcacagcggacaaacgtttagtcaggaataaacaacaatttgtcaaaatagtcgctgtgtccaatgcctgtggcccgaaacaagtaaaacaatataatagcagcccgcggaggtggaggagaaggagaggcggtagaaggagtgaggaggaaccggttgccaacactggccacacaattctcgaaccagtttgcagctgtctccttgcgtctccacagcgatcgtacatacatacatatgtacatacgagtatatttcaataatcaagggatagctgagttgttaattattgacttgtggccgggacgcttgagaaacagccgccaaaatatgcgccaaagtgcgctaaatgtgccactgccacttcacttgcagttgcagttgcataaatcgaatcgaattgaatcgatccgcatcgaatcgtatcgagtcttaccaaatcgaatagttaacatcgggctaggaaggcgttcccggcatttgtcagcgaatccacactccctgggcttaacccactgcccccggcgttttggcgatctggcgtccagaaactggggctaagctgcaaattggcaaatcaattatatttatggccaagttgccaccttgcgaccgcgatgcagagcgtgcttgccggcaactaaatcaatgcaatcccagtaaccgacaattaaatgtgtgcctgcaacacaatttccatatttgcaattaccaatgccgagtgctcacagagcagaatgttaattgaatccatagcctcaaattgaatctcgcccctcgcgaaccgctgccatttgtcggaaagccttaaacccgacaatatgcattggaaattcccagaaagaagccgagaaagaataccgcttatatgttggcgcttgaagttggctcgaatttctttcgttgttaacaataaatgttattggaatttgcattgagctcaacgagacaaagacagcgctgacttcagtcgactttcgtattcattgttaaatgacatgcaaatgtacgaatgacatggcattcgccaaagggttttgaaaggggggccagatccaaagggcaggtctcagggaaatgtttccaggctaattgtgggttttacgccctgtacttctccaaatgatcaagtacgtcatttaatggaagccactgacaattggaatcgtaaattatacagcacaaactagatttgtttgagtgctctcaatgtaggctaatattagatttctgcgctgaattaaaattattgtaatacgtattataatgcatttgtacccaaatttgacagacttaagcagttctctaacataattggcatcattggcaaagagaaataatattaaattggcagcattgccagaaaaaactcttctcctaaattttgcttgattgaatgttgtagttgagaatgttgtaaaatagtgttagtattgtaacacacgacatttttcaaatatttaaatgaaaatcacatggtaattagcaattttgggtggccttctttcctccccaagccaaagccatataatttcagccagctacttgcgatttcccccatgaccaacaacaacagccccatatgtgcagtgcattaatgcagatttcttggcaattgtttttgcatactttgttttttcctcactcacttcaatttcaattggcgtgctaataactcatttagttcgcaacaaaaaaacaaaaaacgaacagcgggccacaaaaaatgtagctacaaacatggcacaccaacaatggattggatggctaaccaagatcgcccccacttccctttccatcaattgcgaatatatcgcatctcatgatgctgagagaatactcgtactcaactatgccgactttatatgaacactgtgtgcagttttgttttaggctttgtaattattataaaaataaattgaactattgttgcctcatttagattgaacagtgaggcagccacaatgttgcttttgttattcggatacactcaattaagctgaatttgcaaaatgcaaatggcccgtatgaaactcacacctcgaaaatcatagactcgaattattttagaaatttaatataattatattttgttttcttctttttttttggtttggttttttttttttttttgttttttgtttccttgcaacacttttccgcctctcattttgacagcccgaggagttcggttggttcagttgatctcttgattgtcagtcagtcatttgtgattagacattcgacagtcgccgctattgttggatggcataaattatagtctgtctcaacaacaaagcgctgcatatgaaatccacataataaatcaatgtgctgtcgtaatttgtgttaagttatttgtaatcaatttgaattctcgccgtacctccccacccccctcggttggtgagatttatgggaatattttattcattttgctattttggttaaatggctttttggggttttcccgaatataagtttaaaattaacgcggcaataggcttaagatcatgtaatattatatattgcccgtaaacaaatgctttctactttcattatcatgagtgttttaaaactccacgactgctctaaactttaatctttaaatatttttgtaccctttgaagaactaaccacttagcaaatccctcctattatttcctcaaactcttgcacttatcgaactcgcttcctttccccgccatcttcactcgaacaaatttaacaacaaattaaactgaaatgcagtcaaatcaatcgctgacttttcaattcgtttttccttctttttcggcccaacattttccacttggcccgagcgttttgcatagtccatggcttcgattggatcggctcggatcggttggtaagtcttcggcggagtatggctttagtccaatttagtggaaaggtgtgcccaccagctcggtcacaacacgttgctgtggctcattggagtttcgcctttgcctcgctggcttttgagccgtttggtcggtgccgcttaaacgccgttttagccaagttaggtgaaaaatgccaagggagtgaggagtggagaccgaactgtcaactgtgatcaaaatcaattgtttgccatttgccaaaccaaattgactgagccaagtcagtgcgagtcacacaaaaatgctgacaaaattataccataacccatgaaatgtcagtgtcaataatttttgtaattatgagagcattgagcttgagtacataaaaaaaaagttatatatttaaaaaaatcattattttagttggctgccattggagaagcccccaaaaaaggcaaacaaatataataaaaaattattgcaacgtaagttttgatttgaacaaaaggcgtatacaattggatgagctcaagagtgttttagagtgaaaatgtgaggatcattgttcgcaaccaactaacagaggttcgtctctaacatttttcaaaaaaattacataacttttaaatttgatttcagtttatttgtaagtgagaagcctattttctaaccataaattctgcacgttaagagtatttcctttcatatcgtatctacaaaaatcaatccaacacacctgtttcatctaccgttaacaccgttaagccccgccccattttcttatcgaaaatatagccctttttcacgctctatttatagcattcacattctttctttttttttgcactttttagctggcatatcctttcgacttccgccattcgaggctcgcccaatttccgtttcgagtttaattaatttaataaacaaattcttttcgctctaaaaactctcaagtgtatcgatacgatgcgtttctttttttccttcgttaaataaataataaccaaaaaaaaaaaaaaccaaaaagtaggaggagaaaagttattgccatagtttttttattatacttgtgtgtttacctttctggtggcttgatcgataggcatctgcaattaaaaagagaagaagaagagacaagtgaggcaaaattgttaaacgttttgtgtaagctttaatacgaaaaacaagtactgcaacataacggaaggaaacacggcttaaattcggggcacaaatgctgaaagggaagtttttcattgacgggttcgttctgacggacttgcattttggcgggcaagcgggtgtgaaaatgcacacgccccgagaacccccctttccaccccccctggacccctttatccagcccactggccaaaaacaatttgtaattatccacagagagcgctgccttcagcggtttcgcatttcccctttcgctcgctctcccaacttgtttcaatttagcgcaaaactttttcaacctaataataggtttaaccgcatttttaaccgttcctcatgttcggtccggttcggttttcaaaaccgggaatcgtacttagactgggtctccttatttctgttctggctctctgtacaacttttcattgagaaaaatgtaactagtttttcatagcaacggaatacaatttaatccaataatccaatagtttaatccaatacaaatgatattactaccatttctattttcgttaatttcgatttgacttatttggctggatttacttttcaaaatatatgttatcaataagacacaaaccttacttttctagctattaacatagtttaaaaaaaaaaaaaaactaataaaaattacgtgaatctaaatttttaaacccgatatccaagaagatctcaatttttgcctgtgtactcagttctctgaacaaagcgcatgtgcactttggagcacactccatacatgtggctcagcccttttccataattaactagatggttttccatcgacttcattgtggtcagcggccagttcaacccgttcttcactgcaaccgagaactgtaaacacaaaaaccccaggactctacattggcttaaaaaaataagaacagaacagaaccaaaaccaaaaaaagaagggatattgaaatacaaggttgtaatcgtttcgactgttgatgtctcaatgcatgggcagttcagttagtaaatgtttttcaaaatctttcaggcaggagatgtttaaatatccatgaaatatttggatctcctggggatcaatcggaatattagcctttaattgtgttgatcttttaagcctttttgtatctaatctaagccattcgatctaatcacaatttataaatatctgcatatttctgtataagtctgcatcatttgacgtaactctttaagtcttttggcttaagttgcaactataaggaagtatttattttagagacacaaatatttcagtcgccttcatttgaacaaatcggcgaaaattggctagctcgccaaactttctgtaaccaaggacaatggttttattttaaaccattaaaaactttagacccactagctcctagatccccctcaaaagatttaaaaaaaaaaaacacgatacccatttctactgaacttcgtttttgcttgtcgttttttccactcgaacggaaatgagctgacagcgcaccgcacacgtcgattgcagaaaaacatcggataaaacaggaggaaaagttgtgcaaggtggaaaactgttttaccaactattgttagaggcgttcaaaagaattacgcagctttcggttagttagcaaggggtcaccggggagcgttacgtttgcattgcgtatttccgctaaatgtcatcggaaaaggcaaacggcgaaatgcgaaacgaaagttttttgattgcccgtgttaatcgatatcgatgcacaaactatttgcattgcaaccgttgcaagaatatgcaagaagttgggggcggccgcggcagggggtggaagttgagtgcgtaagttggctaaagcggaaacaggaaatgagaaaattttgcagagcaaaccccgaactggaaatgcaactaactgggcacatgcactttgcgaaatcattggatagcgttaagaaatttattttaaaattgtaactaacatttaatcgtattcaaaagcaattaaatcccaatccaattcttatataaaatccttacaagattattctatttactgtaaatctaagcaaaaactccctttgcaaaatattcgcctgcacagcacagatcagtgaaataatcaaatgaagtcttgaaataacgaaaaacccccaattgcgtgtggaactgcccccaatgcttttgcttcggtttcgtacctggccgtggtgcagtccctgtagaggatgtcgaagtccttgcagcagagcaacttgcagcgattgacgcccggctggatggcgcccaagccgcgtaatatgcgcacctgttccacattgcagacgagcggtacgatgtcaaggcgctttagtttggtataaaccgtatgcagaccgccgaccaagtgcttcaggaagagctcgaaggcctgcggcaggcagagcatcgtttcgttgctaattatgaatgcggcgaccttctgaccccggtactccaccagcttgcactcattggcactgggatccgaggtggagatcggcggcggtgagttgtacgaccttggcggcacatggtgatgggcggcggccatcagttccaagggggaggcatggtgcatcatctgcagggagttgaggagccccagcgaatggggcggcagtccatggggcattctgggcggtaggcccgtcggcagtccgttgcccgatggcattccatgtggcggggggctgagctgatggtgttgctgctgctgctgttgctgctgctgttgttgctgctgttgctgcatctgctgcatcatggagtggttgagggagctcaccggactgacggcactgggatggcgacttggtgaactggccggtgagcaactggatcctcgtcctgtgtgcgagctccgtccatttggacgatcctcgttggctccacgcgaactgttgctaccgtcgcgtccattgtgctgctgctgttgctgctgggctgctgcggctgccgctgctgcggctgcctgctgctgctgctggtgatgcatcaacatggcggtggtgttcatattgcccgcggctctttcaataccactattaatattgttatttattgcgcccgctttattgttgttattttcactctgttcacttgtcacagaatccatacttcatcatggccgacacttttgtttatttactttttaatcgattcgttaatttgacgttttttctatcgtgacaaaaatttgacacaaagtaagggagaaatagaaaatagatggtgagaggaagataaataattaatgaactcttaattcatttttaattatttattaggcttctatatgcaaattctaagtgagcgtgtctcgtatattcctatccgcttattattggctttacatttttaatacttctgtaagttttataacatcaaatttaaatgcagaccttcaaaaaatttacaaacgatttaggatttgtattaggctcagctatgctcctatttattaaaatctatttttgagccagtttagttagttatatggtagctacaagtttatattgctaaatattttttgtaaattaatatcctaacaaacattttacttacaaagaaatatagagaactaacagaaaatagaaaagtttcctttcagacatttaaagtccgattatcttctaataccccccataaataatcctttatcaacagaactattgctttgcaaactttgctttaattaagttttgggaaaaacaaggcaatgaagctaatttggatccttactgccaatttgcataaatatacctattgtcagctttatttgaataattcgatatagaacatagatttacctttaaggaggtctaaaagtaatttataaactcaacatcactgacacaagacactcgcgcactttgctttttgaatttcgctgtgaaatatatactctgaatatttcaagttatttattccgattgcccgcttgtgttaatcgagttcgaataaccgttttcgtactggaattttggaaaccggagctgtgtccgttttcgagtaccgtaccgacggattgtcactcagagattgagagatggcagctactccgctgcgacggcgacggtggcgtcgctgcctctgcttcttcgccttcgactggttcctcttccccctctcgttcggagaaatcaacgaaacgaattgcattcgaatgggaatcgactgagagcgagacggcgcgaggcgacgactgcgagtgagcgagtgagcgggcgctaacgagtgctatttttttagcccacccacacacacgtacgtacgtacgtacacacgaagcgctaccgttatgtactgagagaaatgcgcgcgcaaaagttttattgcattaccttctcttgcgaatgacaaattcgtaatgaaaggcgagtttcaattcgattcctttcggattttcgtggcagcgacgccggcagcgcggtcggccgagacgagtgtgcttgtatgtgtgtgtctgtgcctgtgagagcgagctggtgtatctgtatctgcgattgtgcaaaaccagaatacgaatacgagtacgaatacgaatgtctgttgcccgtccacgtctcgcattacaccaataccaggccaaaaaggggagtggtatgtgcgattgatcggtgtgtttgcatctgtgtatatttctgtgtgcaaccccgaaaatacaatgacaaacgtaatcgctctctctctcttgcattcgttttatttattttttcaattcgtttgtgcgtgttgtgttcttcaaatcctcccgctctctctctttggaaaaaaaaacgtttttcatttcaatttcatttcgtttcagtctgagccctctctctcacaccatctcgccatctctgtcgcacgctcaggtgggctgcaaccaataaacacgagcgagcgagaaagcagcatatttgcatagccagtcgtacatgtttgcgctctcgctcgcccccatgggcgacgccttatataaacaaatgacaattgttttggcattttgtgttgcaaagtaaattataataaatgcattgccagagaagaaaagtaaaaaaaaatagctttacttcgagtttgcgcagctgtctttgacaaaaagcattttaatttcaattaaaagtaaatgacaaactttcaacgaattatacttttcggggcagtgttgctatctctttccgtcccaagctttgattttttttgtcaaccgttttccgtttcccattcgtttccattcgagtcccgtttatttgtatttctttttgtgttgctgattcggaggagagcagcactatggcagggcatctttcttccacttacacatattgcgataatggggttttttttcgcctgaggggcgttcgtttttc

SEQ ID NO: 10163 - DNA, 4949 bp, DROSOPHILA
attcgcaagagaaggtaatgcaataaaacttttgcgcgcgcatttctctcagtacataacggtagcgcttcgtgtgtacgtacgtacgtacgtgtgtgtgggtgggctaaaaaaatagcactcgttagcgcccgctcactcgctcactcgcagtcgtcgcctcgcgccgtctcgctctcagtcgattcccattcgaatgcaattcgtttcgttgatttctccgaacgagagggggaagaggaaccagtcgaaggcgaagaagcagaggcagcgacgccaccgtcgccgtcgcagcggagtagctgccatctctcaatctctgagtgacaatccgtcggtacggtactcgaaaacggacacagctccggtttccaaaattccagtacgaaaacggttattcgaactcgattaacacaagcgggcaatcggaataaataacttgaaatattcagagtatatatttcacagcgaaattcaaaaagcaaagtgcgcgagtgtcttgtgtcagtgatgttgagtttataaattacttttagacctccttaaagaaaaaacgtcaaattaacgaatcgattaaaaagtaaataaacaaaagtgtcggccatgatgaagtatggattctgtgacaagtgaacagagtgaaaataacaacaataaagcgggcgcaataaataacaatattaatagtggtattgaaagagccgcgggcaatatgaacaccaccgccatgttgatgcatcaccagcagcagcagcaggcagccgcagcagcggcagccgcagcagcccagcagcaacagcagcagcacaatggacgcgacggtagcaacagttcgcgtggagccaacgaggatcgtccaaatggacggagctcgcacacaggacgaggatccagttgctcaccggccagttcaccaagtcgccatcccagtgccgtcagtccggtgagctccctcaaccactccatgatgcagcagatgcagcaacagcagcaacaacagcagcagcaacagcagcagcagcaacaccatcagctcagccccccgccacatggaatgccatcgggcaacggactgccgacgggcctaccgcccagaatgccccatggactgccgccccattcgctggggctcctcaactccctgcagatgatgcaccatgcctcccccttggaactgatggccgccgcccatcaccatgtgccgccaaggtcgtacaactcaccgccgccgatctccacctcggatcccagtgccaatgagtgcaagctggtggagtaccggggtcagaaggtcgccgcattcataattagcaacgaaacgatgctctgcctgccgcaggccttcgagctcttcctgaagcacttggtcggcggtctgcatacggtttataccaaactaaagcgccttgacatcgtaccgctcgtctgcaatgtggaacaggtgcgcatattacgcggcttgggcgccatccagccgggcgtcaatcgctgcaagttgctctgctgcaaggacttcgacatcctctacagggactgcaccacggccaggtacgataactctctgcaattccgcagttccagaccgggtagaccgcccaaaaggggacccgttgggctttccctgccgcccactcatctatcgcagcatccgcagttgaagaagcatcgcctggacaacggcgattatgcctatgaaaatgggcacataagtgatatgaaatcgccacttttggccaatggctacaatccgccgcccatcaatcacatggcctttatgcagatgaacgcccaccatccgggagcggcggctctcatgtcgccgggaatgccgccccacggattgcacgcccgtcccgaaagtcagatgctcaaggccgctgcacagaacgctggcatgtcggcggccaatatggacgccttggccagatcgggaatctgggagaattgccgtgcagcctacgaggacatcgtcaagcatttggagcgattgcgagaggagcgaacggacgagcgccagcaggcgatgggtgtgggtggtgcggtcgtcgatcgggtgggaaatgtgatggtggccgagcacaagcccagggatctcagctccaggaattgctctcccacgcgtcagagtccggtgctgaatcttagcaagtccggcggaaacacagaccatggcggaagcaactgtgacgcgggcagtgagcgcagcgattgccactcggtggcaggatcaccggcaagagggggctcccgcagcctggacgagggcagtcgcagtggcgtcggaggtggcgttgcctcccatgtgggcggcggcataatcggcgtcgaggacgatgaggaggaagaggagaacctgagcgacgagaaccaatccgaagtcgatgaacgctgcctggccaaagatgacgaagatttgagtgacacggaacgtgataatctgtccacgggctcagcggccgctgcagcggctgcagcggcagcggccgcacaccagctccaccagcatgccgcctcgcaccaccaccagacggtgggtctgtcccatctgggtgtggtgcctccacaccagcggggctccccctcatcggcggaggcagcggcagccgcgcttcagcaccaaagagccttgaactactcccaattggccgcagctgcagctgtggcaaacggggcggcagtgggtggtggtgcggtggccaatgggcccaccggcggcggtggtgccctcacccccaacgaggcgctcctggccgccaacgatgcggccgccctggccggaggtctggccctgggccccttgggcatcgatgcccatgccgccgtgccagccagctccacggaaacgctgctcaggaatattcagagcctgctcaaggtggccgccgataatgccaggcagcaggagcggcaaatcagctacgaaaaggctgagctcaagatggatgttttaagagaacgcgaagtgaaagattcgttggaacgccagctggttgatgaacgtaaactgagagtgctttaccagaagcgcttccgacgcgagcgaaagatccgcatccgctatcagcagcagcttggtggcggcagcggtgcggtgaagggcagtccgaatgccaacgggagcggaggcggtggatctggatcggcttgcagtgagtcggaggcgtgtggcggcggtggcggtgatgccaagtgtaacaataacaacaacaataataacaacaataacaatagcaacagcagcagccacggcggcgacgtggagacaatgaaagaaaacgatgctggcagtgaaaaatcggacaagtccctggcctccaattcctcctgtgatgtgaccgccggacattcggctggatccgtttccggttccatctccgccggcctcaactgcccggattcccccacccatttcaaacgggagccgtcctccgatcacgagggctccgtggagcgccaaccacgatcatcagccgcctcactggccgcccacgacgaggacaacacaaaaagatgcggcagtcgcgatcgggacgagcgaccgcccagcggatcagcagcctctgtggcagcagagggcagcttggctgctgcagcagcggccgccgcagcagcagctgcagcagcagccagcaatgggaagggtccgtggagctatccgggcatcgatctgatggccaccggcgccttctggcaaaactattccgaatccctggctcaggagctggaaatggagcgcaagagccgtgccgccaatgccgagcgggatgtgaagagtccgctgtcggagcgaccgacggcatactacaagaactccgtgctcttcggcagcgccaactaaacacctggtcaggtgaggtggcgaggatttatttgatctcagagtgcaatcccaaacggcggcggctcttgagtgggtgatgaagtgaagtgaaaacgtgtacatacctaagatgaaaagttgaagttttgagaacgttgcaaacgttggagcggccattttgtacatagagaaaggacgtagtgaaaagatgcagaacttccgatatcccttattgagtgcttagatgcgatagcgagcagttgtaagcttatagtgacgttgtatatagcagccgatacgaaagactttttaatgaattgaaaaaacgataagctgaatacccgtgtaggcagagttggcatacctagcatttaacttccccgaaaagaaaccatttttagcattgcttataaacattacgatttagcttcaattcgagtatattaatgtaacagaaatatataataaataaagtaatacgtagttatttagggagtaaagaaaataaatcttacgggccgctttttagtgttttaaagatgatggaagaaactttgatttattttacgatgtagtttttctaatgctaaggttttaatttattaactagcctagcaggagtgcagtaagttcgtaatactaaaaattagcatataaaaattaataacttcaagtatttcacttgcctaggcgataaacaataattcatattatatatatatatatcaaataaagaatattaataataaatgctaaacaaaacaaacttgtatgcccgttgcaaaagcaaaacaaaaaacgtaatgaaggaaaaatgatcaaaaattgacattaaaaaactatttaaacgcttcatatgctattatatatacaccctatatatatacacacattaactttagtcataacaatagtcaaagaacaaataattccgcgaatcagcaaacaacaataacggttcaaatattgtgcaacatttcgccgctcgcagtgaaaacacagaaattattataataaatacgattaaaataatacagcagccgacaaccgacagacaaaaccaacaccagcaaccaagcgaaaaagtttaaaaataatatataataataaattattattgcaaaaataa

SEQ ID NO: 10164 - protein, 1074 aa, DROSOPHILA
MDSVTSEQSENNNNKAGAINNNINSGIERAAGNMNTTAMLMHHQQQQQAAAAAAAAAAQQQQQQHNGRDGSNSSRGANEDRPNGRSSHTGRGSSCSPASSPSRHPSAVSPVSSLNHSMMQQMQQQQQQQQQQQQQQQHHQLSPPPHGMPSGNGLPTGLPPRMPHGLPPHSLGLLNSLQMMHHASPLELMAAAHHHVPPRSYNSPPPISTSDPSANECKLVEYRGQKVAAFIISNETMLCLPQAFELFLKHLVGGLHTVYTKLKRLDIVPLVCNVEQVRILRGLGAIQPGVNRCKLLCCKDFDILYRDCTTARYDNSLQFRSSRPGRPPKRGPVGLSLPPTHLSQHPQLKKHRLDNGDYAYENGHISDMKSPLLANGYNPPPINHMAFMQMNAHHPGAAALMSPGMPPHGLHARPESQMLKAAAQNAGMSAANMDALARSGIWENCRAAYEDIVKHLERLREERTDERQQAMGVGGAVVDRVGNVMVAEHKPRDLSSRNCSPTRQSPVLNLSKSGGNTDHGGSNCDAGSERSDCHSVAGSPARGGSRSLDEGSRSGVGGGVASHVGGGIIGVEDDEEEEENLSDENQSEVDERCLAKDDEDLSDTERDNLSTGSAAAAAAAAAAAAHQLHQHAASHHHQTVGLSHLGVVPPHQRGSPSSAEAAAAALQHQRALNYSQLAAAAAVANGAAVGGGAVANGPTGGGGALTPNEALLAANDAAALAGGLALGPLGIDAHAAVPASSTETLLRNIQSLLKVAADNARQQERQISYEKAELKMDVLREREVKDSLERQLVDERKLRVLYQKRFRRERKIRIRYQQQLGGGSGAVKGSPNANGSGGGGSGSACSESEACGGGGGDAKCNNNNNNNNNNNNSNSSSHGGDVETMKENDAGSEKSDKSLASNSSCDVTAGHSAGSVSGSISAGLNCPDSPTHFKREPSSDHEGSVERQPRSSAASLAAHDEDNTKRCGSRDRDERPPSGSAASVAAEGSLAAAAAAAAAAAAAAASNGKGPWSYPGIDLMATGAFWQNYSESLAQELEMERKSRAANAERDVKSPLSERPTAYYKNSVLFGSAN

SEQ ID NO: 10165 - DNA, 2715 bp, DROSOPHILA
tgagtttgccagcaatcggtcgctgcgtgcggctatccctctcgcgcggcacgctatgcgggtgcgagaagagttcggctatatgtgccaattggctggttgatatggtggactctaggtggcgccccgtttgtggtattttttagtgcctgacaccgctaggcgttggacggattgcaaaatggtcactctgtagccggggatgccaactaggttcgcatttaaattcttttttggttactgttaaataataaatatatatataaaaacataacttttaacttttaacttttaatttgacttttgttattgtacatattatgtatatacgcaatagctgatctttataaactttcgatgatactgaaatagttttagatatagatagtttatattaatttatcatatattgcacaacatcatttcgatagtatcgcataatcatttcgggcacactgctcaagggtattcctatcggatgtattgtttctcgataagccgacttaaaaattatatgttttttaaaaaaaattatatatacatatttacacttgagaaataagaaaaagcatttgcatattattaaattcaataattttttaatttaatataaaacaaaagaacaaagaatgataattcaaactgaaaaacaatgagatttcttttcatatgcaagatcttaaggtggtataactggtaataataattatttgacctgctttgctaaatgccctttccgactccgacgaagttgtccatcgacttgcgtcagtttcaccacaaacccaaaatatatatgactgcaagctaatatttgaaagtaattaattatttgaattaattaaaatagttgaagaaattctagtgattaacctaaaaacatcgatagtctgaaataagcatcgatgtttggaatatttaaaaaaaaacctcggtgcatcgatattagcatcgatgtttcggcacctctattaaaaactcatcccgataccgataatagcggcagaagaattttagaattccttaaatatatattgtttaatttgtaagcatttttaaggaatgagtttgagcgactgcaacaataactatatatatttgacgggcagtgaggattacgcccttaatttggcaaaggtaagttctgaacatcggattcaggtcggtttttgaacatcaaattgcatttcttttagctatgcgaacgctttgccaccaaagaaaagcgcgtcttactgatcaccagtcgccagcagggaatggcaaagcgctatccatgggaggcccataactgcagcaaatacctgaccattctgcaactggtggatgtggagagcaccccgcttcgcatgctggaaatgcaggatagcgccgaatccttgcgcagtcccgatttgatagtctttgatctgcagtcgctcgttttggatgcactactgcgtcctgtgatgcagcagtgctccacgaacaaaatggtccggcaaattgccaagtgctccgcatcctttgtgaattaccgcgaaatcctggccaatctggcggaacagaaggcgggcaaaagcatcgacaccattgtggtcatgtcgcaggaaccgtatcccatgtcagcagcccagttcaagctgcttattggactctatttccacggcaacgagtgccacacgaattttgccaagctctcggccaagatcatggtctcccagagattcgcctagacgaaggacagaagtttggagccactacagtgccttggtaaccagttcctgagtttaatcatagctggcagtattgtagttattcgccgtatgctcttgcttttcaaacaatacttacttagaacgtttaccttatgcattattaaaacatgcattttgtcaggttagacgaatattttcaaagctggaacgaattttccaatctcgaacgaatttcgagttattaagactgcatttccattttattgacttaaagctattcatattgccttcccaaaagatatccaaatggggaacggtcgaatatttaagaaaatgaatttataaaaggcaaggcacgctatattatatccgcatataatactaagacagtgcgtacatttggcaagaacttaagaaatactgtacgttgaaaatatctccctacatggcatccatgcaaaatgttatacgaaagcgaagcaatcgaatgctcgatcaaatataagactttattatagtatactatttagtctaaaagggattaaaactaccaaaaaaaaattgctgataattaattataatatacatacatataacaataatatttattatgctaaacggaaatctcaacttaagggaatttatatgaaataaaaaaaaaatttcgaatgcataagatacgtaaatgcagctaaaagtattggagaatgtattccggaaatacggctagtgatctccggaacgcaagccaccaaagcccgtttaaaaggaactaaaactcattcacatgtagccccaccccaaatccctgctgccttcgtcttcgattggaatccgatctccgcatcccagcctcatatgtagtccagcatgccgcttatgatctcaaaggcatcccgagccgtgggctcaatggcgctgctgggcagcagataaccgtgcactccgttgtccgccagctggagcgtgtagctgaagggaattccgatctcgtaggcggcaaaagcgtccgcacagc

SEQ ID NO: 10166 - DNA, 656 bp, DROSOPHILA
cggcagaagaattttagaattccttaaatatatattgtttaatttgtaagcatttttaaggaatgagtttgagcgactgcaacaataactatatatatttgacgggcagtgaggattacgcccttaatttggcaaagctatgcgaacgctttgccaccaaagaaaagcgcgtcttactgatcaccagtcgccagcagggaatggcaaagcgctatccatgggaggcccataactgcagcaaatacctgaccattctgcaactggtggatgtggagagcaccccgcttcgcatgctggaaatgcaggatagcgccgaatccttgcgcagtcccgatttgatagtctttgatctgcagtcgctcgttttggatgcactactgcgtcctgtgatgcagcagtgctccacgaacaaaatggtccggcaaattgccaagtgctccgcatcctttgtgaattaccgcgaaatcctggccaatctggcggaacagaaggcgggcaaaagcatcgacaccattgtggtcatgtcgcaggaaccgtatcccatgtcagcagcccagttcaagctgcttattggactctatttccacggcaacgagtgccacacgaattttgccaagctctcggccaagatcatggtctcccagagattcgcctag

SEQ ID NO: 10167 - protein, 197 aa, DROSOPHILA
MSLSDCNNNYIYLTGSEDYALNLAKLCERFATKEKRVLLITSRQQGMAKRYPWEAHNCSKYLTILQLVDVESTPLRMLEMQDSAESLRSPDLIVFDLQSLVLDALLRPVMQQCSTNKMVRQIAKCSASFVNYREILANLAEQKAGKSIDTIVVMSQEPYPMSAAQFKLLIGLYFHGNECHTNFAKLSAKIMVSQRFA

SEQ ID NO: 10168 - DNA, 3794 bp, DROSOPHILA
attccaatccgaatccgaatccgaatctgaatgcaagaccaaacccattcattatttcgggcacgtccgcattgtgggcccataaaagatgtcgccgcgaaggtgaccagtagcccgatgtgattgatgccaccagacacggctaattgccgatgagtaacctcctgcgccaagagttggccaggaatcaatgaaatggaattgcacgcttcaatccgattgcgagcgcattgtttcagggttacgtccgtcggctgcaatggtctttatgcaatcaaaaccatgtcatcgtgcccgttctttgtttcggccaaaatctaatccgcttgactgatgcaatgcggtcaatctcacacacgagccaaaaaacgccagttacgtttacattcgcatcgtaaggtcaacaaactgcatggcaagatgcagtttcgagggggtcgccagataactgaggctctaaagttagcagacagcttttaataagagtcaagctcagcttaccagtccattcacaatcgaaacgtgcctgtatgggcttatatctctgaagcaaaatgaagccagacatgtaggggttcctacagggcaagttcttttggggagaggacgacctcggaataccctgtactcaattaaccacatatacttctaatcttgaaaaccagaagcagaagaatgtctagctacacgacatatgtataaacatattaccaaaattgatataatgacaatatttagaaagatatcgtaagatacccaaattttatatattcgttttaaaacctttttctattattaaatgcatttatgagatcacgtcttgaaatgaccgttataatgtagtgcattataaaagtataaacaaaacaaagtgcagaccgacaatatgttatcactattgcgctggactactgaaagctggcaatctgcggaggagcgagataaagtttaatcaatgaatacaatattatatgtaaatacaaatggagtggaagctggaatggcagtctgcgaaattccactgatgcagtttacaaagttatttggcggcgagcggttcgtaaaaaagatgaatagaacgcgaaggatactcgaagtgatcgttatccttattctagcgatatcgagttgtgatggcagtggaggagatatccccctgcgatgcgacgagtacgattccatgggatacatggacgtgaatgaggcgttttgcacggtcaccggattcacggtcacacacagtcaaaatgtcgtgatcaagaacataccacccggaaatatggtcaagttcatgaagttttacgaatcaacgctgctctatatgcccttccatctattcgaaacattcccatatctcaagaccctcgatgtctcgaatacgaatattttggagctaacgagaaatgcattcagtgctgcgagtaatctcacctatctgaatctggcctacaataatctgacatctatccagacttctgtgtttattggcgccaatgttctgatgcgtttggatttgtcctacaatgagatatcctcgctgagtgtgaatgccttctgtggcctgcacaccattagccagatttatctaacgggcaatctgttgaaggagctgcacaacgatatcttcaaggataacgagtacttggagaaggtgtccttcgagggaaatctactgaccagcattcaaccggaggtttttcgcaatatgcggcgcatcaaggaggttaatctatccaataatcgcctgattttcatccatccggacacttttgcggatgcggcaagcttggagaatctggtgttgtcctataatgagttgaaaaacttccagctgacggagaagaatattgtgcatcagctgcacttggataataattatcttacaaatttgaccataaatgcaactcgattcgttcgcgccagtcacaatcaaatttcggagctctttctgcaccagagtttgcatatcgaaacattggatttaagtgccaacaagttgagtagcatatcgaatatcaccaatatcacacatatgctctacttggatgtatcggataatccaattggtccgcttaatatcagcaccttttcgcaacttaagagactgaggggactaaatttgcgaggaactggaattagagagcttaaatttggaatgttttcgaagcagaagtacttggaggaactggatctttcgtttaacaacctgaccattctcaatttggatatgtttgtgccctatctgactaatctgaagaagttcctcatcgacggcaatgggctgactgagctgcagggaaatcgcacgttttccgaagcttttccacaacttcagaaattgggagtatcgaggaaccgcttcaactgctcctatctacatcatctactcatcccaccatcgctacccgagtccgtagtgctcaatattgaaccggacaccaatctggatgagaccccacacattcgtgacgtatcctgcatcagtcaatcccaggaggtcgttaatgcctccttcaccgccgaggaatccaagctagaatcgcagattcaaatgctttcgaaacagttggatattgtaggctcgcattcgaagaatctggaacttcacctggcctttatgcagatctttgcgtacgttatgggcggcctggtcctggtgggtgtggtgtcactgataacccttcgatatctgaagaatcaacgatcgggtcgatatgatcgcagcagcattgtcttccgctccaatgccacaatggaagctaatctcaccctgggcagtgaagatcttcagtagcctgtacatttttaactttattaaagtggaaataaaattgcaaagtttaaacatttaattcgtaatggttgttaaatgatttcataacgctaaaatttcttcgtgcttgcttaaaacaacttcgagtggcaaaaacgcataggatgtcgtaaaataaaatccttttgccaaatatcttctattcaaaccaggaaggtataacattttatattcgaattttattgaagtgcagatactcaatttgtatactcaatagaaaatgcggaaaagaaattgatagggtgtctgcgaagaaagaaagaaagagaaacatttgtaagtttatctaaatcgaccttgcacacatatgtacatctgacttcctgtatggcactgagttttgataactgagagctttaagaccttcaaggaaattatacaaattataaacgtttttcttttatcatatggattttagcaaatataagatatgtaccctgatacaaccacttttccgaataataaaatcgggaaattaaaagtttgattttgttgtaccaaaccactcttagatatatttttaagttttaagcaaacctaaagattgttaaataaaataaaagatttgtgtttcgatttttataatacttttattatttcgtttatttcggtttgagttgtccttagatttcgttaaagcctggatcactcatcctacttcttcagcagcagaggagcggtgtagggggcggcaacgtagggagatgccacatacggagacgccacgtaaggggaagcgacgtagggagaagccacgtagggagaagccacatagggagatgccacgtagggagccgcaaaatttccgtggtattcccggctgtaaaccgcagccgccggagcagcagccaccagaggtgcggagtaggccagaggagccacgattccgggcttggcggccacgcaggcaatcagtgcgaagagggcgacggcgaagaacttgaacatcttggtggatttg

SEQ ID NO: 10169 - DNA, 1794 bp, DROSOPHILA
atggcagtctgcgaaattccactgatgcagtttacaaagttatttggcggcgagcggttcgtaaaaaagatgaatagaacgcgaaggatactcgaagtgatcgttatccttattctagcgatatcgagttgtgatggcagtggaggagatatccccctgcgatgcgacgagtacgattccatgggatacatggacgtgaatgaggcgttttgcacggtcaccggattcacggtcacacacagtcaaaatgtcgtgatcaagaacataccacccggaaatatggtcaagttcatgaagttttacgaatcaacgctgctctatatgcccttccatctattcgaaacattcccatatctcaagaccctcgatgtctcgaatacgaatattttggagctaacgagaaatgcattcagtgctgcgagtaatctcacctatctgaatctggcctacaataatctgacatctatccagacttctgtgtttattggcgccaatgttctgatgcgtttggatttgtcctacaatgagatatcctcgctgagtgtgaatgccttctgtggcctgcacaccattagccagatttatctaacgggcaatctgttgaaggagctgcacaacgatatcttcaaggataacgagtacttggagaaggtgtccttcgagggaaatctactgaccagcattcaaccggaggtttttcgcaatatgcggcgcatcaaggaggttaatctatccaataatcgcctgattttcatccatccggacacttttgcggatgcggcaagcttggagaatctggtgttgtcctataatgagttgaaaaacttccagctgacggagaagaatattgtgcatcagctgcacttggataataattatcttacaaatttgaccataaatgcaactcgattcgttcgcgccagtcacaatcaaatttcggagctctttctgcaccagagtttgcatatcgaaacattggatttaagtgccaacaagttgagtagcatatcgaatatcaccaatatcacacatatgctctacttggatgtatcggataatccaattggtccgcttaatatcagcaccttttcgcaacttaagagactgaggggactaaatttgcgaggaactggaattagagagcttaaatttggaatgttttcgaagcagaagtacttggaggaactggatctttcgtttaacaacctgaccattctcaatttggatatgtttgtgccctatctgactaatctgaagaagttcctcatcgacggcaatgggctgactgagctgcagggaaatcgcacgttttccgaagcttttccacaacttcagaaattgggagtatcgaggaaccgcttcaactgctcctatctacatcatctactcatcccaccatcgctacccgagtccgtagtgctcaatattgaaccggacaccaatctggatgagaccccacacattcgtgacgtatcctgcatcagtcaatcccaggaggtcgttaatgcctccttcaccgccgaggaatccaagctagaatcgcagattcaaatgctttcgaaacagttggatattgtaggctcgcattcgaagaatctggaacttcacctggcctttatgcagatctttgcgtacgttatgggcggcctggtcctggtgggtgtggtgtcactgataacccttcgatatctgaagaatcaacgatcgggtcgatatgatcgcagcagcattgtcttccgctccaatgccacaatggaagctaatctcaccctgggcagtgaagatcttcagtag

SEQ ID NO: 10170 - protein, 597 aa, DROSOPHILA
MAVCEIPLMQFTKLFGGERFVKKMNRTRRILEVIVILILAISSCDGSGGDIPLRCDEYDSMGYMDVNEAFCTVTGFTVTHSQNVVIKNIPPGNMVKFMKFYESTLLYMPFHLFETFPYLKTLDVSNTNILELTRNAFSAASNLTYLNLAYNNLTSIQTSVFIGANVLMRLDLSYNEISSLSVNAFCGLHTISQIYLTGNLLKELHNDIFKDNEYLEKVSFEGNLLTSIQPEVFRNMRRIKEVNLSNNRLIFIHPDTFADAASLENLVLSYNELKNFQLTEKNIVHQLHLDNNYLTNLTINATRFVRASHNQISELFLHQSLHIETLDLSANKLSSISNITNITHMLYLDVSDNPIGPLNISTFSQLKRLRGLNLRGTGIRELKFGMFSKQKYLEELDLSFNNLTILNLDMFVPYLTNLKKFLIDGNGLTELQGNRTFSEAFPQLQKLGVSRNRFNCSYLHHLLIPPSLPESVVLNIEPDTNLDETPHIRDVSCISQSQEVVNASFTAEESKLESQIQMLSKQLDIVGSHSKNLELHLAFMQIFAYVMGGLVLVGVVSLITLRYLKNQRSGRYDRSSIVFRSNATMEANLTLGSEDLQ

SEQ ID NO: 10171 - DNA, 5567 bp, DROSOPHILA
gctgttgaagcaggcgtcgtactgcttctttagctcattgcaatcctcgccaatgctgttcatttgtggagtgaagctctttgagtttcagttataatttctctattgaataataagtcgaaaaaaatgtgagaatggtttgtgtgagggtcatactacagataagctatcagagatgtgggacacagcatatcgatgtacgtttcgttgaaactgaacgtgctatcgaaatttgaattttcaattctttaagaacatctaatttattttaataaaggcactctggttataacgaaatcagttgtccatgtttcatgatgatactattaacagtcaaagtactacgaaatgtttctctttacaagtattttgtagcgcgtgcagccaccaattaacgctggcgaggattaggatggctatatggagcagcttacggggtcagctttcgcccgcctgctgctgttttgcatcagatctattcgcattattctcctcaagcccggtttcgaagatcggatctatctcttgcaaatcgatcttcttctccttaatagcgcgctggggattacaggttggtcaaaccatacgtggttagggagccgattagctcaccttgacgcattcctgataaacccggaaaatcggagcacacgctgagtcatccatttgaccttttaggaagcgttcagaaaaccagctgttgaaacaggcatcgtactgctgcttcagctcgttgcaatcctcgccaacgctgctcatttgtttactaggtatattttggttttaatttataatgcctattatagagttccgaaaaaatgtgacaaaggtacgtcgaacggtactactgaagaaaaggtttcagagatgtgagaaaaaaagagcatatcgatatccgaagttttgcagaaaacgaagcttgtcatcgaaattcaaatgttattcttagttttcttaaattttcaaaagccaaagtgttaagccgactaaaataatactcttgttagtacatataaatttaatattagttgttggtaaaaatttgcaaaaaaaagtcactgattttgtgtctcttgtttttaaggtttctttttcggttttgggttcatacaaaatgtagttattagtattatcatttaacgtaatgagcgctgaaacaaatgttcgtgtgacttggctacaacaatatgcaatggacatgataaaaacagacctccgacccagcctgaaaccgaatcggaggcctgaaagcatgtgacccaacgtgttgtccatggccattccattttaatagtcgaagtgctacaaatttgatctgtttaagttttgctgatgtttaagctaacgctcgctagagaggatgggctgaggttgcagcaacgtctactcctcgtcgatcgtttggacttgttgctgttgctgctgctgcctatcttggttgttcttgtggtgcccgcgctggttacggttccggttgttgcgatcccgccgctggccgagccaattgccgccctggttgttctggttgcggttgtagccacggtcaccgcgattgcccatgttgccgcgctggaagaagttgccctgcttcatgtcgaacaccttttcgttgacgtccaccagatttgtgaccttgtccacgaattgcatggccagggcctgaagacgcgatggctccgaacgatgcatacccacggtttcggatggatcgtccaggctggccatgagctcctcgttgatgatcatcttactgatgatggagtgcactttcggcacgggcagctcgtacatctgcgccagcgaaggaatgctgatcgaggtgtagacgttcgagtaggtgaacaggtaggtgcgcagcgattcttccttaatgaacttggtcagcatctcgcgcacgcgatcagactcgtagaagaggtcccacactttcgtgttcatcttcttgttgacaatgaagttggcacacgcctgccagttgccgcaacgcatagccttggcagcagccacgacatgctcacgcatcgactctggtggacccaccagtgattgacgctccgaggaacgcaactgctggtagaaggtcttactgatcatgcggcggcgggcgtcgaattcatgggcggcaatgtaaggaatttcgagcagcatagcggacaccaggtagacacattcaagcaactcaaggttgatgtgcatatggaatggcatctggcgttgcttctcgattttctcctgctcggcagatcgctcgtgctggcgctgaggcagcagtccttgagcgagcagctccttgggcttgccggtgaccatcaagtccactagacagtgatgcgcatccttgacgttgccctggcggaaggcacacagacccagattggccatcatacggttgtacaggatgcgggtggcgggatcggcggcatcaatgttgtcctgcagatgagacatcagcaccaaatcacgggcctggaaccagttgtcgtgcatagcatgatggtagatgtgcgccaggatggccctcgtacggatacgatccgtatcgtccttagcgtagatgaatttgcacagcttatccatcacgtctacggaggtggaggtagtggctggcagctcaccgcgcttcttcttcagcacctccggatcgaacttatagtagagatgttcgatcttgcgcaggtagatgcgacagcgctcgttgttggtgccagagcgctcgaaatactgcagcaccagttcaatagtcttaaccacgttcacctcgtccttcagccgggacacgtagtcgttggagtgtggatcgcattccttcagcagcttaacaaattcgtcatccaggcgctccacggcagccagtgggcatcccctcacataaaacggtgacgtagcgtactcctcatgctcctcggccacgctctcgctcataataatgtcggcgttggccagcaggagcttcatcatgctctgcattacctccagaagcagggcccagtgttctagcttcatgggctcggaaatcttctggttgtaatcgtagatagccgagatgatgttaaaatgaatcttcacggagacggcggttcccaggttgtgctgatcagagatgtccctcaactcgaaaagcagatcgatctgcagacggcgatcggtgcgcttcttgccgcgagccgacataatttccaacagcttggccagcactaggggaacatcgatctctgcgtccttttcgaacatcttgggcttctctactacatgacccttgaccacagtctcccactcgccatcttcatcgtcctcggcgcgcttgcggatcttggtcttctgctccttacgcttgtccttcctcttgtcatcatccttttcctccttttcggtagtacgcttcaagaatcgctcgcgcatgttctgatactggttctcatcgtcagaggactcggtctccgattcagagtccgagtcccaatcaatggagtcatcggaatcgtcatcatcggcgggcgcagcctttgccggcgcggacttcacagctttcggaaccgcttctgtaggcttcactccggcgtcgctgtcatcaccagcatcgccgccgtcgctctccagggcaaccacctcgtcctcggcctcgctctcctggtcgggtgcttcacggaaacgcgacagatcgtcctcgaagtccttgatgtacttgcgtaccttctggcgcaaagtgcccagcgacttggagttgttcttggaaaggtttttcctgccctcgcgatcctcccacacctcgttgatgaagtcctccagctcggccaggcagcgaatgtaaaatcgcggcgtaatgccgttctcctcctttgagatgaccggcagtgccttctggtaggcgcgcgtcagatcctcgaagctgctcagggtattgggaatatccttgattttcttgtggttgcgaatggttttgatgatgctggtgaggttctcgtaacgcttctccttcgtggagcggaccacgcgcttgacctcctcctcatcgtcgctgaattgctgttttccacggaaaggaatagattagtaatggatgagtttcacatctgggcggcacttacgaaggcgctggctttgttgaagttggtcgcttggatctcctcctcgctggactcggactccgattcggacccgttggcaaagaaacgcgacatctttgttgactttctacgcggccgtttgtctgcgcctggaatcacaatttattagtttcgggccacataagattttgctttgttgaggttatgtttgagcggccaacatggcgttttgcaaaaacgtatgccaaatatttccgcatgacatttggttgtttcattcgaagccctggcagaaatcggttcactgccttgctttttaagtgtttactaccacctggcgtttgatatttcacaataaacttactattttacagcaaaactaaacgatgtcgaatgcacaagacatcaaaaagagagactagagatgggcgatggttgcatgtgttttcgttggcgatatatattgctcaaagtcacggggcggggcgtttgatttatgtattaataataactgtcatgttgagaaatgattactctctactaatattcgtaaggagagcgttttaaacatttttttaaatgtaacagaacatttgtttttttatgtggcggaccaacagttaccgaaatctatcccatctctaagggagtcactgttttgactgaatgcgagcgcgtactcatcgataacgaaatgccggcacttctcgagatatatcgatatcaagtaaccggttgggcggtacatttaaaataaatccattaaattacatagcaaatatatcatcaaaatgaaatagtggccatttaagtaactattcaaaataatgttaaaaagataatcagtgatcaatgcttacatagatgttgcattggtgacctgcaacatttgaagttgccagcaacatgttgctgcgcttgcgtgcaaaagtgccggcatttcttagccaaacagagtggggttcccattctggcgccccaaccaatctccggatcaattggtccggccaacatgcagccaggcagccaaggaaaggccaaagcaaaaccaagccaaacgttttcgcgcgcgccaacaagtcgcatgcgttctctcctccgcgccgacggacagttcaagttcaaaaactcaatttttcggatgtactcggcgatttggcagcgttgatgccaatatccggcgatagagtctcaagtgcttttgcggcccgctaaaaagaattcaataaattcattcatttgaattcttgtgtgttgtgttgtgtcttggcggtgtaaacaaaatttggcccaagtgtgcggtgtgtgcgtggcatgtgctctgcccatccacatcctgtttaagtggcatcctaaatgagatgcgacgcccggaatcgcttgaaaacacgagtaacacggaaaacactttaacgcaaatgtaagcataataaataataactgcagattgatggagatgtgtgtatctgcggtctcggaaatggcaaattaaaaattgatcgg

SEQ ID NO: 10172 - DNA, 3290 bp, DROSOPHILA
aatacataaatcaaacgccccgccccgtgactttgagcaatatatatcgccaacgaaaacacatgcaaccatcgcccatctctagtctctctttttgatgtcttgtgcattcgacatcgtttagttttgctgtaaaatagcgcagacaaacggccgcgtagaaagtcaacaaagatgtcgcgtttctttgccaacgggtccgaatcggagtccgagtccagcgaggaggagatccaagcgaccaacttcaacaaagccagcgccttccaattcagcgacgatgaggaggaggtcaagcgcgtggtccgctccacgaaggagaagcgttacgagaacctcaccagcatcatcaaaaccattcgcaaccacaagaaaatcaaggatattcccaataccctgagcagcttcgaggatctgacgcgcgcctaccagaaggcactgccggtcatctcaaaggaggagaacggcattacgccgcgattttacattcgctgcctggccgagctggaggacttcatcaacgaggtgtgggaggatcgcgagggcaggaaaaacctttccaagaacaactccaagtcgctgggcactttgcgccagaaggtacgcaagtacatcaaggacttcgaggacgatctgtcgcgtttccgtgaagcacccgaccaggagagcgaggccgaggacgaggtggttgccctggagagcgacggcggcgatgctggtgatgacagcgacgccggagtgaagcctacagaagcggttccgaaagctgtgaagtccgcgccggcaaaggctgcgcccgccgatgatgacgattccgatgactccattgattgggactcggactctgaatcggagaccgagtcctctgacgatgagaaccagtatcagaacatgcgcgagcgattcttgaagcgtactaccgaaaaggaggaaaaggatgatgacaagaggaaggacaagcgtaaggagcagaagaccaagatccgcaagcgcgccgaggacgatgaagatggcgagtgggagactgtggtcaagggtcatgtagtagagaagcccaagatgttcgaaaaggacgcagagatcgatgttcccctagtgctggccaagctgttggaaattatgtcggctcgcggcaagaagcgcaccgatcgccgtctgcagatcgatctgcttttcgagttgagggacatctctgatcagcacaacctgggaaccgccgtctccgtgaagattcattttaacatcatctcggctatctacgattacaaccagaagatttccgagcccatgaagctagaacactgggccctgcttctggaggtaatgcagagcatgatgaagctcctgctggccaacgccgacattattatgagcgagagcgtggccgaggagcatgaggagtacgctacgtcaccgttttatgtgaggggatgcccactggctgccgtggagcgcctggatgacgaatttgttaagctgctgaaggaatgcgatccacactccaacgactacgtgtcccggctgaaggacgaggtgaacgtggttaagactattgaactggtgctgcagtatttcgagcgctctggcaccaacaacgagcgctgtcgcatctacctgcgcaagatcgaacatctctactataagttcgatccggaggtgctgaagaagaagcgcggtgagctgccagccactacctccacctccgtagacgtgatggataagctgtgcaaattcatctacgctaaggacgatacggatcgtatccgtacgagggccatcctggcgcacatctaccatcatgctatgcacgacaactggttccaggcccgtgatttggtgctgatgtctcatctgcaggacaacattgatgccgccgatcccgccacccgcatcctgtacaaccgtatgatggccaatctgggtctgtgtgccttccgccagggcaacgtcaaggatgcgcatcactgtctagtggacttgatggtcaccggcaagcccaaggagctgctcgctcaaggactgctgcctcagcgccagcacgagcgatctgccgagcaggagaaaatcgagaagcaacgccagatgccattccatatgcacatcaaccttgagttgcttgaatgtgtctacctggtgtccgctatgctgctcgaaattccttacattgccgcccatgaattcgacgcccgccgccgcatgatcagtaagaccttctaccagcagttgcgttcctcggagcgtcaatcactggtgggtccaccagagtcgatgcgtgagcatgtcgtggctgctgccaaggctatgcgttgcggcaactggcaggcgtgtgccaacttcattgtcaacaagaagatgaacacgaaagtgtgggacctcttctacgagtctgatcgcgtgcgcgagatgctgaccaagttcattaaggaagaatcgctgcgcacctacctgttcacctactcgaacgtctacacctcgatcagcattccttcgctggcgcagatgtacgagctgcccgtgccgaaagtgcactccatcatcagtaagatgatcatcaacgaggagctcatggccagcctggacgatccatccgaaaccgtgggtatgcatcgttcggagccatcgcgtcttcaggccctggccatgcaattcgtggacaaggtcacaaatctggtggacgtcaacgaaaaggtgttcgacatgaagcagggcaacttcttccagcgcggcaacatgggcaatcgcggtgaccgtggctacaaccgcaaccagaacaaccagggcggcaattggctcggccagcggcgggatcgcaacaaccggaaccgtaaccagcgcgggcaccacaagaacaaccaagataggcagcagcagcaacagcaacaagtccaaacgatcgacgaggagtagacgttgctgcaacctcagcccatcctctctagcgagcgttagcttaaacatcagcaaaacttaaacagatcaaatttgtagcacttcgactattaaaatggaatggccatggacaacacgttgggtcacatgctttcaggcctccgattcggtttcaggctgggtcggaggtctgtttttatcatgtccattgcatattgttgtagccaagtcacacgaacatttgtttcagcgctcattacgttaaatgataatactaataactacattttgtatgaacccaaaaccgaaaaagaaaccttaaaaacaagagacacaaaatcagtgacttttttttgcaaatttttaccaacaactaatattaaatttatatgtactaacaa

SEQ ID NO: 10173 - protein, 910 aa, DROSOPHILA
MSRFFANGSESESESSEEEIQATNFNKASAFQFSDDEEEVKRVVRSTKEKRYENLTSIIKTIRNHKKIKDIPNTLSSFEDLTRAYQKALPVISKEENGITPRFYIRCLAELEDFINEVWEDREGRKNLSKNNSKSLGTLRQKVRKYIKDFEDDLSRFREAPDQESEAEDEVVALESDGGDAGDDSDAGVKPTEAVPKAVKSAPAKAAPADDDDSDDSIDWDSDSESETESSDDENQYQNMRERFLKRTTEKEEKDDDKRKDKRKEQKTKIRKRAEDDEDGEWETVVKGHVVEKPKMFEKDAEIDVPLVLAKLLEIMSARGKKRTDRRLQIDLLFELRDISDQHNLGTAVSVKIHFNIISAIYDYNQKISEPMKLEHWALLLEVMQSMMKLLLANADIIMSESVAEEHEEYATSPFYVRGCPLAAVERLDDEFVKLLKECDPHSNDYVSRLKDEVNVVKTIELVLQYFERSGTNNERCRIYLRKIEHLYYKFDPEVLKKKRGELPATTSTSVDVMDKLCKFIYAKDDTDRIRTRAILAHIYHHAMHDNWFQARDLVLMSHLQDNIDAADPATRILYNRMMANLGLCAFRQGNVKDAHHCLVDLMVTGKPKELLAQGLLPQRQHERSAEQEKIEKQRQMPFHMHINLELLECVYLVSAMLLEIPYIAAHEFDARRRMISKTFYQQLRSSERQSLVGPPESMREHVVAAAKAMRCGNWQACANFIVNKKMNTKVWDLFYESDRVREMLTKFIKEESLRTYLFTYSNVYTSISIPSLAQMYELPVPKVHSIISKMIINEELMASLDDPSETVGMHRSEPSRLQALAMQFVDKVTNLVDVNEKVFDMKQGNFFQRGNMGNRGDRGYNRNQNNQGGNWLGQRRDRNNRNRNQRGHHKNNQDRQQQQQQQVQTIDEE

SEQ ID NO: 10174 - DNA, 3969 bp, DROSOPHILA
gggagaatctcaacgactggctagctgtgcacggtgagaattgtgaattatacaatatatacagtatacccaacgttgtatatttcagttgtggacttcttcaatcgcataaacttgatctacggcaccgtttcggagttttgcaacgaaactacgtgtcccacgatgtctggcggttccagatatgagtacttatgggccgatggagatctgtaagtgcaggaaatgatattgcgaagagcataaactaatgtagctacgatttcagatacaaaaagccaaccgccctttcagcccaaaagtacattgagcatttaatggactggattgagacacaaattaacaacgaagctgtttttccagtgtccacgggtaggaaattatatactttccttttaaagaagccctctcgcatatttcgtatatgagttatttaatgtgtaccatacttcctttcagatgttccatttcccaagaacttcatagcaataagtcgtaaaattttaacccgtctttttcgtgttttcgtccacgtctatattcaccatttcgatcggattgtgagcattggagcggtgcgtatcactaaatagttactttaattaactctataaactgttaaatgttttcaccactttcaggaagctcacgtgaatgcctgctacaaacatttttactactttgtgcaagaatttgacatgatttcggccaaggaattggaacccctacaagaaatgacatctcgaatttgcaaggataaggattgaaagtaattcgtactagattgtgatgtaaatatgtattgtttattacaaaataaataagcgaacacaaagcttggtgtccttttcttaataactaattttataattttagtttttcaaatttattgtttgttggtattattttctcatcaaaatggtgtgttaggggtactcctctgtaaagactggtataataaagttcaatagacttggtcgcaccgatgtaaacagagtttttcgcattaagtaaattaaattgctgatttatttttgttaaagttaagcacttcttagagtattttacaacatggagatggttgaaccggatgcgcacttggtggcactcaaaggtaaactctagttgtaatgcaaattatggacaaagtgtgatgtttttgttgttttcttagttatgcgtttgatgcggcccactttggtgggccttggacctgtggtaacctgcgagcccacggatttggtccagagatttagcagctcccaggagagcgacggaatgtccggtgcctgtgcggagaccttggcggccggccaggtgctactgctgccgcagtccttcggcagcatttacctgggcgaaacattcgccagctacatctgcgtccacaataccaccccgaatccggtggaatgcgtcaccgtcaaggcggatctacagtcgaacacgtcacgcatcaacctatccatgcacgagaacgccaagtcgccggtggtattgccgccgggtggaaccattgacgatgtgatacgatacgaggtgaaggaaatcggaacacacatgtaagtagcacaagatagttgcaaccacaagcttgttcctccatataatctaaagcagtacatagtactgtcttctggaagccccaataatatcattaattgtatatcctgaattcctttcagtctcgtctgcgaagtgaactactcgactcctgcgggctatgctcaatcgctgagaaagtttttcaagttccaagtgctgaagccactcgatgtgaaaaccaagttctacaatgcggaaatcgacgaaatctacttggaggcacaaatccaaaacgtgaccaccagtcccttctgcctggaaaaggtggagctggatggctccgaggactactccgtcacaccactgaacacgctgccaaatggggaatccgtattcacggtgaaacatatgctgcaacccaacaatagttgtcagttcctctattgcatcaaggtgagatgagttgaattctcttatctataaaaaattcatacaatttcgtatcttgcgtgcagcccaaaggagatattgcgaagaatgtagataccctgcggcaatttaataatgtgggtaaactggacatcgtctggaggtcgaatctgggcgagaagggcagactgcaaaccagtcagctacagcgattggtaggtgtacaagttgtaaataaaatagatcccaaataatattctcattttttagccattcgaatgcaaaacgctccgcctggaagtactggatgcgaagaacaccattaaaatcggcacgatattcacgttcaattgtcgcgtgacgaacacatccgagcatccaatgaaactgaatgtgcgattggctgccaagttttcgcccgatagtcaatacacgggctgtgctgattttatgctgaatcttctacaaagtggcgaatctgccgaatttccattgtccgtctgtccatctaaattgggcctcgtgaaaataacacccttggtattgacgaatacgctccaaaatgagcagttcaccattgaaaacgtcgtcgatgtttttgttgttaattcggattacgataatgataccacaactcatcagaataagttaattcgttacgagagtgctgcaagctgtttgacccaaaagcaagttcaactgcaagttgtatagaattgaatagatgcaaaaatgtatattttaaatttatgttaatgtgaaatggggttttaagtgacgggatagatattataatttatgttgttactctatgtaaaacgccatactttaataaaaaaaaagtcggcggtaaaatttttaatgaaaatttgctgaaatgtcctttagtgtggtcttgcgtgcattatggaatccttaatttcaattgcatattttatatactttcttgtacaaagatagttagatctctcttttgttagcacataacgaaaaaactaaataaataaaaaacatccccatgttctcacaacaaattaaaaaaaataccccatttaacttaaatcaaatatatttgaaaatttagaccacattttttatagcaacacggatttttaggaacttctgcgccggtaacactagtccactttttagatcacaacactagaacttaaaatgttacgaaatgtgtgcacattttccacgcattttggaaaatgcatattccaagcccagcaaccgattcgtggaatggcaggccattccaaatgggccaatatcaagcacaccaaagcactgaaagatggggcccgagcggcgctatttgcaaaaatttcgaggcaaattcgaatggccattcaggagggaaactccgcggatccggcaattaactcccttttgcgaacggaaatagaaagagccctcaagcaaaacatgcccagtggcaccatacaaaatacgttaaacaaattcaaggccagcaaagtgcaactaaagaagtaccgactcgacatcaagtacaaaagaaacgtgtacctcatatgcattttctataccgacaacttttctggcgttaaaatggatgcgacaccgatgatcaaaaaagccgggtaatatctcaatttgcatcattttgttggatataatttacctatgagatttttagaggcgaattcatggatgttggaagcctattcgaggattttggattgattgaaactcgctatgatactgcgaaacttcaaaatgaatccagtttggaggataaagccaccaatgatgctatagagttgggcgccgaagagatcgaagtcgttgacaatgtcgatggctccgtcaatgtatgttttcttttttttcatttatattatataaatattaattttcctacatttacatacagttcctatgcagtccagtggttttaactagcttaagtaggaacttggaaaaagccggatacaccgtggaaaacagtgaacacatattttcaccaat

SEQ ID NO: 10175 - DNA, 1658 bp, DROSOPHILA
ttcgcattaagtaaattaaattgctgatttatttttgttaaagttaagcacttcttagagtattttacaacatggagatggttgaaccggatgcgcacttggtggcactcaaagatgcggcccactttggtgggccttggacctgtggtaacctgcgagcccacggatttggtccagagatttagcagctcccaggagagcgacggaatgtccggtgcctgtgcggagaccttggcggccggccaggtgctactgctgccgcagtccttcggcagcatttacctgggcgaaacattcgccagctacatctgcgtccacaataccaccccgaatccggtggaatgcgtcaccgtcaaggcggatctacagtcgaacacgtcacgcatcaacctatccatgcacgagaacgccaagtcgccggtggtattgccgccgggtggaaccattgacgatgtgatacgatacgaggtgaaggaaatcggaacacacattctcgtctgcgaagtgaactactcgactcctgcgggctatgctcaatcgctgagaaagtttttcaagttccaagtgctgaagccactcgatgtgaaaaccaagttctacaatgcggaaatcgacgaaatctacttggaggcacaaatccaaaacgtgaccaccagtcccttctgcctggaaaaggtggagctggatggctccgaggactactccgtcacaccactgaacacgctgccaaatggggaatccgtattcacggtgaaacatatgctgcaacccaacaatagttgtcagttcctctattgcatcaagcccaaaggagatattgcgaagaatgtagataccctgcggcaatttaataatgtgggtaaactggacatcgtctggaggtcgaatctgggcgagaagggcagactgcaaaccagtcagctacagcgattgccattcgaatgcaaaacgctccgcctggaagtactggatgcgaagaacaccattaaaatcggcacgatattcacgttcaattgtcgcgtgacgaacacatccgagcatccaatgaaactgaatgtgcgattggctgccaagttttcgcccgatagtcaatacacgggctgtgctgattttatgctgaatcttctacaaagtggcgaatctgccgaatttccattgtccgtctgtccatctaaattgggcctcgtgaaaataacacccttggtattgacgaatacgctccaaaatgagcagttcaccattgaaaacgtcgtcgatgtttttgttgttaattcggattacgataatgataccacaactcatcagaataagttaattcgttacgagagtgctgcaagctgtttgacccaaaagcaagttcaactgcaagttgtatagaattgaatagatgcaaaaatgtatattttaaatttatgttaatgtgaaatggggttttaagtgacgggatagatattataatttatgttgttactctatgtaaaacgccatactttaataaaaaaaaagtcggcggtaaaatttttaatgaaaatttgctgaaatgtcctttagtgtggtcttgcgtgcattatggaatccttaatttcaattgcatattttatatactttcttgtacaaagatagttagatctctcttttgttagcacataacgaaaaaa

SEQ ID NO: 10176 - protein, 428 aa, DROSOPHILA
MRTWWHSKMRPTLVGLGPVVTCEPTDLVQRFSSSQESDGMSGACAETLAAGQVLLLPQSFGSIYLGETFASYICVHNTTPNPVECVTVKADLQSNTSRINLSMHENAKSPVVLPPGGTIDDVIRYEVKEIGTHILVCEVNYSTPAGYAQSLRKFFKFQVLKPLDVKTKFYNAEIDEIYLEAQIQNVTTSPFCLEKVELDGSEDYSVTPLNTLPNGESVFTVKHMLQPNNSCQFLYCIKPKGDIAKNVDTLRQFNNVGKLDIVWRSNLGEKGRLQTSQLQRLPFECKTLRLEVLDAKNTIKIGTIFTFNCRVTNTSEHPMKLNVRLAAKFSPDSQYTGCADFMLNLLQSGESAEFPLSVCPSKLGLVKITPLVLTNTLQNEQFTIENVVDVFVVNSDYDNDTTTHQNKLIRYESAASCLTQKQVQLQVV

SEQ ID NO: 10177 - DNA, 7327 bp, DROSOPHILA
cagcggctgcgacggcaccaccgccgcccaccggcatcgaggagagcttctcgcgaccctccttgatcaggtcgtcgatgctcttgccagccagctccttgatgaccttggtcagacgctcggcgtcgacctcaacgcccacagagctgaggatcttctccagatcgctgttggcgggcgagtccttgccaccgaggacggccagaaggtaagcagccacgtaacgcatgtttaagtcttgggttcttgacacgaaacgtgaattggcaaaatgtacgaaaaacacaactttcctttgcaagttgtcgtcgaaaaagaggcggaagtcagtgtggccgcgcggtcgaggctcgaaaataccagctcatacttatatataccaaagtataccacatccttatctagcaatacccctaatgaaacgataaattcaaatattattttcaattttgcttttaaataaaaattagagcaatattattgatttttgaacaatttggtgtgttttttttatatttacaacatcaaaaagtatttatattagcttaataatatgacctttcttacagcatggaaatgttatcagttgcaacactgggtttcaaacttggctatcgtaatagtgggaagcactttgctcttgcagtaggcggtcacaccatttgaaacggttctgttaggcgaggtctaacatactgttaagtgctggaaagagagcaaaatgagagtgatcgtaagctaagagaaggaactagggatgcgtaaaagttaacagctggctatcgatgattaacatgaccatcgttttaacagcagaacttaactgttatttgtacacataaatataaaactgtaataaaactcgaaaaagctgtataaaaaataaatttttttcgaaaatatgtttaatatgagatatttattattcttcaaaaacactttaaatttaagttgcacccccacttgaaataaattgcagaaaagacatgagacccatcttattgtatgctgtatatataattgcatatataaatgattgttgtacaaaattttgaaattgtataatgcattcctgaactttgtgtatcacatttcgatttggagggccttcaaacgccctcgagaatcgtttcacatgtaatggtcatcagatagttgatcggcagtagtattcacacttaacttacgactacaaacaaattaaggtattctttattccggatccgtatccccggacacaataactggactgtcgcgaaaaaataaacaaaatgcttcactacacttaaaggaacattggtaacaagaacgaagcgcggccgcaatgatcagtccactgccactttcacttccacatccataatccataatccataatccataatccattatccattatccttctgggcatcgagactataggggttcctgctgaaagtaatcgtgctccaaacaggccaaggcggatggtcgcaggtggaggtcgtaggaaagcattttctgcgggcaaacatagggtatgcgttagtctagaccatgcaacaagatatgtatcttcattttcatactcacattcaacagatcatcggcgtacttgcacaggtgtgggcaaaagtcttttggtctctttggatgccgctggggaaagtgttccagggccacggaaatggtctgtggccactgttgctcggtgggtctaccggtcagtctgcgtgaaatcgcataaatgtaattaaaaatcaccgatttcaatggcagtatttgtgcactcactcgaagatgcggtccagctgattcttttcggaggtgcccgggaatagggcgcgccgattgaacatctcgaagatgatgcaggcggcactccagatgtccacggtgctgttgtagggctgggcgagcagaacctcgggtgcgcggtaccacaaggtgaccaccacggaggtgagcttcatctccgaaccgtaggtcttggccaagccaaagtcggcgatcttgaggtggccctgcgaggagaccagcaggttttgcggcttaagatcccgatggatgatacggtgtgagtgtaagaagtccacaccggtcagtagttcccttgacaagcgctgcaataggaaataatttcatataccattttctgaaattttgatatcattttgagacccacctgaattgtgggcggcgacatgcccgatttgggaagtctgtctataagatccgaaagatcctgctccacatgttcgaaaaccaacagaatcagcaattggccgtcgcgctccagaaactggcatacttcgtacagtctgaaagagaggggaagtgcaatctttgtatgtacaaattgtttgattttgtgtgcgacagagagcgatgtatgggggaaatgttgagagatataaaaaaaatgtgtcataaaatgctgctggttgtggtgcgccaatacgccattggccatactttgttcgtttcgggaactacgcgaagcactcgagacaaacacatgcgcacatggcgatcaaagagccaaagagagcgtccagtaagagaggctacagatcgttttcggacagaggcaaaacgtaaacgttagcagagcagattagcattatgttatgttagcattatgttagaatcagttcgggcagttattttaacattgcctttgaattacttaaaaggcacagttttattgaaaccttctactgttacacttgctttagcaactggcacattgggtttttaaaaatacagataaatacaagaaacttaatttgccattgatttatttcttgtacccctccaacacttttggcttcaaacaaaataacagctgcactttgtagccatttgcaacttaacttaacattctgttgtgcgagatctctctctctctctctctctctgtcgatctctttgtactgtattcgcgtcgcgctctcacgctgctaaagtgcaagcgagtgcgcacatcgataacgcgcgacagcaacatgtggttatcgagctgctctgttaattcaaattcctaacggccgccgcaaacaaacataatgccaatacaaaatcgcccacatttgcgaactgcagtgatcagttatcagcgggagcggatcgacttgcttcagacttacttgacttgactggcatatgtcagaagcgagggcgttcgccgggggcaaatcgtcggaatattacggctatagcatgcacagataaacacaagcgcgctgacattgcgatgcggctctttacaaatgagtttggcaaatagctttggcgccgccacttggccccaatggcgggtgataacacccctcatatacagctagctagctatagttctacataaagtactcaactccaaggccatttagaagcccactgcccttgtggcagcgtgtaaatcacccatactcacttgacaatattcgcatgattgctggcattcagctgcttcagcagcgaaatctcccgcagcgtggacattggcacaccgttctcgttcagcgatatcctaaccttcttcagcgccactatgttgccggtgatcacatcgcgggctctgtaaaccgttccataggcacctgaaaagtggatcgaaattgtacatcaaaatgcttacaacgggaaataaatgcgaaagacagccgaaaatagaataaaataaagtcagctgtgccgataagataaatggcagaaatcagagaggcgagagaaagagagaaggtgccacttagcttcttcatatcattatggtgtatttatacttttcatattcaacatcgtatttatagcccttacgattgaagtgacttgatttatttgccttgttcgatgaactaactgtttataatgattgaatgaatagacaatgaatgcatttagcccaaaagaatcgtattgcaatgcatgcaataattgcatatattagagactatattatatgcactcaaaattagtcaaaatattgcacgaaattcagactaatttcctcatgaaactgttgctgtctcaggtacaacgtgatcttaatttctacatgttcacgggcaaagaaaaacgacaagagacgagcaaaattcccaatcagaatcaaattctggcatgccagagaaatgtcaccgaaaatttatcacccgtacggacaaatggacaaatggacaaacggacggacggacggacatgcgtggggggtagaaaagctagaaggcaccggctatttcggttgacactgacatacagaaacagcagatatgtactgatacacccgaaataaacgcaacttgagggggggggggggtgaatttggttttccgtccctttgtcaccgtctctagaccacctggcttatgaactgtgccgctgttgctacattcaagtacaaggccgtgagctcgactcgtttttgaacgtcggcaactggtctgtccaattggaattgtcaaaaaaatatacaaatatacaagcaaaataaactcgaaaaattgcgcaaagaaaacaacaaagcaaagcactatgggaaatttacgcactttatctggccgaaaaccgattaatatatgtaatattaaatgcatgcatttagttacaacggtgactactgttaggcaatgcaaaaaagttaattgaatgactatctgcaaactaaaaaatatatattatatatcattaaaaatatgggctagtgtaaggcaatgcaaaaaaagtttggagttagtttggccacaaaaagtggtcaaattttccatagtacaaagtagcaaaaatgagactgagcgaaagcgaataataattgaatgaatgtgcacagaaaggcagacagccgaaagtttgagtgtatgtgtgtgtgtgtgcgttgtataacagatgaaattgtgcggacccatgactcgcacaacacccagtaacaatatccatcattagcattcgcctgcccatgatgatcggcatgatcggtgacgtaattgatttgggctttatttacagcaaacaagcgatcgtaattactgaccacaaaaaaaaaagaccatgagccacttgtcagatcatcatggatgtgagatcggcagaaacacgtagtccgccgagagtggacctaaaagtatgcaggtagaaggtgtaggatccaatacaggggagttttccatccaatatttccccttttcgcggaatttccacgcttaattagtaaaggggtaaaaaaacaacaacattcctccaagtgcacttgtcatttcagcttcataacaatgtcggagctcccgattgatcgtaaacagtagtgaaaccaaatagcccagactttgtaagcaaattaaagtaatcaaacgttaacaacaagcgaccagcaaacgaaagcctctcgtgcgaagagagccggacctatcccaacaacaaagcaaccgcgtcccattattaaatcccacccaagtcgctcaccttcgccgatgatgttgagctcctggtagttgaacggatcgccatcgccgaacttcttcgcctgggacattttctgccgcttcagctggcgtacatatgacatttagctggattttacggttatttgcgtattcctctaatattccgggtaatcgaaaccgttagttgcaccagctggaagtgaaggggtgttttttttttggttatcgatcgtctgcatgtcacgtatcgatatgtccttgtgtccccacgcgatagttcacacagatcgtagcgtgagagggagagtgcgagtgcgtgagagagagagggagggccttacctgatttcatacctgttgccttttctagataaccccaaaactggcgataaagactggtgtgacaggtgcgctaatggaagaagtctggctatatgctccgctatgcttttctatctccgagaaccgaaaaccgaaacatatacatggacaactacatatgtatgtatgtatgtagatggcggcggtcgttgaaccgcgtttaatgttttcgtacatactccgtttttatgtctaaccaatcgcagaacggcaaaggccaacactagttatgacttattcatgttattcagtgacgctgctcgccgtctccgttttgcggcttcgttcgtgcatcctgttgctcttattcgagcttgactgtgaacgctgtactggttatctactgtcgcgttagttggcgtgtgtccactattctctcctatctaaagtgctaccacttttctgtcagtgcattttttttgcccgaaaaatatacatataccgcaaaaaagaacccgaatacaatgtattttgttgctggcatttgtcaattaattctaatcgcgagacaagcgaaacaacaataataagcgacacagtcacaaaactgggtagaaagagagtgtccagaattgtgaaaggtattacgaggtattacgagctgtatatttgggtctaaaatacatagttattgttgcaccagttttcgccccctctctctccctcgtcatccctctctcgctcaccatttgcgctctactgataaggaaatttcggcttcactttacttttttttcggtgaacttcaatgccaatgttgtcgtttttctttcaaccgttgtgcgaaatattagttaaatattaagaaaatgtggtttttatttgcgaagactcgaacacacacacaacgccgctaagtgatttcgcttgagagatcggtcttacacacacacacatacacaaacacaaacgcacacaccgagtggtacacacacacaggcgcaggtattatgtatacatatatgatttttattcgctttgacgaaattttggcatttgttgataatccagctagaaccgcacgataggagcaacgcgacgcgaattttcggtgcgaacacggttcagttgccggcagtcgcactttaattaagtttttaaaacgtcttataaatttttaccaatattcgtaagagttgagtgattttgtgttttgttgttggcacagctctggaaactgttttagatggtctacttaacagtggcttctcttcgcctgttatcgcccgctgttagcaaacagacggccgctaacattgtgctgtatacgtccaatcggttaaacggttaatttcgaaattgctgccagcgatcgttattgaatgttattccaattcgataacgtaagtgttattgtgttatactaatgttattgatttctgggaatttgatattttcaacttgtaataatgcccaaatttattttttttgcaatgtgaatttcaggcatttatatatgtaacatatataaattacaaataaataaataataataaacataatgaaaataatatttgaaaaaaattttta

SEQ ID NO: 10178 - DNA, 2010 bp, DROSOPHILA
ttattattgttgtttcgcttgtctcgcgattagaattaattgacaaatgccagcaacaaaatacattgtattcgggttcttttttgcggtatatgtatatttttcgggcaaaaaaaatgcactgacagaaaagtggtagcactttagataggagagaatagtggacacacgccaactaacgcgacagtagataaccagtacagcgttcacagtcaagctcgaataagagcaacaggatgcacgaacgaagccgcaaaacggagacggcgagcagcgtcactgaataacatgaataagtcataactagtgttggcctttgccgttctgcgattggttagacataaaaacggagtatgtacgaaaacattaaacgcggttcaacgaccgccgccatctacatacatacatacatatgtagttgtccatgtatatgtttcggttttcggttctcggagatagaaaagcatagcggagcatatagccagacttcttccattagcgcacctgtcacaccagtctttatcgccagttttggggttatctagaaaaggcaacaggtatgaaatcagctggtgcaactaacggtttcgattacccggaatattagaggaatacgcaaataaccgtaaaatccagctaaatgtcatatgtacgccagctgaagcggcagaaaatgtcccaggcgaagaagttcggcgatggcgatccgttcaactaccaggagctcaacatcatcggcgaaggtgcctatggaacggtttacagagcccgcgatgtgatcaccggcaacatagtggcgctgaagaaggttaggatatcgctgaacgagaacggtgtgccaatgtccacgctgcgggagatttcgctgctgaagcagctgaatgccagcaatcatgcgaatattgtcaaactgtacgaagtatgccagtttctggagcgcgacggccaattgctgattctgttggttttcgaacatgtggagcaggatctttcggatcttatagacagacttcccaaatcgggcatgtcgccgcccacaattcagcgcttgtcaagggaactactgaccggtgtggacttcttacactcacaccgtatcatccatcgggatcttaagccgcaaaacctgctggtctcctcgcagggccacctcaagatcgccgactttggcttggccaagacctacggttcggagatgaagctcacctccgtggtggtcaccttgtggtaccgcgcacccgaggttctgctcgcccagccctacaacagcaccgtggacatctggagtgccgcctgcatcatcttcgagatgttcaatcggcgcgccctattcccgggcacctccgaaaagaatcagctggaccgcatcttcgaactgaccggtagacccaccgagcaacagtggccacagaccatttccgtggccctggaacactttccccagcggcatccaaagagaccaaaagacttttgcccacacctgtgcaagtacgccgatgatctgttgaataaaatgctttcctacgacctccacctgcgaccatccgccttggcctgtttggagcacgattactttcagcaggaacccctatagtctcgatgcccagaaggataatggataatggattatggattatggattatggattatggatgtggaagtgaaagtggcagtggactgatcattgcggccgcgcttcgttcttgttaccaatgttcctttaagtgtagtgaagcattttgtttattttttcgcgacagtccagttattgtgtccggggatacggatccggaataaagaataccttaatttgtttgtagtcgtaagttaagtgtgaatactactgccgatcaactatctgatgaccattacatgtgaaacgattctcgagggcgtttgaaggccctccaaatcgaaatgtgatacacaaagttcaggaatgcattatacaatttcaaaattttgtacaacaatcatttatatatgcaattatatatacagcatacaat

SEQ ID NO: 10179 - protein, 317 aa, DROSOPHILA
MSYVRQLKRQKMSQAKKFGDGDPFNYQELNIIGEGAYGTVYRARDVITGNIVALKKVRISLNENGVPMSTLREISLLKQLNASNHANIVKLYEVCQFLERDGQLLILLVFEHVEQDLSDLIDRLPKSGMSPPTIQRLSRELLTGVDFLHSHRIIHRDLKPQNLLVSSQGHLKIADFGLAKTYGSEMKLTSVVVTLWYRAPEVLLAQPYNSTVDIWSAACIIFEMFNRRALFPGTSEKNQLDRIFELTGRPTEQQWPQTISVALEHFPQRHPKRPKDFCPHLCKYADDLLNKMLSYDLHLRPSALACLEHDYFQQEPL

SEQ ID NO: 10180 - DNA, 6326 bp, DROSOPHILA
gtcgcagcgctctcgtcgccggggcctggactccattctctagccaacggataacctgttatcggaaacaataaaaggcaattgttgttaatgcatttgacataaaacaagtcttcgtttctttcatccgtttaatgggccatttcgcttgccaatggttttgcttccgcttgtttttttttcgtttgaattctttaacaataaaattgtaatttagcgctacaccttacagtttaatagtcgccggtgcagcatatccatatatattatgcatatatataaacaaaaataacagtgaacgtaataatatgatgcattattgtatattttgggcgatccactagccttgatccccggcactcaactgcgtctgctactcaaggatgtggaactctagcactgagacgaggataatgtgtgatgatagatcgaaacagtcgagtgcgtggagcaaggacaatggacatagctaggctacggctctctacatggggctggttagttatagtaccgggtgtagattatggggcattgtaggtctgggggagacgtagttctctgggagctgttttctgctgtatctgctgttccttatattttgtaacatctcagtttgaagatttcggctgtaatttgattacaaattattgaatttttccttctgccgcgcgagcgtgtgctttacatttttgctcttgattactttacaacgatcaacataaatatatgtatgtatatgcgtatatcatttgaaaattgtttaaaaaaaatatatatataattgttgtaaatcaaaggttgtaatacataggtaatagtattttacaagaaggttatctcatttcaaagtaacatagatacagtatcatcattagcatatacttttaacaagaatttcgcactttgcctaaaaatgtcatattgtgtgtgtatagggtgtgtgtgtgtgtgtgtttgcgtgttgtgtgtgagagcgagagttttgtgcagaacaacaactacgatttaacctccgactatggagtgataaaactctctcaccgactcctcgcagagtattcatacaagcagctgggtccgggcgggccggtggtggggcagtggccaggcggtggtttggcggaacggcaggtatttcgaacaccgtgtcgtccccgcctgcccaggtggcccctgccctggatccaccccagccatcatcccatttcctaccgccaactaatagctacgcttaggtttagctgtcgctgctgctgcaaacgtttcgaacgccggccccgctcgcggccacgcccaccggcgacgcctacgtgctgaagccccgctcgtagggactcttcacgtccgtgtgccgcgtgtgcagattgattgttggcccggcgggccgcgtcgacagctcgcacaccgtcttaatggcaccggaggcattgaccgaggtcggggcagagtgcagggtggccgtggtgtccttctcctttgccgcctcgcgctcctgatcgatctgctcctcatccgtagtcctcggcagcacgtagtccgctttgcggggctccgagctgcccgtaattgacgatttgtactgatcagcgtccaggccgcacaggtagaacttgaagaactcgtacgtcgaccagcagatggccgtggcgggcattgagtacagaacgcgggcggtcgtgcccctaaagaagcccaatggaccggccatgtggtagatctgtgagagggcaaagagcaataagtatgggagatttcattcaacgcgagacgaagctactgtgaactatgacctttgtcagccaattataaattgtgaattacagacacatttgcaagttcgtaagcagtttctccagtacagatagcaccatatttacctttcgactggcctcgatcatgccgcgcgtcagtcctgtctcctgagtatttagtagcgtcttgatcacgtccaggggcgtggttacagccgccgcacacgcaccggctgctgcacccgctgccatatgcactggtggattgtatttgcgttccagattcatctgccgtgcacacgaagattgagtgtcggttactgaaaggatgagttcgttggggcgtacttactttgttctggaaaaactcgtatgtggtaaaatgtattgtctgatatggtagattcatgaccagttgcgtgccatatgcccggtagaaggccttgaagccttccctcttgtagatatcccgcacgcaggataccaccgatgtgtagggcgagttgtacatctgcatacgctgtttgatcacatccgtgggactagaaatggcgtcgtgtatgagggtggccaccgctcccgaaatcactgaaatggtcaaatgggcttgattagtaatccctcggtgcaggagaacatgaaaaccttaccgtagttgaggtttctcaccgatgtgaacttggccgtgagctccttggtcatctcgtaggcggcaaagtatagcgagtgtgctggtccagcacccagcaccacggcgctggctccccgaatgggtctgcaagtcggcggttacagtgattactcgatatggcggatagcactcaccttaacaggccttcacgcgtgatcatagtccgaagggttgacactatgttcatgttttttgtgggcggtgaaaggctctgcattcgcgtctataagtgggcaataatggaacgtttaaaataattgcatatatatttacattgtgcatttcacaatggcagtacttgttattttatttactcattgtttgtcctagattaaactggttaaagtggtgcgtcagggctactaactttggctatgataatacataaaaaaaaggtagattaagtcgagggtagttagccgtatagactcgttgctcgttgcttttcttctgcaagtcatggttactcatgatatgcaatacagagcccaatacaattgtgggggatatccaatattcatttcgcttactgacattgccaagaccttagaacgtgctctcatcatgatttgtgattcagaactgatggggtgatgatttccgaaactatttcaatctggctgtcggcgagaatctaattgtgcaatgtggcagccgaaaagggaaataattgttcagaatatgcatagatctcatcaaaagaaagtttttcgaattttgttcgtcccataattgtcgagataagggctatataatctgtaaacaacagcagggactaataattgatatcagtggaatatacaaatatataattgcatgcttcccggcaaaactttcgctgatttacgagccagtcactcggagcctagagatttgcatttgcctacgtatttaatgattgcatatgcacatacatatatatatatatgtatgtatatatatatatatctgttcatacttaattgtacttatttaaaggcgtgcctgtcgagcacacaagtcggaattatatctgggagcagagagcagcatccatattgtaaattacgaaggccttggctttgcgatgcagataagattcactggaacacggcccaactgcatttatctatctgccggctggctgctgctatcaataacaagtcaacaatgccatccaaggtgaaaagtagcccctcgagtgggggaaatctaattaaagggttctctgcgacgaactgatagaagtttccattgcataaaagcccgatagagctgcgttcgaagagatcgcggagccaacatgattcattcatcccgatggtgtattgtgtgtgtgccgtgataagagaacccggtgataggtaattattgcaagcaagcggcctcaattggtgtccaatttggttttccgctctctggcttttaaaacttcacgaattttagctcgtcaaacggactgtgtccagaatctagattataacgatgacgccgggaataccgaccaggctttagactggcaaccaactgcctgccggctgtcacttgcgcgattgacacatgtggccacgaaaatcaataagtgctcgagccaccagccagctgagtgaaatacaacgaaacaagaatcggtcaataataggtattgaatgcgtggtgtacatatgtacatatttacatataaccatatacatatgtgtatatacttgcggcgaacgtcattacgaggtgggcatttgcatacgcttaagtggcggacttgtgcacttggttggccctaccgaattttcagaagaacgatgagaacgctccgccgataagagctagtccaattactatggctaatcttatcgcggaagcataaaccaatggaacgtgctacgataagcgttcagagcggctatatgtggctataccacccagagctcttaatgagaaacgcaactcttggttgcactcgagacgtgggcaattacatcacgattatgccaaagcagcggcggcacacacaaaattccgattgatagtgaggttaggtcgtgttatgttcatgccgctgctcctccgattaccaggcggccatgcagtctctctcaccttgacggagtccagcggatacatgaccacatgctccagcacgcccgcaattgcgcccgccgtcatattgacacccacactggtggtgggcagcgattcgtagtcgtcgatgttcatggtggatccgaacggttgccgtcgctttcgattgttgaggctgctggtggggctgcactatcgactgtgttgtgtgctaatgctgtggttgcgcccttgcagtcgctgctcctcttacgacaacctgctaatccggaccagttctgccaagtcgctgttgcagttgctgctgcagagccgctttctccgctgggatcgggtcgctccgcctgtcgaggatcggcgttggttagcgggcaactcttggccggcgtatgtcgggcacttttggtgcaattttgttgtataacacggataacacgacgattcacggacgcacgggcgggtgtatttcggggggtggtgctgctggcggaggcggcggcggtggcggtggtggtgcagagtgtacgcgtgaggtggtcttatgcgaaactgctaattgacactgctgttgcacgactagcatacagacgacatagagacgattccccgattcaacgattcacgcgaggaagcaatttctggtttagttgctcgcggctaagctgctgctgctggagtggcggctgcggatcggttgttttatgaatatataagagtcggtttgtggccgaagcggaattttggctgggtcggtgtttggcaactgacgcaaatgttgtatgattacagcgaatcattaaatttcgcccaataaacaagcctcgtgcccagagtgaccgcagcgggaacgtcgcaaaataccaaaatggctcgggtgaaaataccagcacaagtccacccacatgtgggtgcggaaccttaacgccatggcaaataaaaataccaacattaaaatatttaacttaacattgtaaaataaaccgaacggtacaaaatcatatgttatatattctaaaacgaaatggatttccttgatctctgtcaggaatttatattttatttcaattcatatttttatcattactttgctatatcaataagttctcagttatctattttggcagcttaaaaattgtatatacacgaagttgttgtgcaaccgaccgaagaatttattattttaaagcttagttgttgtatacatgaaaagatactaatttgtttcaaatataaatcatatatctaccggcctaagtgttcccttttgtaaactattgatataagaatgtaaattatcaaattaaatatatttaacagtagagttttgacactacatcctcttgtaaactaaatcccaaatagattctatgaatgtatgggctttcaaataagcaaacattaaatttatttaaattacactattttcgtgctctgtgctgtatatatatcctatttccagtgcagcccctggtatttccttccaatgcgcttagaatgttccagcgccggaatacggtcactctgcgaggcatttaaaggccttccagccgcttgtcggcgtcagtaaaaaaaaatcaaagcaggcgacgcaagtgcggactaatttattgcatctgttattcgtgacgtggcctttcgccggacgaaccgatagctcgagctccgtaaatcaagctaccaaagatcatgaagtactttttgctggtgggcctgctgctcctagcaggtaagtgtgcacatttgccacgccgcattgaaccggtgttttaacctaattattaattggcgtctgattcgcgtctgattaggcatcaatcaaatagccg

SEQ ID NO: 10181 - DNA, 2137 bp, DROSOPHILA
cacgaggcttgtttattgggcgaaatttaatgattcgctgtaatcatacaacatttgcgtcagttgccaaacaccgacccagccaaaattccgcttcggccacaaaccgactcttatatattcataaaacaaccgatccgcagccgccactccagcagcagcagcttagccgcgagcaactaaaccagaaattgcttcctcgcgtgaatcgttgaatcggggaatcgtctctatgtcgtctgtatgctagtcgtgcaacagcagtgtcaattagcagtttcgcataagaccacctcacgcgtacactctgcaccaccaccgccaccgccgccgcctccgccagcagcaccaccccccgaaatacacccgcccgtgcgtccgtgaatcgtcgtgttatccgtgttatacaacaaaattgcaccaaaagtgcccgacatacgccggccaagagttgcccgctaaccaacgccgatcctcgacaggcggagcgacccgatcccagcggagaaagcggctctgcagcagcaactgcaacagcgacttggcagaactggtccggattagcaggttgtcgtaagaggagcagcgactgcaagggcgcaaccacagcattagcacacaacacagtcgatagtgcagccccaccagcagcctcaacaatcgaaagcgacggcaaccgttcggatccaccatgaacatcgacgactacgaatcgctgcccaccaccagtgtgggtgtcaatatgacggcgggcgcaattgcgggcgtgctggagcatgtggtcatgtatccgctggactccgtcaagacgcgaatgcagagcctttcaccgcccacaaaaaacatgaacatagtgtcaacccttcggactatgatcacgcgtgaaggcctgttaagacccattcggggagccagcgccgtggtgctgggtgctggaccagcacactcgctatactttgccgcctacgagatgaccaaggagctcacggccaagttcacatcggtgagaaacctcaactacgtgatttcgggagcggtggccaccctcatacacgacgccatttctagtcccacggatgtgatcaaacagcgtatgcagatgtacaactcgccctacacatcggtggtatcctgcgtgcgggatatctacaagagggaaggcttcaaggccttctaccgggcatatggcacgcaactggtcatgaatctaccatatcagacaatacattttaccacatacgagtttttccagaacaaaatgaatctggaacgcaaatacaatccaccagtgcatatggcagcgggtgcagcagccggtgcgtgtgcggcggctgtaaccacgcccctggacgtgatcaagacgctactaaatactcaggagacaggactgacgcgcggcatgatcgaggccagtcgaaagatctaccacatggccggtccattgggcttctttaggggcacgaccgcccgcgttctgtactcaatgcccgccacggccatctgctggtcgacgtacgagttcttcaagttctacctgtgcggcctggacgctgatcagtacaaatcgtcaattacgggcagctcggagccccgcaaagcggactacgtgctgccgaggactacggatgaggagcagatcgatcaggagcgcgaggcggcaaaggagaaggacaccacggccaccctgcactctgccccgacctcggtcaatgcctccggtgccattaagacggtgtgcgagctgtcgacgcggcccgccgggccaacaatcaatctgcacacgcggcacacggacgtgaagagtccctacgagcggggcttcagcacgtaggcgtcgccggtgggcgtggccgcgagcggggccggcgttcgaaacgtttgcagcagcagcgacagctaaacctaagcgtagctattagttggcggtaggaaatgggatgatggctggggtggatccagggcaggggccacctgggcaggcggggacgacacggtgttcgaaatacctgccgttccgccaaaccaccgcctggccactgccccaccaccggcccgcccggacccagctgcttgtatgaatactctgcgaggagtcggtgagagagttttatcactccatagtcggaggttaaatcgt

SEQ ID NO: 10182 - protein, 379 aa, DROSOPHILA
MNIDDYESLPTTSVGVNMTAGAIAGVLEHVVMYPLDSVKTRMQSLSPPTKNMNIVSTLRTMITREGLLRPIRGASAVVLGAGPAHSLYFAAYEMTKELTAKFTSVRNLNYVISGAVATLIHDAISSPTDVIKQRMQMYNSPYTSVVSCVRDIYKREGFKAFYRAYGTQLVMNLPYQTIHFTTYEFFQNKMNLERKYNPPVHMAAGAAAGACAAAVTTPLDVIKTLLNTQETGLTRGMIEASRKIYHMAGPLGFFRGTTARVLYSMPATAICWSTYEFFKFYLCGLDADQYKSSITGSSEPRKADYVLPRTTDEEQIDQEREAAKEKDTTATLHSAPTSVNASGAIKTVCELSTRPAGPTINLHTRHTDVKSPYERGFST

SEQ ID NO: 10183 - DNA, 3704 bp, DROSOPHILA
cgtgcactccgttgtccgccagctggagcgtgtagctgaagggaattccgatctcgtaggcggcaaaagcgtccgcacagcctggataaatcaaggaagccaaaggattggcaaggtcggataaagatctctattatattctacttcgaagcaaataatataaatattacgcacccgatcgctgttcaattagatcgttggatgcgtcgaccttatatcgggacttactaccctttttgcgcaatccatcggtacccaccatcgccacgtccagaaaatcatccaatctttctgaattgaaagtggaattggccttgaccggataggatatcacctgaccataggcctgtagggaaatgtaaagctgcaaaaataatgaataaagttaataaatcaaaaaatatatctattttagagagttaatataaaaattatatattgttctaagcatacctttatctgcgtcctatagtccataaggaactcagatactgccttggtttccggttcagaaaatggcgctggaccggcgtagaactcattgcagggtgccttggagctaccccgtttgccccaatgatacagccagtttctgtccaggtccaccccgtagcagaccttatccggaccccgtttttgctggagccatgtcatcgccgagtcgaggaggccactgggaggtggagtctggtgctgagatcgcgacttcttccagaaacgatcgtactcgtggctgtacgcatatccgtccggattcaggaccggcattatgtaccatgtggtgttccggatgaactccacgtcctcgttgctttctgttgagtaaacgttttatgggttatttttatacataactttacataatgcatatgaaataaatgttaataaatattaattctcttaagaaaataaatacgttgttcaaccgatcaacgtagccgcttttccccaactcaaattacattagttatccctttgtcagtccgttagtcagtatatttgtagacccagaaatcgatagtgtatactttagacctttacagcttgccacttctcctccagttggaccaagatcagaatggagaggcgaagaccccgaaagtcctcgcgtaaatacgtgtgctccaaatcaaactcttcagttggaggaggagtagaggaagacagtggctcatcattgcctgccaccgccaaagcgttactcctccagccggacggtaataaagcaccaaccatgacatcccttctgggcgaacgactcagaagagtttctcgcatcgcaagagctccgcacagcctacaagttaccgaaaatccagaagaaggtggagcaccaatcgtaccactaagagaatccggcgcatcggaagtgtcagaagtaaatccgggggttatggtcattccggagtcggccagtccccggggatcggcggtgcatggacaacacgctagcttggtcttcagtgctgaagccagggattcggacagtacgcggatatcggaggaaatggtggaagtgttccaaacctcttcggcgagaaccacatccaatgagcccgcagggggcaatctgcgctttgaaaccactcccgtggctgtaagcgaaagtatggttggcaatataaacttctccccgaacgccatctacgatcagaacaggtatagcagcatgatgtccaacggggattacaataatggcaacaggggtgagagtgagaggagcgtgggagcctgccaccatggttgggcggcgcgacaacaacaagttgccgctggacctgccggcagagacaccctgggattcgccatcagtctgggcgccgctaatttgggccagaaccgatgcagtctgggcgttgcatgcgatgaggactgtggctatggaactggctgtgattttggatgcggtcaggcccatggcgttgatcccggaagctttctaggtccgggaaccatgggaactggtccattaatattgacaacgggatcaggaggcccacctgtacagagcgccctacgaggagctcaaggtggcggctataagcaagttggcgccgggcagcggggaacttttggaacagatttcggaagtgagcagcttaacttcttcattaccttcctattggaggtcctcggtgttttagtgtgagtatatatttatatattccaggattggatcattccaactctatgataatctacgtaatcttccattagtttttttgccatctgcacgataacattttggattactctgggctaccatgttgtccagttgctggtggacctgaagaacgccgatcgcaacattcaggtggcggtggccattgtgttcgggctgctgctcgttgcgtttgccatatcgcaggtgaccaacctcagtggttcctgctgtcattcacgggatcgagcccgttccagaaccaaaggtggtggcattggcttctttcacagatccaccaagccaaagaccaagagctgtgcatccaaaaccaagacctgtgctcataagccgaagattaagaaggcagccacttgtggacccagcctgggctttcacacgcaccgcaaaacgaggtatacggattgcgagggacgggcaattttcttgagctcgagacgatatgctattccgactgagatgaaacaaccacccaccattgtgctctggatgcgcgacacactggttcgcatgttgcagtaaccaccaacgaagccccacgttgggcgccaataatacttaaactgacttaagactgcgaaactatacgtattgcctggaaacacgaaccattcgatcatttgcaaaaatttcaatttgaataaactttaagagaaaacttttgtaggtattactaaattgttacttatgatctgggccagtattattaatatcgtgaaatagatgtttaagaatacgaacatactagttcggtaatagtatatgtgtatatactcactgtttgttttcattagtcgcagcagttcggcaatcatccaggtggccgccgcgggtccaatccaggccaatccctgagcaccagcttcgacgaaaacggcatttgcctggcccgacttccgcttccgcttgggtcgcttgatggtgtgtagaccatcgttgttcgccgccgccgccgtctgtttggattcgatctttaccacaattaagggtcgaccttcgaaggaacgaccaatgtggatgagctcaacgagctgcggatgacgcattcgcaccgtctccagatacttgacgatctcatcgtgattatggtaacgattccatgtcatgggcggtggtgccgtgggacgcggcttcgagggacgagtggtttgtaggtaatcctctttggtcagttcgtatgcgatggccttgcccacatcgaaaatgagcacttcgtgcgctatgccctcgtagtttagagtgccctgaaagtccacgagcatcttgggtggcacaagaacatccgtaagacctctgaaacgatgaggtgagtgagaagatttggtttaaaatgtattgtaataatccccaaattgattgtcatcatacatttttgagctttaagtctagcttacctgagacttggacccttgagccattgcaacttaacgccgtcctcgccctttttgaactcctccagtgcacggacctgctcttcatcctgcggctttagacgccaaatctgatacttgtcatagcttat

SEQ ID NO: 10184 - DNA, 1632 bp, DROSOPHILA
tgtagacccagaaatcgatagtgtatactttagacctttacagcttgccacttctcctccagttggaccaagatcagaatggagaggcgaagaccccgaaagtcctcgcgtaaatacgtgtgctccaaatcaaactcttcagttggaggaggagtagaggaagacagtggctcatcattgcctgccaccgccaaagcgttactcctccagccggacggtaataaagcaccaaccatgacatcccttctgggcgaacgactcagaagagtttctcgcatcgcaagagctccgcacagcctacaagttaccgaaaatccagaagaaggtggagcaccaatcgtaccactaagagaatccggcgcatcggaagtgtcagaagtaaatccgggggttatggtcattccggagtcggccagtccccggggatcggcggtgcatggacaacacgctagcttggtcttcagtgctgaagccagggattcggacagtacgcggatatcggaggaaatggtggaagtgttccaaacctcttcggcgagaaccacatccaatgagcccgcagggggcaatctgcgctttgaaaccactcccgtggctgtaagcgaaagtatggttggcaatataaacttctccccgaacgccatctacgatcagaacaggtatagcagcatgatgtccaacggggattacaataatggcaacaggggtgagagtgagaggagcgtgggagcctgccaccatggttgggcggcgcgacaacaacaagttgccgctggacctgccggcagagacaccctgggattcgccatcagtctgggcgccgctaatttgggccagaaccgatgcagtctgggcgttgcatgcgatgaggactgtggctatggaactggctgtgattttggatgcggtcaggcccatggcgttgatcccggaagctttctaggtccgggaaccatgggaactggtccattaatattgacaacgggatcaggaggcccacctgtacagagcgccctacgaggagctcaaggtggcggctataagcaagttggcgccgggcagcggggaacttttggaacagatttcggaagtgagcagcttaacttcttcattaccttcctattggaggtcctcggtgttttagttttttttgccatctgcacgataacattttggattactctgggctaccatgttgtccagttgctggtggacctgaagaacgccgatcgcaacattcaggtggcggtggccattgtgttcgggctgctgctcgttgcgtttgccatatcgcaggtgaccaacctcagtggttcctgctgtcattcacgggatcgagcccgttccagaaccaaaggtggtggcattggcttctttcacagatccaccaagccaaagaccaagagctgtgcatccaaaaccaagacctgtgctcataagccgaagattaagaaggcagccacttgtggacccagcctgggctttcacacgcaccgcaaaacgaggtatacggattgcgagggacgggcaattttcttgagctcgagacgatatgctattccgactgagatgaaacaaccacccaccattgtgctctggatgcgcgacacactggttcgcatgttgcagtaa

SEQ ID NO: 10185 - protein, 517 aa, DROSOPHILA
MERRRPRKSSRKYVCSKSNSSVGGGVEEDSGSSLPATAKALLLQPDGNKAPTMTSLLGERLRRVSRIARAPHSLQVTENPEEGGAPIVPLRESGASEVSEVNPGVMVIPESASPRGSAVHGQHASLVFSAEARDSDSTRISEEMVEVFQTSSARTTSNEPAGGNLRFETTPVAVSESMVGNINFSPNAIYDQNRYSSMMSNGDYNNGNRGESERSVGACHHGWAARQQQVAAGPAGRDTLGFAISLGAANLGQNRCSLGVACDEDCGYGTGCDFGCGQAHGVDPGSFLGPGTMGTGPLILTTGSGGPPVQSALRGAQGGGYKQVGAGQRGTFGTDFGSEQLNFFITFLLEVLGVLVFFAICTITFWITLGYHVVQLLVDLKNADRNIQVAVAIVFGLLLVAFAISQVTNLSGSCCHSRDRARSRTKGGGIGFFHRSTKPKTKSCASKTKTCAHKPKIKKAATCGPSLGFHTHRKTRYTDCEGRAIFLSSRRYAIPTEMKQPPTIVLWMRDTLVRMLQ

SEQ ID NO: 10186 - DNA, 2975 bp, DROSOPHILA
gactgcaaaccagtcagctacagcgattggtaggtgtacaagttgtaaataaaatagatcccaaataatattctcattttttagccattcgaatgcaaaacgctccgcctggaagtactggatgcgaagaacaccattaaaatcggcacgatattcacgttcaattgtcgcgtgacgaacacatccgagcatccaatgaaactgaatgtgcgattggctgccaagttttcgcccgatagtcaatacacgggctgtgctgattttatgctgaatcttctacaaagtggcgaatctgccgaatttccattgtccgtctgtccatctaaattgggcctcgtgaaaataacacccttggtattgacgaatacgctccaaaatgagcagttcaccattgaaaacgtcgtcgatgtttttgttgttaattcggattacgataatgataccacaactcatcagaataagttaattcgttacgagagtgctgcaagctgtttgacccaaaagcaagttcaactgcaagttgtatagaattgaatagatgcaaaaatgtatattttaaatttatgttaatgtgaaatggggttttaagtgacgggatagatattataatttatgttgttactctatgtaaaacgccatactttaataaaaaaaaagtcggcggtaaaatttttaatgaaaatttgctgaaatgtcctttagtgtggtcttgcgtgcattatggaatccttaatttcaattgcatattttatatactttcttgtacaaagatagttagatctctcttttgttagcacataacgaaaaaactaaataaataaaaaacatccccatgttctcacaacaaattaaaaaaaataccccatttaacttaaatcaaatatatttgaaaatttagaccacattttttatagcaacacggatttttaggaacttctgcgccggtaacactagtccactttttagatcacaacactagaacttaaaatgttacgaaatgtgtgcacattttccacgcattttggaaaatgcatattccaagcccagcaaccgattcgtggaatggcaggccattccaaatgggccaatatcaagcacaccaaagcactgaaagatggggcccgagcggcgctatttgcaaaaatttcgaggcaaattcgaatggccattcaggagggaaactccgcggatccggcaattaactcccttttgcgaacggaaatagaaagagccctcaagcaaaacatgcccagtggcaccatacaaaatacgttaaacaaattcaaggccagcaaagtgcaactaaagaagtaccgactcgacatcaagtacaaaagaaacgtgtacctcatatgcattttctataccgacaacttttctggcgttaaaatggatgcgacaccgatgatcaaaaaagccgggtaatatctcaatttgcatcattttgttggatataatttacctatgagatttttagaggcgaattcatggatgttggaagcctattcgaggattttggattgattgaaactcgctatgatactgcgaaacttcaaaatgaatccagtttggaggataaagccaccaatgatgctatagagttgggcgccgaagagatcgaagtcgttgacaatgtcgatggctccgtcaatgtatgttttcttttttttcatttatattatataaatattaattttcctacatttacatacagttcctatgcagtccagtggttttaactagcttaagtaggaacttggaaaaagccggatacaccgtggaaaacagtgaacacatattttcaccaatggtaaatcattcatttcattcaatttcattttatctaaatagtattatctttcagaatgtagtgcaattatcacccgaagagcaaaagacctatgatgtttttgtagaaaaactgagaaacctcccaggcttagaggatatctatgacaatgtggaacaaaaatgacttgttgaataaaacgttgagtttaaacttgaataaataaatttgtttctaactgattaagatacactgttaagtaacagagtgtgcaattttcagtgttcccgtttcagcgctaaacgtttctgttattttaaagcttatgtaaactggctggaatacccttgacgatctaaaatccagctgtttgtgtgcggccaaaccaatacatgtggaatcaaaatcatcggtcgaaattgaaaatatgaattatttaagagtaattcggaataattggaagaaatgcacgttcggagcggcagtatctgtgtacgcgctgcaagcgctgaaaactcacatcgagtatgcattcagaaaaccgtgaaaatttgacgcaactttaacccccttatttgctctccaggattgaacaacatatgcgggaattcgcctccaacattcaggccaactggatatcggatcgccccaaaaaggtactggtggtcatgaatccggtggccaacaagaagagatcggagaagtttgtaagtagctggcacacagctgactaagatgataacccagccatagattttcagtttaagaactactgcgagccggttttgcatttagctggatattcggtggagatccttcggacgaatcacattggtcatgccaaaacctacgtggaggagttggcaacgctacccgatgccattgttgttgccggcggcgacggcacctcatcggaggtggtcactgggctgatgcgtaggcgcggcaatctctgcccgatcaccatccttccgctgggacgttcggtgcagtccgcatccaagcgcatcaacatctttggcgtcaaggacgtcgactatgtgaaaagtctttcgaaagcccttgaacctatgctcaaggatgagagccagtaccagagtgtgatccgctttgatgtgatcaatgaagaagatggcagcaatagccaattgaagcccatattcggtcttaatggtctgtcctgggg

SEQ ID NO: 10187 - DNA, 857 bp, DROSOPHILA
tgtgcacattttccacgcattttggaaaatgcatattccaagcccagcaaccgattcgtggaatggcaggccattccaaatgggccaatatcaagcacaccaaagcactgaaagatggggcccgagcggcgctatttgcaaaaatttcgaggcaaattcgaatggccattcaggagggaaactccgcggatccggcaattaactcccttttgcgaacggaaatagaaagagccctcaagcaaaacatgcccagtggcaccatacaaaatacgttaaacaaattcaaggccagcaaagtgcaactaaagaagtaccgactcgacatcaagtacaaaagaaacgtgtacctcatatgcattttctataccgacaacttttctggcgttaaaatggatgcgacaccgatgatcaaaaaagccggaggcgaattcatggatgttggaagcctattcgaggattttggattgattgaaactcgctatgatactgcgaaacttcaaaatgaatccagtttggaggataaagccaccaatgatgctatagagttgggcgccgaagagatcgaagtcgttgacaatgtcgatggctccgtcaatttcctatgcagtccagtggttttaactagcttaagtaggaacttggaaaaagccggatacaccgtggaaaacagtgaacacatattttcaccaatggtaaatcattcatttcattcaatttcattttatctaaatagtattatctttcagaatgtagtgcaattatcacccgaagagcaaaagacctatgatgtttttgtagaaaaactgagaaacctcccaggcttagaggatatctatgacaatgtggaacaaaaatga

SEQ ID NO: 10188 - protein, 264 aa, DROSOPHILA
MAGHSKWANIKHTKALKDGARAALFAKISRQIRMAIQEGNSADPAINSLLRTEIERALKQNMPSGTIQNTLNKFKASKVQLKKYRLDIKYKRNVYLICIFYTDNFSGVKMDATPMIKKAGGEFMDVGSLFEDFGLIETRYDTAKLQNESSLEDKATNDAIELGAEEIEVVDNVDGSVNFLCSPVVLTSLSRNLEKAGYTVENSEHIFSPMVNHSFHSISFYLNSIIFQNVVQLSPEEQKTYDVFVEKLRNLPGLEDIYDNVEQK

SEQ ID NO: 10189 - DNA, 12872 bp, DROSOPHILA
aagactgggcgcggtacaagggatcgcctagaaacgcccacacacgaactagtgcaagtacagtggtaatatgatatggagaaatgcccgattaaaagtgtataaaatattttttttaattttaaaacaaattttgcactaccatgggcgttaatctttctttgttttaatatttctaaattaaataataaatattaaacattaacattaacatattaaatattaacatgaaacgtcgtatactgccacttgacaaggaagataatttcaaaaatatttgattattccaaattgtacattccatttaataatctaatttggatatatatgtatattgtatattttgaactgagtcacataccaaatttgaccacccattttagttgttttgcgaccaatgtgcctaggccgccgattacaaaagcaacaccttcgccttcaccgtaaaatgggcctcccctgcgtgtttcacatgtgtcgcatgtgactaccgtggattttgcagccgcttctgccggcaatcaaattgagtgcaaagctcggttaaaagccgagtattcaagtattcgagtgttcggacagcagaagaggtgtgatgtttgatgggtgtgtgtgtatgtgtgcagcgaatgcaaaaacagtttcgatttttttttcaatttttccaccttctgtttttgtctcgattcggtggggccccaacttattgcattatttatgtacgagtagtacgatttttctgggttccccagtaagccacacgcacacggtccgcaccagaaaattgtataaacaaaacgcggaaagcaacaaaaaaaaaaaaacgttaaaataaaaaaaaaaacagtataagtatcagtagcggtgacaatcgcaagtgcagggctctctctctgtctcaagtcttgagtctcaagtcgaggagtctactgctcacactcactcaaagtttgccgaggtggagaaacaaactcggcggcattctcagtcaaacaacaaacgcaactgaagtaacaacggttccgtaccgcgtaccgcccccaaaacaaaagtgaaattctattagctacccgccgtcttggccaatccgcccaggaatatcgcagtgcttagccattcgcgaaagttatggtatttgattccgttgaaaatcggactgagtgctgtgcttaatgttccagctgcgccgggaagtgtggagcgagcggttgggagtctgggtgcagcgcgtcctcgtcatcgtcctgcatctgtggcaccgctccagtatgtcctttgtccggcgtcgccaggaggcgttcaagtggattaggcgccgactggccagaaggcagtgtcacgtgagtacaccgaaagaaatagggtagtagcaacgtgaccacatcatttagccacttctaaagccattaaactgatatacttaatctcagttgctacagaatttaatgggctttgaaatgagatcattggtgaacaaataaatatatagacttgactggatagagtcaatgtggaaatagaatagctatgtatttagggtattctcttgaagtagttgctcaatttatcaattacgaaagccaatgagcgagtgttattcgaatttcaatattttaaggctgctttagacattactaaacagctgtttactacttttttaatagccagctttaacagaatattaacgaagttgcatagccaaaatgaaattgacactgatcacaggagtaccattaatctacaagaacaacttaataaatagaagcatctgtgtagtcattaatattattcgcaaaaagtgacttttttcattaccttagtacttagcactttctagagtcaataaagtcagtgctctattatacaggccggcaaaataagttttgtattttatcaaggtatgcctaattactaaccctgaacatgtttttgtcccttttctgactatccaattagagttatgtatttattacccaacttagatcatcctgcactagatccccaagtgggtcatcactccagctcacaacctttagattttagctggaattcaattaaaagttattcagccaggctgcaaattcaattaactacaatcatttcgggcattcggtgcaatttttagctaattctggttttcctgcgaatcggggcacagccggctgctgaagaagggttagaaaagtttagcactcgcgtgactcgctataatttctccatcggagttgctggtttgaattggtctgagcccaagttggccactgtctgaggctttgttccgtttccgctttccgcccgctctgcctggatgggtgtgtccatcgacctggcggagacataggcttggttctatataattccatcccctggcagtcgggaaaactccccaacaaccccccaactattttagcccgccaaacagttggcgttgagcgattatggctgtcagcttgaaaggcactttcagcctgttatcaattcaaacaaacgccaaaatgccacaaatgtgaaaaccgaccgacagtcgaggagccgctaagaggcctccaaattgtgcaaatcaaattgaatgccgttttatgaaagttgagttgactttgccggtgatttttggcaattatctgtagctggcatttgtgcgatttcgaaatttttgtgtttgtaacaatgcggatctcaaacagagcacgtaggggttaagctgaacgcccatggcatattaaaaagttttctaatatttaggctgcaaactgatataaaccaatagactgcaaaatgggtgatttatttttatgttactggtctgaagggaaactgaattttcaaatagctgaaatgcggcaattgcatgcataaagttaattgtaaaattctaaaatattataatgcatatgattaacgtaaattagaaaactatttgtaaagggcatatgatatatgatatacgtagtcattaagcccggaatcaaatcacgaactagtgaatcacaaaaagcttaggaattaattgattttaattgactgcggaaatattgatactcttactcacaacccaatttgctgtgcaactttattctaatgcccgttcgcattcgcaagtggaatatatggcagacccaccgggaagagcacttaatagttatatttatgggccatcggtggagcccatatattgtttatcccgctggcaaatgtttattcgcaccacttgaagtttcagcgactgctcagatttttttttcgtgaaaccagagcgaagtaaacactcatcgcgtgttccggataacgcaatcgcatggggatctcgaagccaggaaccaaaggaatcccgagctcgttagcgttccagggtaagcctgcgtctggcatcgtaaacaaatgcccgtcaaaaggcattcagctaaacaccgacaaagtagcaaacaaaatatatgtggacagccagcccttcattttgtatatacatatgtataatatgggaacttgccaagttcaaggcaggagttgaagatgtctatatatgatgcattgtatccacaattatggcagagggatgggcatgaaacacgggcggcggctattcagcggggcaaacaataacattgtgcataaaacagaactcagtccccagtcggaaatgctgactaaatggaagtgaaagatactgtactataagatactctatgaactgggaagagaagtattaactatacaaatacataaagataaaaaatttagttatgataatgaagacgtagcagtaatgccagggattttactacataaaatagaacatagtccagtttttgtttaattttttaatcattttccttgcataaccaagcaatcttgcagcccgcaataattgggcattgatctgcataatactttggttatttatatgtatattttttgagttgtcgaaagtccaaacaattagattgaaaagcaacgttctcggaaatgtatgtaaatgtattccttcgctgattgtattctaatgcaatcggtgaccaagcgcacgtcaaagtggagatatccctatccacatccactataaatcaccgataattgtgggtgtgctgtgtttattgttgttgctgccattgatgttccgcgagcgtttttctgccggccaacgagcggttgagtcagctgagctgaagtaaactgaactgggctcgatttgagcaaaaaaagctgaaatgaagcgaaaaagcccaggcgaaatgcaaacaacaagcgtttcgtcgcacgcatggaaaatcattgaagcctgcagtcagtggaaaatgggtttgggtgagtacgagtatctgtgagttacaccctcgataccgactgggcttttccatttcgcgctccgctcatttcaatttagttggcgcaaagcggccgccgcaaacgctttgaactcgtttcccggacagacggacttcatggctcttgacgtttttcctatattgatcttttcgaccgattcagcaatacaacaacaaaaaaatacaaaaacacaaaaaaggaaaacgtacgcccagtgaagcaaaatttgtgcgcgttttgattttttggcgcgtttttcatttgttttgatttcgcgtctgcgaacctttctgcccattttttttttttttagtttttccgcggctttaactctggctttttcctttaggccacacaactatgtattgataaattgccagccgacgatttccgtcgtgacccgcgcgttatgcaaaatgctcaaaatgtaaataaatattaaaataatacacaagatcacgagaagggggagccaaaagtatctgccacactgccttccttttgtatgcgcccagccttttgccttttgcctttgttggtttaagccattcggttcggttcgaatcgtttttttttttgtgcgattgtgctgtgaaaaatgaagtgaatctgtctggccaagtgaatatcgccattgcaacaataataataagcaataataataataataatgcgagccgacaaatttcggtgtgcctgcgctttatttatgaaaacaataaacgcaatccaacaaactacgcatcaagtccgaacccaaacccgtacccgaatctggattggaggtggatgtgccggcaatttcctggcacgcatataatttgcatgtggatatcgatctttatgaccggagacgcttcgacgatggcttatgtaatctggaaaatattcatgaagcaatatgcccgcctgcactacgatcctcggcccctcagtcccaagttgatctggcactcgtatgcggccattcagacggtgggtcactctctatccctctatcccagtgaatgcctcagtcgccacagcattcggggtcaccacgtacctttgcgaaagtgcctgccctttattgatttaaattgagtcatttttctcggctctgaccattggccatacaaagtaattgtagattaatgtggctagctttagttcatatttttcaagtgatttgcgcttttttgggggggcgtgaaagttgatttgtgattaaacgctcggtcagttcgttaagggaagttggcgaaagtttttaacattgcaaggagttttgggaacttttatgcgagcaacaggtttttgtggaattttgcaggtgctgcgtttaatttagttattactttttggttctaaggtatttaaagtctcagtatatactcctgcataaaacacattttttagcaccgaattaactgcatttctcgagcagtttgaggaaaaactttacgactgcatttgctacgcttaggattggcaatttccgacactgaactagttcgatcacacctcgattggagttattcaatcagcagccagggcaatctctacttatgtacgccggtgttttccttgacattcgtgtgcggcgacagttgcatttcccgcccattaacgaaatacgatagcgggggtataggaaaagtcaaagcgaaaatgcaaaggaaatagccgcgatttggcggcttggaaaagcaggagccaaaataagagtagacaaggcaaaaagctgttgcgcagaatcagggacgaccaccaaactagataaacggacggcaagactgtctgcccccattgataataacaatcggaaagagtaagagatgcaatatttcaacgtaaagtgttaaaatgtcgatattaattgcagagtggcagcagcacttgtggtaggactacaattcaagtggtagccaaaatagtcccatcccccgcagtccccggatcgcatttaaataaattgcgattatgccgcaaatgtggcagccggtgcaccgaactgtgcactgcaataaaaggtctaaacaaatgtgaaatataaaatatttttaaaatgttaaggtgcaattgaagaatgagacttatataggtcatatcagaaatggcctttcattcttcttgaatatatgtaaaattgctttcagtgtactctgggtgcaggacctggtcttgcacttggttttcggtggtttcggtggtgcaactgccactgcgactggccgtgcgctaataatatttatcagtggctcatttgttggccggacagatggacggacttacggacggacggacaggtggatgcggagcggtgcattcaatggccaataaagcaagagagcaattgcaactagcagcaggcagcggtggctaattgcgccgcctgtttggtgattttgccgctgttaacttggttggctggctggccaattccaaataggtggatggcatgggaatggggatgggttggaatgggatagatgggggctgtgcatccgctgctcgtcagtttcgattcaaagtgcagtttaagttttcggttgcctttttccacattgttcgctgcatccgaggcatgcatatttatttatcgcagccagagttttgcattttaactagaaatcatgcaaaaacgccgcaacatgcgattgccaacaaaaaaaaaaaaaaaaaaaatcgtcgacgacgaacgcctttcaaatcgaatctccgaagctgttaactgcagttgagagcgatttttcgtatgcttttcctccgacatgaaaatctgtttaatattttcccgcgcactcacgcacgacgtgggaatttttgcaactcgcgactttgagttcgtcttcgtcggccacagcgaaatgcaactcaaaactgaaaactaaaaactcaaaaccaaaatctgcaacgcatttgcaatctcagcgcggaaaaggctgaaacattgaacctttcataaacctccgacaattggcatgcagctgttattcaacgcacgagatgcaaatttgatataggaaatgggtttttttgtaatcgaataagacgatctgacctataagtggaaggaagtgcaatggcatggttcgcctttaaatgcgaaattgtttaataacaatgtctttatcatttcaaagttatggcagtcgagttagctgagatacaggtttaggtgatgtaaaacctaagaaggtttttctgattaattgaaaacatatgttagctttctgattgcctttttattcacttaatattggctcatcattaaacagtttgtttcgtaaaatatcatttagagcactacccatcatataagattataatttttattttggcctttttccagacaacctcccatgcaaatgcattttcatattggccacccccgccgtttaccagtttacctgttttcctgtccagctttcggtttctctttctttaaccttagtctggggttaggacagcccattaacgacacgcattcacagtcattttcaatttcttggagctgtcactttaatttggaagcagtggcagttttggcccacgcattttcacacagatacacacgcacacactcagtctttctcttaaaaaatgcaatttgcacaacctacactatctttacatattcccacataaacatattttatttcacatttttatatgctgctaaaacaaggcttttatattactttttaaaggtatacgactttaaatcttaaggctttaattccatttatatgcgaatgttaataaactaacttaaaaggtctttcaacgattaataaacatatcgagatgtaattgtatttcgtttaatggaataaccatgagatttataattcttgttaatatattagtttttcgacccgttacaatcttcaacgagcaacaacgatcgtctaacaaattagttactgacgcaatatttctgtatatctctacgctatcaaaatcacacgcaataaattaaatttgctttgtgggcagaggcagtgcgtccaactggcaatggcaatgacattttcagcttttttgcttttaggctccagctccttcgcaggtgtttagattgccggagtaggttgttcaattaataaacgaaaacgcagtcataatgttttgattaacacaaatgtgacaagaaatgcataaaaattaatttccaatcttgtccgagtccactaaatcaaaggggagcgtatcttggatggtggttggtagatgttcgattccgatttgggtcacgacggcgttaggtgaaaccgtagatgcgtgagagagtgctgaatcgaattggataggagatgggagatcggcatatattttagatacatggcatagccccaaggttgtgctgtcggtgtgcagtgaggcgaccttcctttaatggcttgtccagccaactagtgcaacattttcgatttccttttgacgcgcggccataatttgaacagcgggctagcagcacagctccaaccaccgaacgacccactgcccaagactcacgcaccaccgccgccgataaaaacccaccgaaacccaccgacaaaacgcccccgggcgggccgaacccattccaagtcgaaaccaaaagcacagccaaaagccaaccaaaccagaccagtcggggcaattaattgatgagcagtggtcggcacttggtcaagagttggcatgacagcaaattgcatttgcctctgattctgcctcttttttttccagatcgtgcgtgccactgccatggccactgggcactgatcatcaagcggtggccaatcgccggaatgcaggcccagaatcaggcactgcaagaaaatgtgatgctttctaaagatttagtttcgaaaagattaacttattagtttacttttccgactgaactagaagaaaagttactttttcctaattttgtaatttttcttatatatacgagctaagtttttccctcagtgcctggcccaaaaagaaaatattgatgatatatttattggtatttattggcgtcgctttggccgcacttcaaaaagcccggcctgaacaaattgtggaaatttataagcttcgacaacagaaatctgtgtctctgcgggctcgtcggtactgccaataaatgagtggagtgaaggggtttaggggttcaagttcgagtttgggcatgggtatgggtatggatatgcggcccactcattgagcatgcgcaggcgccgattgcgacatctggcggccattcctggcgcttgagaggccggcacgaaggaccaaaagctgctagcggcaggacttgcagagctagccgcattccttggccaagttagtagctaaattcgtttgggcgtggaaaggcgagtgagtggataatgggaaaataaatgaaaaagcgccggcaccgcacaatgtcacattgttggccaaaagaccaaaagtatttcgattcgccaaccgaaaagtttaacatgccaggtttttggttatgtgtgttatggtcaaagtttggctatttgctaggccgcatacccacactatactcccctcgaaatcctcgaaccgaaaaccacatccactttcactgcaaatttgtgtgtgttcgtatctgaaagaaagtgaattctactgtgctacacttgacctatgacaacgacaactgaggcagcggcaaaaacaacaaccacccaactaacaaccaactggaaacgaacgtttgacgtttcatttgattgtcatgcaatgcggcccctcgcactcccttttcctagtcttgtctcttggatcaatgctgtccccaattgatttttgtttaacttttaacatgcaacaaggcaacccgagcctctccacactccctcctctaaacactatttgctgtgggaaagtggatcgaatcttggaatcttcagttgcatttctataacttagggtatcctgttctccatatttagtcacttaaagaatgtcctgcgtattaaatcaataactcttcgctttagcagctttaatgtaaacttttcttaacatcaagtaaaataggtttatagcttgcgatatttaaacattcatttaaaattattaaaatatttctgtcttctaaattaatgcatatttttacttggtacagtagatactaaataatagtaataatatatgtgggttagctccactgtatgccccctgttgccagtggtaaccgaagcaattgtgtttaatgcggctctttgcattggcccattgcctgtgcatgtgccaagccaaagaactttggcccatttgaaatgcggcaattgtgtatctggcggatacacgagcgcactctgaactccacacgtgtctgaggtctttttcttagctttttttttcctctgcatttgcaggctgacacgaacatcgagacagggcgagcagaagcagctgttactggttcaggagcaggagcggaattagccgagatcttggtgccgagtgacacgcaaatcgatgttccgggtgggggaatcccaggagggcagattccgagcctagagtccactgacagggacatgaaagaggccagagcagcgcccatagctcgcgatgatgaggatcaggaggcgggggatccagaggagcatggagaagaggaggatgaggaaccaccagaggtggagcaactgtccgcgaatgctaattatgtgtgctgtcgatacccgggaacaacctcttcctccacctccggcgcagcagacacattgaaccgcagcaagtcgcgggttcaaaagtacctcaagaagtgcaaacagcggctaacgggtcaggccaagatgccaacgagcagttccaccaccacgaccaccatcacactgatcaggaatgagccagcacccacgacaatcgcggagagggaatccgagcaggcactggcggagcaggaggaggagctcttggaggtggaagacctgacggagggcagtaacgggtcctacacggacgccctgcccatcgaatgcagtttgagtgccagcattgccgaggagcagcagcagggggtcgacgagctggagccgccaaaggaggaggaagtcccactggagacagaggtacgtaattacactgagggaaaatgaaacgacatgcaacattgtcgatttattaaatttaaaaatttgaaaaatgttgtataaggctgtagtattactaatttcatgattctctttcattgcttgctagtcatccttattatcatgaagtttactacatttttctctcttgtccccagctgacggaaccttcctcaactcctccgccgcagagtaaccccgaaggaatccctgcaccagagcgatttcgacttaccgccgacgtggacgccacgctggcccggctgattgacagccatctgtcgcacatttatcccgtctactgggcacgcacgcgtgcgattttaatccaacaggcacgtgagcgactcgtgtgcggattcgacggcagtttggttcgcttcgagcagcgattcctatgcaaatttgcgcaaattgccgcaactctgcgcacggcccatcaaattggcgaggtaagagtcctataaagaacacagaaatccgagcaaaagatatatcatttacaaggcagttactcgcagcaggcgaaattagccgcaatttgtttggctctccccgaatgaagttctttaatcgcagctaaatagtttgctttggttttatccgccaaaaagaaatggttgggtaacaattgagttgagaaatcgttgtggaaattggggaatcaccgggggagattggtcgatcatcaggcgataagtgttctccgtagcaaatagttgcgaaaattacaagggcgcagttgtttgttgcttagaacttcgctagaggctattgctaatctagcttctttaaagtaaatcgtatggaaaaattagcgatttatttaactactttcagttgtttggaatcaaaaaatgtattctccaaataccatctatatattttgttaatggagacacgaatacttgcaccttttcgcttgtaattaataacaatgataatcaaatccagcaacatattattgaacttcatgcagctcacattcttcgtcagcgcaattaatctttcaagattatatcacctacactcaccagagttttgcccttatcaacaaaagtcaactgaggttcccactttgcaatggaatgttttgtgtcctcttgttgaacgaggagtatcttgccgtttgcaaataaagtatttactggtaaatactaaaataaaagcttaaagactatttgttaaatgtatgacaggagtcatacttaaatgcatatgtaaatttaagctttaaccaaagtcatcccacctatttggacgtttccaaaattatatttttgttaatacttaatatagttattcccacttaattggcttttaaatttcaagcactaatttctcaaaaactaatctaatttcatataacattgatgttcattataacatgtaacgttacagctgctgcttgtgcagccctggcgcctaacagtagctgttaaaaatggtcaaaactaacagcgcgct

SEQ ID NO: 10190 - DNA, 1351 bp, DROSOPHILA
cgcaactgaagtaacaacggttccgtaccgcgtaccgcccccaaaacaaaagtgaaattctattagctacccgccgtcttggccaatccgcccaggaatatcgcagtgcttagccattcgcgaaagttatggtatttgattccgttgaaaatcggactgagtgctgtgcttaatgttccagctgcgccgggaagtgtggagcgagcggttgggagtctgggtgcagcgcgtcctcgtcatcgtcctgcatctgtggcaccgctccagtatgtcctttgtccggcgtcgccaggaggcgttcaagtggattaggcgccgactggccagaaggcagtgtcacgctgacacgaacatcgagacagggcgagcagaagcagctgttactggttcaggagcaggagcggaattagccgagatcttggtgccgagtgacacgcaaatcgatgttccgggtgggggaatcccaggagggcagattccgagcctagagtccactgacagggacatgaaagaggccagagcagcgcccatagctcgcgatgatgaggatcaggaggcgggggatccagaggagcatggagaagaggaggatgaggaaccaccagaggtggagcaactgtccgcgaatgctaattatgtgtgctgtcgatacccgggaacaacctcttcctccacctccggcgcagcagacacattgaaccgcagcaagtcgcgggttcaaaagtacctcaagaagtgcaaacagcggctaacgggtcaggccaagatgccaacgagcagttccaccaccacgaccaccatcacactgatcaggaatgagccagcacccacgacaatcgcggagagggaatccgagcaggcactggcggagcaggaggaggagctcttggaggtggaagacctgacggagggcagtaacgggtcctacacggacgccctgcccatcgaatgcagtttgagtgccagcattgccgaggagcagcagcagggggtcgacgagctggagccgccaaaggaggaggaagtcccactggagacagagctgacggaaccttcctcaactcctccgccgcagagtaaccccgaaggaatccctgcaccagagcgatttcgacttaccgccgacgtggacgccacgctggcccggctgattgacagccatctgtcgcacatttatcccgtctactgggcacgcacgcgtgcgattttaatccaacaggcacgtgagcgactcgtgtgcggattcgacggcagtttggttcgcttcgagcagcgattcctatgcaaatttgcgcaaattgccgcaactctgcgcacggcccatcaaattggcgaggtaagagtcctataa

SEQ ID NO: 10191 - protein, 392 aa, DROSOPHILA
MFQLRREVWSERLGVWVQRVLVIVLHLWHRSSMSFVRRRQEAFKWIRRRLARRQCHADTNIETGRAEAAVTGSGAGAELAEILVPSDTQIDVPGGGIPGGQIPSLESTDRDMKEARAAPIARDDEDQEAGDPEEHGEEEDEEPPEVEQLSANANYVCCRYPGTTSSSTSGAADTLNRSKSRVQKYLKKCKQRLTGQAKMPTSSSTTTTTITLIRNEPAPTTIAERESEQALAEQEEELLEVEDLTEGSNGSYTDALPIECSLSASIAEEQQQGVDELEPPKEEEVPLETELTEPSSTPPPQSNPEGIPAPERFRLTADVDATLARLIDSHLSHIYPVYWARTRAILIQQARERLVCGFDGSLVRFEQRFLCKFAQIAATLRTAHQIGEVRVL

SEQ ID NO: 10192 - DNA, 2676 bp, DROSOPHILA
tgatttacctatgtttccaattgactacgctccttccacccaagttacgcatacgccatgtgcgcgataacaaatcagttaaatattaatgcatgcaaaatataggcaaaccagctgccgtccagcagccaccaaaatgaccaactgcaccaatctccactctgtgtttgtcagttattaaagtgagtaatttttcatggaccacttgagtttatttgctgcgtggagaggcagctccgattgatcatttgcatctggacaacaacattttccacacctacggatctctatatctctaatgagctgtcagtcagtcagtcagctgattgataataaagtgcgtgttttcggttttagaaaggatttaggcagatatgcttaataggcttgcaggcttatatttaaataatttgaacacgtgaattcaacggttttgaataaaacacaatattcatagataaatttaagtgctctttcaaaggaaatgttacttaatggccaatttagatcactggaataattgcaaaattactaataggcaaaaccagatttagccgtagaattttctcagctggaaacccccagaagacaattgttcatttccacgacgaaatgaatggaaatataaaagtttccgttagagcaaaagtcgccgacaatagctgacgaaaaaaatacaaattgaattaagtgctcgtggtggttctccatgaaaatcttggggattcggtggctaaaattggcggtggctcagtggctcaagccaaagccgccgcgtgactgatctctttcgcgatctgctggtcggcaaatgcacaaagcttcggctctcggccgtcgaaaggggcgtgttggctctccctctccgccgctctttgggccaagatttgtcagaatatttctcatgttgcgggtataaataacagggctacttgagacgtctaagcataacacattcagctcttcggtcaagaagtccaaacaacacaaaaccagcaaaatgttcaaactggtaagatcaggattaaaggattaccgctcgtatgaagttaacatagaagtttcttttccgcagattgccctcatctctgccctgtgcgccgtggccaatgccggagtaatctcgccctacagccatggatatggactgggatacggcgccgccttggctccggcttatgccgctccggctgtgatctcgcacgccccgatcatcaagagctacgccgctcccattgtcgcccacccggtggccacctcctatgccaacacctacaaggtggccaccaaggccattccagtggtccatgccgctcctctggtccatgccgtgcctgctctgcactccacctccacctaccatggatcctatggcggctacggtagctacggtctgggatacgccggctacggacacggagcctacctgcactaaggatctggatgtcggaaaggataccagccccccgttgacgaccccgattgaagtgagaacattaagcggataattcgcattttgctgccgtcaaagtgttgaatttgcatttcgtagtcagaagcggaaatacaaattgtgtacaaaatccctcaaaaacccagacacccacttggagacagagacaactagagaactaaggacaactaacgggaggcggcgagagcgagagagattgatgaaggatcaagtttcgttgattttgttattatggtgcaactccatgcattgtggcttcataacattttgtaaataaacgataaatgactctttaaacgaatatgatggcttatttcatttactggttgcttatatatgttagtttaaaaatattcacttgaaattatgacggatggatatttaagatccatatccaaatatgccttactacacacaattcaatgaaatctttacgatacctaacgttttggaagcaatatgaattttcagagtaatgtggaaatattttaatttgccgttttaacacacacacatttcgcaatgtaagccacttaactcaaaactaattgttaaggggacaaatgtctatttatgaagtgtggaattattttcaatttagtttagttgagcgtgaagtgatcagttttattcgcatttataaggattccagatagtattgctagttcgtagatgcgagcatttcacaaaaaactgcttgttcaatgattttcaactgcgaacttaccccaaccatccgatcgccattcagcattcaattgcacttcaaattaattttacttgagcaacttgctcgattcatatcgactcccgtcgggtgttttgaaacttgcaaggaaaaaaccaaataccaaaaaaaattgttttattgcaacgccttgcccggcccacctgctcactataccccccccccctcctctaacaattatcattgcggggaaacgaaagactcaagcgacaaacgcgtgcgcctgtcaacaggttgaccagtgaaaagtgcgttgaaatatctttttattaatggccggccaactgtcgcagctaaatgcttttcgcccagtttcgcaaatgaaaaatgggagcacatcaacagctgctgaaaagtgaattgagtcacttaattacctttttaacgccggccagctgatcctggaccgaaaataccaactataattcatgcgaaaattgaaaagtcgtgtatt

SEQ ID NO: 10193 - DNA, 613 bp, DROSOPHILA
atgttcaaactgattgccctcatctctgccctgtgcgccgtggccaatgccggagtaatctcgccctacagccatggatatggactgggatacggcgccgccttggctccggcttatgccgctccggctgtgatctcgcacgccccgatcatcaagagctacgccgctcccattgtcgcccacccggtggccacctcctatgccaacacctacaaggtggccaccaaggccattccagtggtccatgccgctcctctggtccatgccgtgcctgctctgcactccacctccacctaccatggatcctatggcggctacggtagctacggtctgggatacgccggctacggacacggagcctacctgcactaaggatctggatgtcggaaaggataccagccccccgttgacgaccccgattgaagtgagaacattaagcggataattcgcattttgctgccgtcaaagtgttgaatttgcatttcgtagtcagaagcggaaatacaaattgtgtacaaaatccctcaaaaacccagacacccacttggagacagagacaactagagaactaaggacaactaacgggaggcggcgagagcgagagagattgatg

SEQ ID NO: 10194 - protein, 123 aa, DROSOPHILA
MFKLIALISALCAVANAGVISPYSHGYGLGYGAALAPAYAAPAVISHAPIIKSYAAPIVAHPVATSYANTYKVATKAIPVVHAAPLVHAVPALHSTSTYHGSYGGYGSYGLGYAGYGHGAYLH

SEQ ID NO: 10195 - DNA, 6105 bp, DROSOPHILA
actaattgtcaattgttcaagtttaattcacttattctgcgaattttaatcggaattgttttgtatacattttttgttgtgtttttgtccaaacaccccctcactgaatagtgatgccagatcagcgatagaaatgtgtgcagcttagctaaatatatgcatcgaaaaatatatggttataaaatgatttgaaattacgctaaatagatctatcaaatctgctcattttagagtattcatattaaaataattatacatactcttgatattaaagtataaataatagtaataacaataaaccactaaaagcaaacaagacattcgcccgttaacgcttgcaacagctgtttaaatctagatcaaaacaaatccgaggaaaaatttgttgaactcacaaagaaaaattaaatcctcgaaaatgtctgaagaaatccttttcgattgcctccatgcagagatagtcaattattgtctggatagcaataaggtaggaacacgagggacgcaaaaaaaaatcagtcatacaaccgattttgatttggttccgcctattaggagcacgacctggccactttggagtatataggcttcaccaccggctaccgcctgattgagcggctcacccgtgaagtttcgcgttttaaggacgagttggagactatgaagtttatatgcaccgacttctggatgcttatatacaagaagcaagtggacaacctgaggacgaacaaccacggaatgtacgttgtgcaggacaaggctttccgctttctgactcgcatctcgccgggcaccaagcagctggagcacgcgcccaagttcgtggccttcacgtgcgggctggtgcgaggagctctcagcaatctaggcattaacagcaccgtgacggccgaagtgcaaagcatacccgcctgcaagtttcacatagaagtgaacaggaactaattaggatgtaaggcaatggtttattactacaattatagagatactacagactagactaggctatcttttcgtagaatgccacaatgttgtggtcagtccagttaaggcgttctcgcaggatccactggtcgatgggcagttggggctgggcgggattgggatctgtgtggattcccagggcgggcaatggtccaatcaatataagccactttccttgatacacatttagatagtccagaaaagctcctcgattgttgaagtagcagaagagcaaggcacacggatgaacgtcactgcagcatttggtcaataaatccgtatccagttggctggcatcctctaaatagttaagcggtataaaacttcgaacggagtacttgctctgccaccagttgcgatcgacctccaagccaaacatggggactttccgacctccagacactgtcataagccattccaaaagcccactgccgcagccgatgctcaaaactcgctggatgtcgtgcatggctagcagctgattaaagtagtccaagtccaccgatgtcggccacatccagagcagcttgcgcttgagctgttggtccaggcagtcgcccaggacaagcaacttgcgccagttgcacgacgcatcatcagttaggtaataaatttcacgcagtgtctcgagttccgattgctcgtccatcatattgaatactgttagttgcaaattaagcggtcttgctgcttccgatggccggtgaacttggcagtgacgccggcacgcggaaatatggctagcggccaacaagattgctgcggttcgcttcggttcgcagcacctgactgatctctaataaattagaggacccctttgaaaaagggccaactcattagagatcatatcgtcactttgtgttttcttctttttggtaccaatatttgaaattcttgcgccagtgcatctcgctaaatttggagctaccttgccccgggacacgcggctggtgatgttgcatggctggttcttgggcatcggggctaggttcgctagagtattcctcgttgtccagatccaagatgatcttgcgatacagctggacattctcctctggcattacatctggcagaggcagatgctctgggacagctttccctttctccatctgcagttcagggagttgagatggcagtggcgtagattgcagcaacatcactggctcaacgttgcccacactctggatcacactgttgtatcttacagtctgagatggtctttcttccgccgtcgtggcctcctgagcactggacctcggtgtaaccatttcaacagtactggcaaacgcacaaccagggtgcatggatcgcagatgtcgcagcatgttgtcctttcggttgatagtgatgtcacattggatacagcggtagcgttcggcagtcttgtgttgtcttaaatgtcggcccagagcatccggatcattgtagcttttgccgcacagggaacaggactgacgttcgcgatttgagtggcgcttcatgtgcagccgaagcgtggtttgtcgcagaaaggacttctggcacactttacacatgtgccgaatattgttcttgtcgtgtttccgcagatgctggttcaaattggccttgttctggaaatgcttagagcagagctcgcatttaaattgcaggccgagatcgctgtggatcgccaggtggctggcaagagagctcttgcggcggaaaaccttctggcagattgggcacaaatgcttctcctggttgtgggtaagcatgtggcgctgtagaacaattggttgcttgaaacttttgtggcagacgctgcacgagtgttttgattgtttctcatggctcattagatggtactttaaatgtgaactggtagcaaatctctggaaggaaatctcagtcatgaaaactacacacagcataagtacatgctgcaactcacgcgtccgcactccttgcagttgaacttcttgagaagatcgttgccgcaggtgaggtggtaatactgctgggtccggctgcgaaaatccttattgcagacggtacagtggtagcccttatctgtgacaattattcgcttatcagccgacgtccttgcttgcgtttcctgtgtctcctggatatcgacacttcgtgcaactcgacattccaggcaatccgatacatccgccaccaggcagagacgacacttggtgtgtccacagctgtcggtgacgaggcgattctgtcctgtagcatcgcagttgcagcgaggacatttattcattgctaaattctaaatgcattgaaatcgcacatacaggagactaaaattgcagctatgcttcttctttctcgcagccattcagcacgaaacgtaaacaaagtacacggtcagaaatacttttcatatattttacatcctttatattaaaactaagaataaagatctttttataagagtactatgagctgagattttgttcgtcctgcctattcacatacatcgttcatctccaggtcggccacatgaccaggaaacaggtgcgccttctgcatgggtacgtgcacaaagtaacgatcacaaaacttggggttccgccgaagcaggacctcagtcagtattgtgccatagtcgatcttcttggtaatcaaaaggcgccggctctctccactcccatagctagcggaacgcaagccaaattgtctggcgattctgtaaagggaaatgccaacataataagcaattattttttacgatgtgggatgacggtgcttactggtgaagcgtggttctttcttccttcgaaaacgtgggctcaaactgcatgtcacgtatatcgtccgatctcacatagttttctataagccgtcggtaatcagcgaaatttccctttggatttattaatccaagaccattacgattgttctttagcagataactgaaaatataaaataaaatagtttcgtttggtgatacgttaaaagtcgaactcttaccatacgggctcttcacgtccctgcttcagtcgccctaagccaccgcctgtccagcccatcagtcgcatcatgcgatatcccttgttgctggggtccaatttgggatcgcacggactgtcggcggactcattggtgactttgatgttgacgccgtccttgtttttttccaccttgatggtgtcgcgcgtggcattcagctgtgtagcgtagtaccgggtttaataaggcatacattatttcagaaatttcataccttaatactatagcaataggactggatcgtcaaatgcgcctgcttataggcagctttcttggccgccttaaggctctccccctgtcctgtcgctattacctcatcatttactaataattcggcgtattttgtattatcgcttaatggctgatctcggctgacacgctcttcgtacttgacattcgcaatgttgcaggagttttgcaggcaggctcgtcccccagccaagtacacaatgagccgaccgaaacgcagatcttgatagagatcgactggatctccgccgccaaaacactggcgttttatgtgtgagctatcctctggggagctcgtcgagggaaggggtggagcccggcgccctagtagttggaattaggcattaggctttggtctctctggctcgtatagttactagtgataaaaagaatcttctctcgcctatgggcccactaattgttcagtcgtctacctttggcgcgctgctccgccgcatccgacgccgagacaaatgttctcttcaggcgctgttcccgtttctgacggaaatccgctgcgatttccttggacaactcggccaccaaaagcatcgtcgcgcttggatacttgcagcccatgaactccatgttgacgaacgtttgggccaggcacaccagccggtcctcctcaaaacgatccttgtgggccagcatgaagctgcgtcgcagatcccagtgctcatcactttcgtattccgtcttgtagctgtctacatcccagtccaaggaaaattccccggatccatagccggcatcatcctgttttttaactttgactttcttctgctttggcttggattgttgaacggacatctttacagggaaaataaatagcgttcaacttgtcaaataaaatgagcacaggcacgcttgttttttgattgctgctttcccattcacagcgaattatcaattcgattggccatgtgttgcccattggctatcgataacgcagcgataacgataggccccatcacggctatactttgtcgtgcgtgtgtgtttttaagttcctgccttttaattcatgattttttggtaacttaacaacaatttggagagcgacgcgacgcccaagaagtcagaaacgaattgccaaagtgtctccacagacgattgccccaaagtgagagatcggatcagcccaaagcagccaacatgagcatacccaacgagtacatagcgaaaacggaggatgtggcggaacaggtaagatatattaggttccactgccaaaaagaagtccaccaggactccatatccaccgcaggaagcgtcttcccgatgcgccccaaatggcgtttgcggggaagccctggcagctgcaaactgggaaaactgccaacgtcacccaaacgcggcaaagttcgagggtcttggctgcatataatcacgatccgctgacatgggggcaacgtgctgggcatttgcttccaataagaatctgggtgcaacccagatgatgggtttgccttgtactccagtaccgcaattgacagttgttgcgtctgccgcagggaaaactctctctctcgctgcttattttctacctgtgtgctgatgcgtatgtgtctgtgtgtgtgtgcgagagagctgtctccgcaagtgaaagtgttgaaaaagaaatagcgggcagctggacgccagcggccaggtcgagttccgtaatagttgggctagaaagccaggtgaacttgctcgcgatttacatacatacatgtatgaagttacattgacagccgggccaaaacccgttagctggcagatagcaatcgagagatactagcgtttagagacacgtcacagccagcgggcgatttctagcgactacgcgcaagccacgctcaacggcattgtatatttaaatcccttatcaccttgtca

SEQ ID NO: 10196 - DNA, 3116 bp, DROSOPHILA
caatcaaaaaacaagcgtgcctgtgctcattttatttgacaagttgaacgctatttattttccctgtaaagatgtccgttcaacaatccaagccaaagcagaagaaagtcaaagttaaaaaacaggatgatgccggctatggatccggggaattttccttggactgggatgtagacagctacaagacggaatacgaaagtgatgagcactgggatctgcgacgcagcttcatgctggcccacaaggatcgttttgaggaggaccggctggtgtgcctggcccaaacgttcgtcaacatggagttcatgggctgcaagtatccaagcgcgacgatgcttttggtggccgagttgtccaaggaaatcgcagcggatttccgtcagaaacgggaacagcgcctgaagagaacatttgtctcggcgtcggatgcggcggagcagcgcgccaaagggcgccgggctccaccccttccctcgacgagctccccagaggatagctcacacataaaacgccagtgttttggcggcggagatccagtcgatctctatcaagatctgcgtttcggtcggctcattgtgtacttggctgggggacgagcctgcctgcaaaactcctgcaacattgcgaatgtcaagtacgaagagcgtgtcagccgagatcagccattaagcgataatacaaaatacgccgaattattagtaaatgatgaggtaatagcgacaggacagggggagagccttaaggcggccaagaaagctgcctataagcaggcgcatttgacgatccagtcctattgctatagtattaagctgaatgccacgcgcgacaccatcaaggtggaaaaaaacaaggacggcgtcaacatcaaagtcaccaatgagtccgccgacagtccgtgcgatcccaaattggaccccagcaacaagggatatcgcatgatgcgactgatgggctggacaggcggtggcttagggcgactgaagcagggacgtgaagagcccgtatgttatctgctaaagaacaatcgtaatgaaaactatgtgagatcggacgatatacgtgacatgcagtttgagcccacgttttcgaaggaagaaagaaccacgcttcaccaaatcgccagacaatttggcttgcgttccgctagctatgggagtggagagagccggcgccttttgattaccaagaagatcgactatggcacaatactgactgaggtcctgcttcggcggaaccccaagttttgtgatcgttactttgtgcacgtacccatgcagaaggcgcacctgtttcctggtcatgtggccgacctggagatgaacgataatttagcaatgaataaatgtcctcgctgcaactgcgatgctacaggacagaatcgcctcgtcaccgacagctgtggacacaccaagtgtcgtctctgcctggtggcggatgtatcggattgcctggaatgtcgagttgcacgaagtgtcgatatccaggagacacaggaaacgcaagcaaggacgtcggctgataagcgaataattgtcacagataagggctaccactgtaccgtctgcaataaggattttcgcagccggacccagcagtattaccacctcacctgcggcaacgatcttctcaagaagttcaactgcaaggagtgcggacgccgccacatgcttacccacaaccaggagaagcatttgtgcccaatctgccagaaggttttccgccgcaagagctctcttgccagccacctggcgatccacagcgatctcggcctgcaatttaaatgcgagctctgctctaagcatttccagaacaaggccaatttgaaccagcatctgcggaaacacgacaagaacaatattcggcacatgtgtaaagtgtgccagaagtcctttctgcgacaaaccacgcttcggctgcacatgaagcgccactcaaatcgcgaacgtcagtcctgttccctgtgcggcaaaagctacaatgatccggatgctctgggccgacatttaagacaacacaagactgccgaacgctaccgctgtatccaatgtgacatcactatcaaccgaaaggacaacatgctgcgacatctgcgatccatgcaccctggttgtgcgtttgccagtactgttgaaatggttacaccgaggtccagtgctcaggaggccacgacggcggaagaaagaccatctcagactgtaagatacaacagtgtgatccagagtgtgggcaacgttgagccagtgatgttgctgcaatctacgccactgccatctcaactccctgaactgcagatggagaaagggaaagctgtcccagagcatctgcctctgccagatgtaatgccagaggagaatgtccagctgtatcgcaagatcatcttggatctggacaacgaggaatactctagcgaacctagccccgatgcccaagaaccagccatgcaacatcaccagccgcgtgtcccggggcaagtattcaatatgatggacgagcaatcggaactcgagacactgcgtgaaatttattacctaactgatgatgcgtcgtgcaactggcgcaagttgcttgtcctgggcgactgcctggaccaacagctcaagcgcaagctgctctggatgtggccgacatcggtggacttggactactttaatcagctgctagccatgcacgacatccagcgagttttgagcatcggctgcggcagtgggcttttggaatggcttatgacagtgtctggaggtcggaaagtccccatgtttggcttggaggtcgatcgcaactggtggcagagcaagtactccgttcgaagttttataccgcttaactatttagaggatgccagccaactggatacggatttattgaccaaatgctgcagtgacgttcatccgtgtgccttgctcttctgctacttcaacaatcgaggagcttttctggactatctaaatgtgtatcaaggaaagtggcttatattgattggaccattgcccgccctgggaatccacacagatcccaatcccgcccagccccaactgcccatcgaccagtggatcctgcgagaacgccttaactggactgaccacaacattgtggcattctacgaaaagatagcctag

SEQ ID NO: 10197 - protein, 1014 aa, DROSOPHILA
MSVQQSKPKQKKVKVKKQDDAGYGSGEFSLDWDVDSYKTEYESDEHWDLRRSFMLAHKDRFEEDRLVCLAQTFVNMEFMGCKYPSATMLLVAELSKEIAADFRQKREQRLKRTFVSASDAAEQRAKGRRAPPLPSTSSPEDSSHIKRQCFGGGDPVDLYQDLRFGRLIVYLAGGRACLQNSCNIANVKYEERVSRDQPLSDNTKYAELLVNDEVIATGQGESLKAAKKAAYKQAHLTIQSYCYSIKLNATRDTIKVEKNKDGVNIKVTNESADSPCDPKLDPSNKGYRMMRLMGWTGGGLGRLKQGREEPVCYLLKNNRNENYVRSDDIRDMQFEPTFSKEERTTLHQIARQFGLRSASYGSGESRRLLITKKIDYGTILTEVLLRRNPKFCDRYFVHVPMQKAHLFPGHVADLEMNDNLAMNKCPRCNCDATGQNRLVTDSCGHTKCRLCLVADVSDCLECRVARSVDIQETQETQARTSADKRIIVTDKGYHCTVCNKDFRSRTQQYYHLTCGNDLLKKFNCKECGRRHMLTHNQEKHLCPICQKVFRRKSSLASHLAIHSDLGLQFKCELCSKHFQNKANLNQHLRKHDKNNIRHMCKVCQKSFLRQTTLRLHMKRHSNRERQSCSLCGKSYNDPDALGRHLRQHKTAERYRCIQCDITINRKDNMLRHLRSMHPGCAFASTVEMVTPRSSAQEATTAEERPSQTVRYNSVIQSVGNVEPVMLLQSTPLPSQLPELQMEKGKAVPEHLPLPDVMPEENVQLYRKIILDLDNEEYSSEPSPDAQEPAMQHHQPRVPGQVFNMMDEQSELETLREIYYLTDDASCNWRKLLVLGDCLDQQLKRKLLWMWPTSVDLDYFNQLLAMHDIQRVLSIGCGSGLLEWLMTVSGGRKVPMFGLEVDRNWWQSKYSVRSFIPLNYLEDASQLDTDLLTKCCSDVHPCALLFCYFNNRGAFLDYLNVYQGKWLILIGPLPALGIHTDPNPAQPQLPIDQWILRERLNWTDHNIVAFYEKIA

SEQ ID NO: 10198 - DNA, 2525 bp, DROSOPHILA
gtaaagagtatggaaaatgagaatcgtacagaggggccaactgaatctacaggatcggctatgaaatcgttggaattttcacttctttacccaaatgaatctgttaaagaggaggatgaatggtctgaatttacagaggagaatcgtatggagctcatgagcttgggccacagctctggctcaacaatactgactcaattggccgtcggcgatgtcaaagctcaagattcggagcaaaccgatacaggtggcgatggcatgaacgtgggtcagaaacatgatgatgacatcggcaataccacttgtccctgggtgaaaatggagcacgcactggagcagcagaagctaaaggagccgatgtctgtggagcaaccgaataagaaagaaccgtccgaggtaaagagccaaatctacataccacctgctctccgccagagccaaggtgacttcaatcgacgggatcaggctgagagccgtctgcgtaaggttccatccaagatgtccggaaaacctcaagctcctgatctcaacagtgacgagtatttccccagtcttagcaaagcactcaaacgcaccaagtagccgtatcacgatgatatactctttaaacttaccgtttctgttgttcactatgtttaacgatatcaatttttctggtcgatctgatgcggggtgcctcgattaaataaaattgaaagcaatcagcaagcccatctgttttagtggtgttttactcgtaaacaaatttgcactcaacaggcccattagcattacacgtctttttggctggtccccgatgtatcgttagccgtaaacgagccaaatatttacaatcaaatggggtttagccttaaatgcacccggcggactgaaaagaaaaccaaaaacggcaaattacgagatggaattttgtgattgtttccacagaatgcatgccaaatatttaattaggtttgctaactgttgatagcaatacatgtgaagtgaaattaaagtggtctatttttgaattatacgtataatttattaacatctatttctgatggcataatctttcatcgaacacaaatctttggatccactttgcctgacaacttttcagcgtggctcctcatcttcgacaaggcctcacggctgcaatctttaaagctcctgttccagatcgcggataaagaaaccctacattccttctaagcaggctaacaatgtccaccatacggcccgtagcatgagcagcaaccatatgggccacaaggaccgcaacagtggttgaccgaacggaaccactggccattgtagggtccgcagagcaggcagggtcccagtccgccagtcggtccacagcaagtgccgggcatcgagcacattcctggattgcacattttattctgaaaacgaaatgaaacgaatcgaggatattttcaagaaacaaattcgtttgttgttcacactcacattagcctgattacggaagtaggattttcagtcctagaaatttggtagtcgtacaaatagatgttttctgttggagaaccgaaactataatgagctaaagccactagcttggtccacaaagttctacagatttaactttgatttcatggccttctatgttgtggtttcatggcctgcttttaaaatgcttttttccaaattttaaaatttgattaactatatatacagttagcctcttagcctcttatctaattcgctttaagaattttaattcataaaaccgttcccgattgtttgtgtgtcccataaaattccactccattgctcctccaaaaatacttcagtccgtcccgaaggacttcccattcccctaaaactctcgatgtcataatttagccgaaggcgcaacaagtcggaaaagccaagccgcgactgatttttcctctttgccccacctttcattgttttaccaagagcagagttttcttaagcattttgtgttgggcaatgcacacaaacctatttttcttcacagccgggattccgtcttcttgtttacggacaacagagccgggattcgcagtcaaagtgaagtaaagtcacttgacaagttttgtcacgtgcgtcacatgttggaatgtcccccagccacccaggccacccacttttccgactctacccatatttccactctggcttctgagcatttggaagcaattttccaggcatgccttgccgcttctgtcgttgtcgtcatttcattgtttcaaaattgttgctcatgttgtttctgttgttgacctggttctctgttttcttttcttttttttttgccacgtttcttggttaccaaccggtctgcttcaactgaaaagagctcttgctggcgtaaatgtgtttgtgattatttagttatggcatctaattgagtttggtgtttgtttggctggcgcgggagtgtgcaaagtgtgcttatgcaatagctaattgagtcgattaccccaacacttttcacgttttcacccaaataagctgtaaggctgagtgtaaattaatccatctcgaagttc

SEQ ID NO: 10199 - DNA, 458 bp, DROSOPHILA
cagaaaacatctatttgtacgactaccaaatttctaggactgaaaatcctacttccgtaatcaggctaataataaaatgtgcaatccaggaatgtgctcgatgcccggcacttgctgtggaccgactggcggactgggaccctgcctgctctgcggaccctacaatggccagtggttccgttcggtcaaccactgttgcggtccttgtggcccatatggttgctgctcatgctacgggccgtatggtggacattgttagcctgcttagaaggaatgtagggtttctttatccgcgatctggaacaggagctttaaagattgcagccgtgaggccttgtcgaagatgaggagccacgctgaaaagttgtcaggcaaagtggatccaaagatttgtgttcgatgaaagattatgccatcagaaatagatgttaataaattatacgtataattcaaaaata

SEQ ID NO: 10200 - protein, 60 aa, DROSOPHILA
MCNPGMCSMPGTCCGPTGGLGPCLLCGPYNGQWFRSVNHCCGPCGPYGCCSCYGPYGGHC

SEQ ID NO: 10201 - DNA, 4498 bp, DROSOPHILA
aacacttaagaatgggcattctagaggtttcattgtaatcttttgcttctaataacaatttgctttttctttaaaggtgaaagttaagttactttggtttacttaacgtaaggatattttggaatgtttgctttgcaagcacgaaagatttcaaggacctttaaacaaataagatgcaattttgaaatgtaaaattataataaaaccattttctataaaacacttaaataattcatgtgaaaacgaaaaagttaaatgtacgatttatccttggtaattaatccttcctaggtttgtattttgaatcagcaactttggataaagggattctagggggttatttgtattatatccacttcacagggcttcaaacacttaatccttcaggacacaccttcgctgccgcagattggcacacttatcctgcagctgtgtatttttggttgcaaggatgtacttgtgtggaacttcgaaccgaccgcacgcatgcagcacgtaccgctgccgttagccaactaaatgatgggccaatgcaatcggaggcttttcactggcaaggaaggaagccattcaatgggcagtacctgggtgcacaccttggacaactatttagctggctaattcaattagcggcggcgacattcacgtgcaagtgaaaaaagcggcgacacagatggccaaaatgccgaggtgaaagggaaattggcaatgcgagtgaaagtcagctgattgacagactaattatgcatcttattgttcgtatttacaaaatatatttatacgtattccaaatggctggagattgctaaactaggcattgcattcacacacgttgtttattgatgtttgccctattgcgtactttatgtttttttttctgtaatactgatttctttgtgtgttaagttctgtgagaatgaagaaaagtcttttcttatgcatgtggctgaggctccatcgctccatcacttcatcgtccttcgtcttgcgtccattgtccttaattgcatatgctaatccattcctctacgtggcactcctcgcactccacattacagcaccattggaatttacagtgacaccgctccgccctccgctggatgacctggctgtggccacggccacagcagagggaggtgcatccgtcgctggtcgtggtgttccgattgcacttgcgtcccacggtgcctgtgcggaaattggctcagattagtcatgtttatgtttttctaaagatataatcatcagaaaagaaaattatgtggtatctattaaaatataaaaataacaagttaataaaattagtggtgtaagatttgcgtaattagcaaatgattaagtgttctcatcaaatgcaatccatcgccaaatggcagttaatcccgcctactggcggacaagcaattaaaagaccataaataaactattaaactaaagcacaaacaaagtatcataattgtttggccgacgataattgccagcgttaattgctatcatttgaatagacacgacaccggacacggacacatgaatcaaaacgcccgatgggctggctgctccccagttcactgctgttggagcctgagttggagcttgaagtgaagctggagttaccgggctaagccgacgattaattataaatttgcgtcgtaattaacacttttaaactgctggcagttggcggggcagcagcgacgcttgataatttgcaaatgtgtcaacagcaaaatggctaacgaaaattgcaagtggcagttagacgtcgatttcgatgtgaacgtgccgcagtttcgaccgatcccccaagccagagtacaagcaaggggggagaaatgaggggatacaattaacccaaactcatttccaagcataaaaagtaacgattttcttttagtatgtttcggccaattgtagtttagataacatatcaaaaacctttattttaagaatgtcaaataagaacccccctcagattttcagtctccgccactgctttatacaatccaaactgagttgagctgatccgaaccaatccaatccgatccgatccaaactgagctaagctaagctgagctgctgtgcgcatgcgtcgctgtcgcatttttttcgtaaattatgtggcaggtttggtagcccgtttaaaacacaaaccaaaaaaaaaaaaaagaaaaatacatttttgctgcatttgcggttgctggcgttgttcatttgcatttgagatttatttattagagccaaatcaaatttatcgctcgcttcgtatcggtaaatcatttttaattagttgcaacgcattttctaacgacaaaattgtaaattaacttattaagtaatggttatgtgggtaggacgttaaactgataagatgtttaagctgaatattgagtgagtataataattggaaaatgaaaatgttatagtacgaacattaactcaccctgtatatcagctcccagatcgcgctcacaaaagttgggcgagcgctgatagtagaacagcgatgtctccagttttcgggccattcgtgccgcattcttatcggcgctcggttgccgcgtgccccgctccacaccgagttcgtcatgccgccgcgtctcagagtcacctgtccctccatcatcgtggccaccagatgcatccgtgctgtccagatcgggcgacgtggatccggagccgctgccaccgttcgatttcttattgcgcgcccgtttcaaaacgaccacgggctccccgttgcccagattcgattgatccaccagaatggccttgcggaactggtgcttcagcaccttgcccacaatgtgaaaatcgggcgcggacttccagcacgtcttcagctggcagctgccggacattccatggcatttgcaccggaactccatgttgttggagacggcctagaaaggtggtcggaaaatatcttcgttactaaacatattagaaaaaagaatcaaataagtaatatgaggaaaacttataaagtcatctacttagtttccaatgaacagctgaactcactatccggccggcgtgattgttgtgcagattgatcttcgactgaatgtcgccggccttctcgcggcagtcgaggaagagcttggagtactcgaccccaaagtccatgttgtgggagcagccgccccacttccagcgactggcgatcttggagcgctcgtacttcttctcctcctcgggcgttagaatctgattggtctccaagtactgcagaaactgcttcttctccttgtccagagactggcgcaggttcttgttcagcgtcttgcgattgatggtggggtcgcagccgcaggacatcaaacgaccttggctacaggcgcgagccacactgtgggccaccccggcagccgagatggcaaaggcgaacgcactctctcggtagcctaaaacggaaagcagaagtgcgatgagatggagcatctttggaatggtatcgaaatgactggactgcgtgcaggtcctgcccctgggaatcattggacactattgcaatttatgcggtgttatttttaacgctgcatttgaagcagtcgccgccctgggaattcagcggcatttcagctttgacaacagcccaaagccaggcgactgtggcaagaacatttttaatgatgcagtccacacccacccaaagctggcatgcacttggcaaaaaacgaaaatttcaaataaatgggagttactgcaaaaataattattacctgataaatatgggataattctttaagtatctttccatattccatatattcatattaaaggtatacttattttatgagatcgcatttataaaaacattttcataaatatttgatagggaaacctcttgaaaattgttcaagtgcattatttgaaatgccttatgcagcgctgacagctgtcaaatggctgtcaaaaatgctgacgttaatcacggtcgacatggccgtgagtggcccaaagttggcaacatttgtcaatcgattgacatgcaaatggccagcgccactttgcataatgccaaattggccaaagccatagagagggagagagagagagagatctccaaatcggcgacagtacgagtacatatgtcagcgtgacaggcttgcatcattctggggtcgcggatccgggtgcggataccctccggctcctgtcaagcaatcagtcagccagtcaagctggccagtccgtcactcaggatgcgcacgaatgcaaatgtcaatgttgtgacaagttgtcgtacagatcggggctccagcgatcgattgaagtgcaagtgcaatggaaaattgtgtgtgtagcgcgcatttgattgacgattaagacgccatcaatcaaggcatcagcgaacagtagccccagctcacttcgcctgctccactcccgcttttcactgctcaccgatcgccgttcgacgatcgccggattgctgatcaatgatcgctgatcgctgatcagcgttcgcggacttgatttatgcacgctttgtttg

SEQ ID NO: 10202 - DNA, 1125 bp, DROSOPHILA
atgattcccaggggcaggacctgcacgcagtccagtcatttcgataccattccaaagatgctccatctcatcgcacttctgctttccgttttaggctaccgagagagtgcgttcgcctttgccatctcggctgccggggtggcccacagtgtggctcgcgcctgtagccaaggtcgtttgatgtcctgcggctgcgaccccaccatcaatcgcaagacgctgaacaagaacctgcgccagtctctggacaaggagaagaagcagtttctgcagtacttggagaccaatcagattctaacgcccgaggaggagaagaagtacgagcgctccaagatcgccagtcgctggaagtggggcggctgctcccacaacatggactttggggtcgagtactccaagctcttcctcgactgccgcgagaaggccggcgacattcagtcgaagatcaatctgcacaacaatcacgccggccggatagccgtctccaacaacatggagttccggtgcaaatgccatggaatgtccggcagctgccagctgaagacgtgctggaagtccgcgcccgattttcacattgtgggcaaggtgctgaagcaccagttccgcaaggccattctggtggatcaatcgaatctgggcaacggggagcccgtggtcgttttgaaacgggcgcgcaataagaaatcgaacggtggcagcggctccggatccacgtcgcccgatctggacagcacggatgcatctggtggccacgatgatggagggacaggtgactctgagacgcggcggcatgacgaactcggtgtggagcggggcacgcggcaaccgagcgccgataagaatgcggcacgaatggcccgaaaactggagacatcgctgttctactatcagcgctcgcccaacttttgtgagcgcgatctgggagctgatatacagggcaccgtgggacgcaagtgcaatcggaacaccacgaccagcgacggatgcacctccctctgctgtggccgtggccacagccaggtcatccagcggagggcggagcggtgtcactgtaaattccaatggtgctgtaatgtggagtgcgaggagtgccacgtagaggaatggattagcatatgcaattaa

SEQ ID NO: 10203 - protein, 374 aa, DROSOPHILA
MIPRGRTCTQSSHFDTIPKMLHLIALLLSVLGYRESAFAFAISAAGVAHSVARACSQGRLMSCGCDPTINRKTLNKNLRQSLDKEKKQFLQYLETNQILTPEEEKKYERSKIASRWKWGGCSHNMDFGVEYSKLFLDCREKAGDIQSKINLHNNHAGRIAVSNNMEFRCKCHGMSGSCQLKTCWKSAPDFHIVGKVLKHQFRKAILVDQSNLGNGEPVVVLKRARNKKSNGGSGSGSTSPDLDSTDASGGHDDGGTGDSETRRHDELGVERGTRQPSADKNAARMARKLETSLFYYQRSPNFCERDLGADIQGTVGRKCNRNTTTSDGCTSLCCGRGHSQVIQRRAERCHCKFQWCCNVECEECHVEEWISICN

SEQ ID NO: 10204 - DNA, 2525 bp, DROSOPHILA
tgatatcacataaagctcatgggttaaacgtaaaaacagtttctataaaaaattcagcatgtttacatgctggcattttaaagtgaggaaaatgcaacaagctcgtattttcatttaaaaaaaacattacacattgcaaaatttaactaaaggcaatagtgaaaaaactatgctatccagttagtactcacggttccattaaatataaaccatatttgcacctttttcaagtgagtattcatgtaagcgaataaaatattgaaagcaatttaagtgataagttcaaaatatgcaaaacaatatttattaaaaattattataacgcaatgtaaaatatttcaaatgttattgatgcattctttcgagttgcataacttgccatttttccagcatgtttattattctgtaaatatatttgacaaacatgcactggcacataaaaaaaagctgaaattgactcgagtaagaaccggaaaaagaacaatgagcagcgacaaaatatgtgtggcatcgggatgctttttacgcgcaacatttatttcgcattcgaggacgtctctcagtgagatatcaaactcatacacacaaggaggtacacacacacaagcacacctacaaaatggcacacaatcggtaaatggcttgcattaggcatagactttctagacttttattcagattttccccatacattatcactgtgaaacttccaaaatatataatttcttttcgaatgtcacttaaaggatggaagtgccgttctgagccggaatacctcttcgagtttaaattcgagtccacaaaagcagccgcgcaagtggtgagatttcatttttacctttaaccaggatagattttttaggattcagcgaccactggtgctccttccaacaacaaaatgaatacatcattaaaatttattgcgaaatgtatccgatacgaggtgaggttgttttgcagaccgtaaaccaaatgcatggagttaacgcaaatgtttgtcctagtcgtcctttggcactccagcggacatcatgtcgacgggatcgtgaagcttcaggaagtatggtcggaccagcttgtggtagataagggtagaaccattccgttcggtgggcagcatgcaccagatgaggaaagtacacttcaacagccagtagaagggaatcatcgaagttagcagacttggatagaattcaatcacagtgaagatgccaaaagtgacccagtagatcagccacctgatgtcgtcctgcttcgtactggactcgatgccatggatggaaatgtaagcagggtaaagaaccccaatgatgttgcacaatagctgagcgcaccagccaaagaccaggtagaaagcgcaaaacaaaatactacccacgaaaatattcaccctctccacaccggtcttctcttccaggctatcaaaggctttggtccacggcttggacgcatcgcgcagtgatcggttaatgtcctgcttgtagccgttgaagaaccgctgcacctgacttacctgggcggccattttgcacaaatgagaatttaatgtatgtatctaattgtcaatcaaaattgtgtaacgccgccggctttctaaatgccagtcgattttttttttgtttgcattacaaaaacgaccttaaattaaggtaaaagccgcaaaatggtatcttgtatagaaaatttaaaaatttatatttttgaatcagctccgttcttttttttcttatagaaattacctctgtttttcctcttcctccattaagtataataaacggttgcctagtttttggcgcaggccgggctaaatggcatagcttagcctaattgcactcagctttaatgcagttgtgaataaagcaacgccagcggcagacacgtcataatttggtgattttccaacagcttggcccaccatttcgcgccaaagttttaattaagcaaaggccaggagcacgcgcagaataccccatttagtccgacttttcgtttatccacatcaaaattcacattttccatttcttttcagactcattttctgcggcagacacgcactcacagctttgcatggcttccattcattcactcattcaaaatgctaaacaattcaaaaaaatgtgtgtaactatcctcgcccttccattcgtcgcctccgaccttccatttttccatttcgcagcagctaaatgtgttgcgcttttgtctaggccaactgaatgtattttcgtttcggcctttttctccttatatttttccacgagtaccaactcggttcataattcaaaagcctctgacggctggctttaaaatgcctgcggctgtggctgccatgttttatgtttattagctcgtctaattgaaatgtctaatgggggagtttatgaaaaaagcggaaaatccgcttccaccagcttcagaggccttcgtattgccacggatccaggagcccttccagctcgaaatgcttcaccatttgcttaatagagtcctggatgccagggttgagatacagccgccttttcata

SEQ ID NO: 10205 - DNA, 525 bp, DROSOPHILA
atggccgcccaggtaagtcaggtgcagcggttcttcaacggctacaagcaggacattaaccgatcactgcgcgatgcgtccaagccgtggaccaaagcctttgatagcctggaagagaagaccggtgtggagagggtgaatattttcgtgggtagtattttgttttgcgctttctacctggtctttggctggtgcgctcagctattgtgcaacatcattggggttctttaccctgcttacatttccatccatggcatcgagtccagtacgaagcaggacgacatcaggtggctgatctactgggtcacttttggcatcttcactgtgattgaattctatccaagtctgctaacttcgatgattcccttctactggctgttgaagtgtactttcctcatctggtgcatgctgcccaccgaacggaatggttctacccttatctaccacaagctggtccgaccatacttcctgaagcttcacgatcccgtcgacatgatgtccgctggagtgccaaaggacgactag

SEQ ID NO: 10206 - protein, 174 aa, DROSOPHILA
MAAQVSQVQRFFNGYKQDINRSLRDASKPWTKAFDSLEEKTGVERVNIFVGSILFCAFYLVFGWCAQLLCNIIGVLYPAYISIHGIESSTKQDDIRWLIYWVTFGIFTVIEFYPSLLTSMIPFYWLLKCTFLIWCMLPTERNGSTLIYHKLVRPYFLKLHDPVDMMSAGVPKDD

SEQ ID NO: 10207 - DNA, 5295 bp, DROSOPHILA
caaccaccgacgatggctttcggtttattcttgaaaatctacaaaaacaataccggtctttgtatcatatatgaatatttatatatatatatataaataatgttgtttaggtatttatgtatgtatatttaagctaggtcaacgcaaaactctcaaaatagttgttttccacactattgcactgttcaaattgttttgtatggttaaaaacattcgttctcacgttcctacatatttgacggtttattttaagcatttatcctgcatttaaattggcacaaagcgcttaatctttgataatgagaaacagctaagataggtttatgtttgcaactggacagaacggaatctgtgtgaattttaggttagttacacattattccatttaaatgaatctaattttgtataatgtatatttacaattaaaaaccttgatttaaattctttggctctcgaaatcagtgcaaaatgtcgcatcttttcggtcaaagcaaatgcaaaatgattaaaataattgtataggatacaagcttataaattaaacaacagtgctggacattgtaaacaaagcttaaaacatttttgtactttacatcaatcaagtgaaaattcaaacaaggcttaatatttcgctggctgtaagcggcatatctaaaattcttttggtttccttcgtgagtccattgaatggcggtaaaaaaggtcggcaatgtttcttataaatttgttgtataaaagtcgaagtaaaatttagatcgtttaaaattgagttcccttggtttgcattgtatatgatatggaatcattatctaaccactatacaaaagaaaagactcacgaaggaatcagccagagatcgcaaatgaaataacagtggatggcattaagttggctattcttcggggacccagactatctggtgtccccgattacattatctgtttttggctaagcatgcgagtatttaaatatgtttataatatacgatccattgcacagcctagaacagcatgtaggaatgatcacgttccagtcgcgacttggcgcgggattgtatattgccaatcggatccgagggcggtggtatgccattgatctgatgggtaggttccttgtagaagaactcggtccttccattcttatggccataataaacggagtcgttggatctataaatataaatattaataaaaccaaagaaagaaggtttatgattgttgaacatacctcaagatcaaatctgtaagatgatgaccactggaatgtatcgagtgcatgctctcgaggatattaagctctaggggattccaagggccattccgctgcagaacatcccacttggagtccacgcacatgaagctatagttgctcccgtcgcgattgtcgccctccacatttacatttaaggtttgattcagttgagattccatgtgcgggaacttggccacacaaatgtcgaactaattggaagatatattaacaatgtttatagacgaaaaaaatataaattcacttaccatcttctgcacaacctgctgttgttgacaagtaccctcctccatgagcaataataaggtcatattctgctgtccgcatatatagagttcagttctttgcaagccatctggttgaattggacccggaggttgagcaggggctgtggtcaaggcagccaatgcatccactgcatcctcgcacttcagtgaacttcgccgtgggaaaaccttactggttgtcagcggagtttgtatctcgatgggcgttgtttcgcttagagccagaacagatagtttggccatcaggggtgttagtggtactccaccagctccactgcgtccggacgcacgctctccgaaagtagattctcctgctgatttcaatggcagcgtcatggatcgcttgtccagcggagttttggctgcggaaacgttgagattcctatcggcagacgatgcttccgctgcttgctgtctcatgtgctcgtcgagcttttggatctcggcgttgaactcctggaactcggctaccagagcggctagctcggcatcctcgtgcgcctgctcactagcaacaccccacaatttacgatactgatccagaaattgctgaaacaaactgcgcgagatctgctggccgttagtgttgaataccggataggtgggatcgctgatggtccgcgaagtaatcttatcatcgtcctctatgaaatctggcgaatccgaagagacatcaccattaccgcttccatttcgattcacatcggttttgaggccatgcgtaaaattattcagtttcttggagatggcgcgaagtgcatcctgcaggtctgcagatgatttgcgtcgtgtgagctgtttgtttggattgctaatgaagttttgaaagaatttctccacatccacttttagagaatttcgacgcgaatgtgtcttgccattggaattgtgaatatcctcctctttgccctcatcttcgggatttgcgcaaatggacataacattggccaccggcagtaccttgttctcggtcattggagtattgcaaacgctggttcgtccaatgaactgcggataggaatcggtttcgtcgaaatttattgatgcaatgccagactccggtagctctttgctctgcatgctttttatacgcaacggcaggtgggtgggtcgcatagatttgggcctggctggtggtagctgttcaactgctccctgctgctccggggcgtgctcctcctcgggtatatgggtaaaaatgagcgacttgtcccgctttatcttacgcttggcatactgaaacggcataccattttgggtgagctgagctgtgttcatctgcaggttctgggcgcgctgtgcctcgccagctaactggcggtactgcatatgctccaaataaaccaccagcatctgaacgccgttgggtatgtggaactcaggatggttggtcacttgctcggccgcagtgcggatgtgcagaggatcggtgagtacaagatgcttggtcaccatatcgctcagttgcgaggcaaccaccctaaaagacaaggtatttgaatttacaatttgttcagactttagccggattaactgacttgttgtggtacagaatcgctccgccaagtattccctttgtctgctggcaactttgcaacgtttgtatagcctccaggaatatatgactggccgtctggaagagaatcttggttatctaggtaattcggtttgttactttaaccactcacctttggcattcgcagcctcggcacattttgaaatgtatttccgttgcgctgcagcatcggcagatatgtttcaaagatgtggtacagtttctcgctgagattccggcggttcagggcgggcggtgcagcatactgggcatacaatgtctggacgtcacggtggaaaaacttgagcagggaactcagcagatcagcacgatgttccaacagttgatctccaatatttcgatcagtgccaattgcctggaaaacagaatactccatcggattaataaaagaaaagtgaaattatgtgattcgatttaccagaataaaacgaccgaattccttcagcacaaattttccattctgcagcgccaggatgcggggattaaagaagcaatccttgaggaaatacgacgtgcccataagctgaccacacagagccaccttctgggagtcggacacccagcttggatggaagtagagcaccgccgatatgggatcatccgcctcgtctgtgagacactctgtgtcgtagacaaacacaatcatcgtctccctgtaaatttaataaagttcaagggttattgttattgagactttgagacggggaaatatattttagcttagtttctaatgttaaggaaaagctttggagaaattacgttcaactattttcccttgtaaaatgtgagctgaatcttaaaacttgttcaagaattgatacaacaagtgctgtagcaaaaccggtatgcaaaaaaaactttacacaaatacaaattggatttatgcaatctcaatttgtttgacgttgtttaatgcaattcattgtagatatttgtgcactggaaacacagtttgagtatgaaatgagcaacctttcggtgaggattgaggtctgctgcttctgctgcaccttctgccatcgcttgtgcttggttttgcgccaatcccgaaacattgctcctgaaatctagtggatttcggtgcttccaagtctagcgctgcatcgtggctccttatcacatttaacgaccgacgattctgataagtcaacaagccaatagcgccgtacaatgccaactgtctgatttcgatgtggcccagctgcctgatacgaccaactgtgatacgagagcgtgatcagaattccgctcacgcccaagtgaaccagcaggtgagaagtgaggtgaaagcttccgagtgtttccatcattgcggttgagcgggtgggtatacgagcaactatgctctcgtataatgtattcatccatgtggtgaccacttcaatgacgaaggtatcgattccagttttagagtgtaacaaattcgattaccaatgctatattttataaaaagctctcggaggcaaatgattttcaaatatcattaataagattttatatatgtttaacaacagagaccttgtctgttttattgcgcgtaatacaatgtttatttaaactatcataacaactctatccagcagctgttttcaacacattgggtggcaactgttgaatctggttcacagtatccgattggctagatatgctatacttggccacatatccatcgggaccagctttgtaggtgaccagcaggtatttcgaaccaggaaaacgctggctataagtacccttaacttgaagcacatctggcgcaatctgttcaacaatctcatcccgcgttgaaccgtcgagatcaatcctacaatatggaagccatttggttgagcttacagcattatcttaacttcattttttgtttacctcagggaataattattctcagatggcactagcacaactccattatcgtttatgggcggcacgaatttggtaactgaagttgtgggcgccgaattcaccagacttagaaacagaatcaaaaacacctgtagcaaatattatacaacgattggcaggcaaacttatgagaaaaactcactgagcttaacaataggttagccatgatgatcttttggcttttggttagcgactgatgtttttagatagctgacagcaaacagctaacaaataaacagctaaacttaaaccaagttcaaa

SEQ ID NO: 10208 - DNA, 2685 bp, DROSOPHILA
cgctattggcttgttgacttatcagaatcgtcggtcgttaaatgtgataaggagccacgatgcagcgctagacttggaagcaccgaaatccactagatttcaggagcaatgtttcgggattggcgcaaaaccaagcacaagcgatggcagaaggtgcagcagaagcagcagacctcaatcctcaccgaaagggagacgatgattgtgtttgtctacgacacagagtgtctcacagacgaggcggatgatcccatatcggcggtgctctacttccatccaagctgggtgtccgactcccagaaggtggctctgtgtggtcagcttatgggcacgtcgtatttcctcaaggattgcttctttaatccccgcatcctggcgctgcagaatggaaaatttgtgctgaaggaattcggtcgttttattctggcaattggcactgatcgaaatattggagatcaactgttggaacatcgtgctgatctgctgagttccctgctcaagtttttccaccgtgacgtccagacattgtatgcccagtatgctgcaccgcccgccctgaaccgccggaatctcagcgagaaactgtaccacatctttgaaacatatctgccgatgctgcagcgcaacggaaatacatttcaaaatgtgccgaggctgcgaatgccaaagacggccagtcatatattcctggaggctatacaaacgttgcaaagttgccagcagacaaagggaatacttggcggagcgattctgtaccacaacaaggtggttgcctcgcaactgagcgatatggtgaccaagcatcttgtactcaccgatcctctgcacatccgcactgcggccgagcaagtgaccaaccatcctgagttccacatacccaacggcgttcagatgctggtggtttatttggagcatatgcagtaccgccagttagctggcgaggcacagcgcgcccagaacctgcagatgaacacagctcagctcacccaaaatggtatgccgtttcagtatgccaagcgtaagataaagcgggacaagtcgctcatttttacccatatacccgaggaggagcacgccccggagcagcagggagcagttgaacagctaccaccagccaggcccaaatctatgcgacccacccacctgccgttgcgtataaaaagcatgcagagcaaagagctaccggagtctggcattgcatcaataaatttcgacgaaaccgattcctatccgcagttcattggacgaaccagcgtttgcaatactccaatgaccgagaacaaggtactgccggtggccaatgttatgtccatttgcgcaaatcccgaagatgagggcaaagaggaggatattcacaattccaatggcaagacacattcgcgtcgaaattctctaaaagtggatgtggagaaattctttcaaaacttcattagcaatccaaacaaacagctcacacgacgcaaatcatctgcagacctgcaggatgcacttcgcgccatctccaagaaactgaataattttacgcatggcctcaaaaccgatgtgaatcgaaatggaagcggtaatggtgatgtctcttcggattcgccagatttcatagaggacgatgataagattacttcgcggaccatcagcgatcccacctatccggtattcaacactaacggccagcagatctcgcgcagtttgtttcagcaatttctggatcagtatcgtaaattgtggggtgttgctagtgagcaggcgcacgaggatgccgagctagccgctctggtagccgagttccaggagttcaacgccgagatccaaaagctcgacgagcacatgagacagcaagcagcggaagcatcgtctgccgataggaatctcaacgtttccgcagccaaaactccgctggacaagcgatccatgacgctgccattgaaatcagcaggagaatctactttcggagagcgtgcgtccggacgcagtggagctggtggagtaccactaacacccctgatggccaaactatctgttctggctctaagcgaaacaacgcccatcgagatacaaactccgctgacaaccagtaaggttttcccacggcgaagttcactgaagtgcgaggatgcagtggatgcattggctgccttgaccacagcccctgctcaacctccgggtccaattcaaccagatggcttgcaaagaactgaactctatatatgcggacagcagaatatgaccttattattgctcatggaggagggtacttgtcaacaacagcaggttgtgcagaagatgttcgacatttgtgtggccaagttcccgcacatggaatctcaactgaatcaaaccttaaatgtaaatgtggagggcgacaatcgcgacgggagcaactatagcttcatgtgcgtggactccaagtgggatgttctgcagcggaatggcccttggaatcccctagagcttaatatcctcgagagcatgcactcgatacattccagtggtcatcatcttacagatttgatcttgagatccaacgactccgtttattatggccataagaatggaaggaccgagttcttctacaaggaacctacccatcagatcaatggcataccaccgccctcggatccgattggcaatatacaatcccgcgccaagtcgcgactggaacgtgatcattcctacatgctgttctag

SEQ ID NO: 10209 - protein, 858 aa, DROSOPHILA
MFRDWRKTKHKRWQKVQQKQQTSILTERETMIVFVYDTECLTDEADDPISAVLYFHPSWVSDSQKVALCGQLMGTSYFLKDCFFNPRILALQNGKFVLKEFGRFILAIGTDRNIGDQLLEHRADLLSSLLKFFHRDVQTLYAQYAAPPALNRRNLSEKLYHIFETYLPMLQRNGNTFQNVPRLRMPKTASHIFLEAIQTLQSCQQTKGILGGAILYHNKVVASQLSDMVTKHLVLTDPLHIRTAAEQVTNHPEFHIPNGVQMLVVYLEHMQYRQLAGEAQRAQNLQMNTAQLTQNGMPFQYAKRKIKRDKSLIFTHIPEEEHAPEQQGAVEQLPPARPKSMRPTHLPLRIKSMQSKELPESGIASINFDETDSYPQFIGRTSVCNTPMTENKVLPVANVMSICANPEDEGKEEDIHNSNGKTHSRRNSLKVDVEKFFQNFISNPNKQLTRRKSSADLQDALRAISKKLNNFTHGLKTDVNRNGSGNGDVSSDSPDFIEDDDKITSRTISDPTYPVFNTNGQQISRSLFQQFLDQYRKLWGVASEQAHEDAELAALVAEFQEFNAEIQKLDEHMRQQAAEASSADRNLNVSAAKTPLDKRSMTLPLKSAGESTFGERASGRSGAGGVPLTPLMAKLSVLALSETTPIEIQTPLTTSKVFPRRSSLKCEDAVDALAALTTAPAQPPGPIQPDGLQRTELYICGQQNMTLLLLMEEGTCQQQQVVQKMFDICVAKFPHMESQLNQTLNVNVEGDNRDGSNYSFMCVDSKWDVLQRNGPWNPLELNILESMHSIHSSGHHLTDLILRSNDSVYYGHKNGRTEFFYKEPTHQINGIPPPSDPIGNIQSRAKSRLERDHSYMLF

SEQ ID NO: 10210 - DNA, 4327 bp, DROSOPHILA
ccaggctatcaaaggctttggtccacggcttggacgcatcgcgcagtgatcggttaatgtcctgcttgtagccgttgaagaaccgctgcacctgacttacctgggcggccattttgcacaaatgagaatttaatgtatgtatctaattgtcaatcaaaattgtgtaacgccgccggctttctaaatgccagtcgattttttttttgtttgcattacaaaaacgaccttaaattaaggtaaaagccgcaaaatggtatcttgtatagaaaatttaaaaatttatatttttgaatcagctccgttcttttttttcttatagaaattacctctgtttttcctcttcctccattaagtataataaacggttgcctagtttttggcgcaggccgggctaaatggcatagcttagcctaattgcactcagctttaatgcagttgtgaataaagcaacgccagcggcagacacgtcataatttggtgattttccaacagcttggcccaccatttcgcgccaaagttttaattaagcaaaggccaggagcacgcgcagaataccccatttagtccgacttttcgtttatccacatcaaaattcacattttccatttcttttcagactcattttctgcggcagacacgcactcacagctttgcatggcttccattcattcactcattcaaaatgctaaacaattcaaaaaaatgtgtgtaactatcctcgcccttccattcgtcgcctccgaccttccatttttccatttcgcagcagctaaatgtgttgcgcttttgtctaggccaactgaatgtattttcgtttcggcctttttctccttatatttttccacgagtaccaactcggttcataattcaaaagcctctgacggctggctttaaaatgcctgcggctgtggctgccatgttttatgtttattagctcgtctaattgaaatgtctaatgggggagtttatgaaaaaagcggaaaatccgcttccaccagcttcagaggccttcgtattgccacggatccaggagcccttccagctcgaaatgcttcaccatttgcttaatagagtcctggatgccagggttgagatacagccgccttttcatatccattccacgcggctgatccgaaagtagggcggcgaaatccgcatcagtttcatcggtgtttagcagcacaggtagcagcagcaggccacaatgaacggcttaaggaatatagattatcactttatttatttcaaaaaaaaaaaaaagtacgaaagacttggaagtatatatattttgtttgcatattcatttgctaatctcttagaaattaagtttacccaccgtaaaatcgtttttgctctgactccaggtgaaactgctttcgactgggcaacctttgacctttgaagccaagtctctgcagctcccccacgaagacatcgtgatagacacctctcatcttcatttgcagctcactccgcacttgctccacagccgacgtgttgagcagatgatggatgtccagggtgggcgaaccccagaaggcgtactgaaagtcaatcagaaggacatcgctcggcacgcccgcctcgtatttgaacatcatgttgtttgtccacaagtcgccgtgggtaaggacattaatgtgcgtttgctcttgcttaaaacagcggagtcctagtcccatataatagggagccagttcgtctaatagttttgcgtggtgttcataacccgcctgagttttaaggtaattggcacaggacttgaggcagcccagaaagtaggcactaaagctttctgtatacctattgaagaagcctttatcgtattcagtgagagagaagttattttccaaaagattgttctccaaaaccgctgatgctgcctgcattttggccaacttcctaagaaccaaactcacatgctgctcatccaatctctgaagtctcggggccatcacaaatcccttgtagctcagatcttccattatgagtgctcctctttgacgatcgatgtgtagtattttaggacatagttgctcgccggctagttcctgcaattttggtaacacttgctcgtaaatctccagttcccgattgtaaatatcatatggggctttcttcattttcgtctccgcgtcttcatactctagaacagtcttggcaatcagatgttcctcgactatgctgctgtacacaaggtgtatgcgtgttaggatagcaccatagttttctcctttccctaaagcgggatttataaccatcgattccactcgaagttcgttgttctggtaataccgacgcagtgccgcttccaggtattcagctgtgagccaagctgccatgactgccctaatcagactaaaattgttaaacttagctacacagattagcagcagccactgataactcaaaagctttcagtttacaactgaataataattgcatgtcttatcgcaatataagcacactttctgtgactgcgattacagtcactttgtttatattttcggtttaaaaaaaaaaaactcataaatgcaaacagatgtttgcttggaaaacacagatggggattgatttagttatagccataccgctttgaaaaagcccagttcaatggcaagtgccagaaagccaatctcgaggttatccattaacaaattagtatcgaaactttagctattccgttaaaagaacatacctaaactaatctcacgagtttcccaacttgttttgcctaactttattgccgtacgaaatatatgccagtgtatatatatgtaaaaaaccgggctaacatcacccgtcccatcagctggtctaatcgcatgcaaaacccctttcactcagttggcccgaacccttccagttcgccggctgccagtgtcacagttcggggcttaggcacctccggtccggattcaagttccggcttcgattccggctccgaccctggtggtctgctgcaactgtttgcagtgcgacgaatggcgcactcatagacgtagttggccagaaacaccgcaggaggagcagctaaggttgcttcaacctccggacctggtgctcccattgtagctactggaatgtcgactgcagacgttgctcgttttcccattgatgttccatttctagccagagataacggtcgattgcaactgtttgtgctggtgggtggcttctgctgccacatgtggcctgtaccccgcagacagttggcctcgatcactatagctactcggattagttagggtttgagttgggtttgtggagggttaattaaagtgctcaagaccacttaccgaaagagatgccaagcagggagcacataagaaatatgcagttcatattgtaaattgttgccagttgaagagctcacactgttttgtcgatgtatttacagatttttggttcaaggactactttcatccaaattaggtttacagaatcgttctatacttagaccatttttgtgcattgccttggtaaagtttcttggccaaactttcgacacttgtttttgttgatgtttttatcttctgaggctgcatcttctgctgtatctggaatccattcaaattgacgcattgacaattgttttaccaattttatctcgcttgtttttcgacagttggccaaaaagtttgttgcctccattccccagcaacgttttgacaactgctacggctgctgctagtggcattggcattgttgctgcatttgttgcagattaaagttgccgctaccgtctttttattcaattttcctgcacttttcccttctttgcatagccagagagatagtttatcaaaacattttcaagttgcagtgcggctgcaaaaacaaaagcacccaagacatcatcgattttctcgagtggaatgcgcctcgatgcgaagtggggttgtggctacaaggaaaacaactcaatctcaatgcatggcacttaagcagctgaaggagcagtggcaacagtggcagccacttggttgcaaggtgcagatcctgccacgacagcagaatgcaatttctggaggaacgccaaaaagggaggcagacgtcgctgcttgtcgaagggattataatcgagttttaaagacattttatgatccctttccgttatttacgagttcgtatgcgtcataaaagtcagttctaggacaaatttacaaatgtagaacttaaatctctctaaatctaaatattgcgtacggtgaaaaactttaacaaaaaacaatttacccattcatagccatatcacctctcatttaattcactaaaaagaaaccaaagccagaaagtttgctcatttataattacggaaatacag

SEQ ID NO: 10211 - DNA, 1626 bp, DROSOPHILA
atgtgctccctgcttggcatctctttcgctatagtgatcgaggccaactgtctgcggggtacaggccacatgtggcagcagaagccacccaccagcacaaacagttgcaatcgaccgttatctctggctagaaatggaacatcaatgggaaaacgagcaacgtctgcagtcgacattccagtagctacaatgggagcaccaggtccggaggttgaagcaaccttagctgctcctcctgcggtgtttctggccaactacgtctatgagtgcgccattcgtcgcactgcaaacagttgcagcagaccaccagggtcggagccggaatcgaagccggaacttgaatccggaccggaggtgcctaagccccgaactgtgacactggcagccggcgaactggaaggggcagtcatggcagcttggctcacagctgaatacctggaagcggcactgcgtcggtattaccagaacaacgaacttcgagtggaatcgatggttataaatcccgctttagggaaaggagaaaactatggtgctatcctaacacgcatacaccttgtgtacagcagcatagtcgaggaacatctgattgccaagactgttctagagtatgaagacgcggagacgaaaatgaagaaagccccatatgatatttacaatcgggaactggagatttacgagcaagtgttaccaaaattgcaggaactagccggcgagcaactatgtcctaaaatactacacatcgatcgtcaaagaggagcactcataatggaagatctgagctacaagggatttgtgatggccccgagacttcagagattggatgagcagcatgtgagtttggttcttaggaagttggccaaaatgcaggcagcatcagcggttttggagaacaatcttttggaaaataacttctctctcactgaatacgataaaggcttcttcaataggtatacagaaagctttagtgcctactttctgggctgcctcaagtcctgtgccaattaccttaaaactcaggcgggttatgaacaccacgcaaaactattagacgaactggctccctattatatgggactaggactccgctgttttaagcaagagcaaacgcacattaatgtccttacccacggcgacttgtggacaaacaacatgatgttcaaatacgaggcgggcgtgccgagcgatgtccttctgattgactttcagtacgccttctggggttcgcccaccctggacatccatcatctgctcaacacgtcggctgtggagcaagtgcggagtgagctgcaaatgaagatgagaggtgtctatcacgatgtcttcgtgggggagctgcagagacttggcttcaaaggtcaaaggttgcccagtcgaaagcagtttcacctggagtcagagcaaaaacgattttacgccgttcattgtggcctgctgctgctacctgtgctgctaaacaccgatgaaactgatgcggatttcgccgccctactttcggatcagccgcgtggaatggatatgaaaaggcggctgtatctcaaccctggcatccaggactctattaagcaaatggtgaagcatttcgagctggaagggctcctggatccgtggcaatacgaaggcctctga

SEQ ID NO: 10212 - protein, 541 aa, DROSOPHILA
MCSLLGISFAIVIEANCLRGTGHMWQQKPPTSTNSCNRPLSLARNGTSMGKRATSAVDIPVATMGAPGPEVEATLAAPPAVFLANYVYECAIRRTANSCSRPPGSEPESKPELESGPEVPKPRTVTLAAGELEGAVMAAWLTAEYLEAALRRYYQNNELRVESMVINPALGKGENYGAILTRIHLVYSSIVEEHLIAKTVLEYEDAETKMKKAPYDIYNRELEIYEQVLPKLQELAGEQLCPKILHIDRQRGALIMEDLSYKGFVMAPRLQRLDEQHVSLVLRKLAKMQAASAVLENNLLENNFSLTEYDKGFFNRYTESFSAYFLGCLKSCANYLKTQAGYEHHAKLLDELAPYYMGLGLRCFKQEQTHINVLTHGDLWTNNMMFKYEAGVPSDVLLIDFQYAFWGSPTLDIHHLLNTSAVEQVRSELQMKMRGVYHDVFVGELQRLGFKGQRLPSRKQFHLESEQKRFYAVHCGLLLLPVLLNTDETDADFAALLSDQPRGMDMKRRLYLNPGIQDSIKQMVKHFELEGLLDPWQYEGL

SEQ ID NO: 10213 - DNA, 4174 bp, DROSOPHILA
cttaaaggtgcgcgcagcactcgaggagcaggcttcgctggatcaggatgggccagcgacgcctacaactccgggtgaactgagtgccgatgatgccgccgctctgtctggcgaatttgaggccaccctgaccaaggaaaatccgctcgaggaataccgaactctaatgaagcgctttgttctgaccaaaatcatcgttccggacagcgttcaccaggccagcgtgaagaagatagcggcagccgccagggagataatctggaagctgctcttcgatggcacaccctcagcggaggatcaaaacaaggccgccgagctgctgcaggagtacaagggtgatgctggtttctatgggcccgacgactacaacagttggattttcaatctgagggatgaggttctcaccaaagagcttctcgacttttggcgcgacaagatggtgaaaatggaacttggtcccagttgcgcccgcgattccgactattacgacaacgaggatccgctgccattcgagttttacgaaaaggctggttgcaaggctccctttgaaggacctgtaaatgatgattagtagtgcatctttcatgactgaaggattgtttccttatgtactaaaacacctattctggtcgtaatctctgaaggcacacacagtaaagcatttcaatatctgaattatgtttcgaaatgttagaaattgtttaaaaatgaataaaatgataagtattttataactgttctcaaaaatagtggtcctttttattatctcgatcagtaacaaattatttgttctcttcatatttcttcaatagcttaaagcatttaaaattttgtaatatatataaactataatagcatataaattaaggaacatttttcttcatttgatttaaaatttgtatcacgaattttcttgaaatattttatgagtattcttacatctcctgttctaattaagcattatgcatcctaaaacttttaaattgtgtattaaatgattgtttttagatacttttaataaaagttgaccgatgtaggtggaatccacataaatagtttcagcatagtttgtattcatacatagacaattttcgtaatttcctttgaagttcttaaatccaatggttagattattatgcttaaatactaaaataaaatatgaaatactttcttaagttaacttttaaattccgaacacaaaaatgaactttaattaattttgaaactattacatacactgactagagaacatatatccattttctgttcttcttcccatctttggtggttcccatttgggtgctctgtgtccacacaacgtggaacataatacaaaatcaagaactaaataaatataaagtgctttcacaacatttgaacaacgcaacaagaaatgaaccttaaaatgtgcgtccttaaatattacaaaataattctatgagtaaaattgggcagccatcgtttctcattgagatctctgtgagcttatggcaggtggatcgattcgagaattgtatctatagcctgaaatggtcactcggcgtagagcagtcgtgaacgtgatttccggaggccgcgagagcctccaccgccgattccactgtctccgccctcgccacattgccaggacttggtcttggcccgaaaatatcgaaactcatcattgtgcgccggtgccagcattggtacatattggctgggctggcatagctgcgagtatagaccgaagaactccttgtacccattgtgcaggatataaagttcaggatagtccagtgccggatagttgtgggtatgctgacttctgtcgttgctccgcaggtagcgcaatagcttgggaccccgttccgaggagaactcacagtggaagacgtagatgcgtcgattttcctgattggaggtcagcgtgggaaacgcctcctgtatctgcccacgtgtgtacaaattcttcgctccccgtatgtgtccgccaaggaactcgtatgggtaacggcagtctatgatctcgtatccgccctggcttcccaattgttcatcaaactcgccctgaatcagtctggccaatgtgtcactggagatggtctttagatcacgatgtctaatgcctgtcgccaaacagggcagggtacatggcttgctgagatctccgattaactctggttcatctcccagtgctctcatgatctcggcgtcgttcattgatagagttttccgttgcatcttcttcatgggcatgttggtctcctgatctggttcttgaaccgcttcctctggctgttcactgggatacatgctaaggcagcgacgcagggagccttttttgttggacatctcctctaaattgctttccgatttcagctgtccgctgaggagcacttccaagtcatcgggcaactcaagattgtgattctcggctgattccatttcgaacatgtccatgtactcatcatccagcgagttgcccgactcgtaactcgagcaggagctactgaaactgccgagtgttcgcgaggacaggctattaaagttattcagggtcctgttggctgggattctctgggtggacttgggagtgccatccaggcgggctccattcatattctgcgacaattcggtgatgggcgacagaacggtggtgctggcaggaatatgccgcttcagcatccattgcagcggagtctcctgcacggctgattttcgccttttggcctggtattccatatcggcatcatggggatcgaaattctcctgaccacacgctccactttcatcatcttcttcctccacatcgagcattagccgcttgctcgccatctgcgcgttaaaaagaaaaaaaacaatgatttttttatcagctggaagctgctaaaatcagctggattttcgcaattgttcttaccctgatctatttgcgatatacgtaactattgggaagttcagattttgggttccagcgtgcgcagtgatttcgattgccaaatccttgacgattttcttgttctgtcgacttgtttgtttcgcttttggcggtcaactttattggcgcctttatcaattccccattctaccgatgcaaacccaccacctgctaactcaccactgcgccgtatttaaacaggacgctctagtttgaatttaaattgcttgtatatttttttgttggtatttgcatggctggttcaactttatttgacaaagagcaatgaaattgaatttaaaaagcgcagccatcttaatgataacgtgttctaccaccataatatgcgatgaaatcaatatattttcaatcaataaatttgtactttaaatagttataagaaaaagatacatagaataatcgttaatgagcgtaataaaataaaaacattccacaattataattatgaatcatatcatttttccagtggaaaatttgacaaaaacatattaacatttattacatctggtcacactgtccgtttgtttatatttttcgtgctgcagttgtgttattgtttttaatacaaatatgccggaatttgagaactttaacgtaaaaaccacaattgactgcaaacaaggtgcagtgcgagctgtgcgctataatggtgaatggttttcagtgcccgatttttaagcattaactcatcttgatccttaatctttagttgatggcacttattgcttgagttgtggatctgacaagaagataaagctgtggaatccggcatcgggattactgcttaagacttatggtggtcatgcggatgaagtcaccgatgcggcggtatagttttttctcacttagtattattcttattattaagtactccactttggcatattgcagggaagctgtgatagtagctatatcgtttccgccagcttggataaaagcattatctactgggacgtgtcaacgggtgagttgtaatcacagcgcaccaattatggctaatgtttctctcgcctatttcaggagcaccagtacggcgcctgcgtagccatgccggaggtgttagatgcgtctgcttcaacgaggactcctcgatagccatttccgggggtcgagataatgccgtaatgtgctgggacattcgaacgcgtcgcctggatcccgttcaggtgatgaaggaggcccgggactgcatcaccacggtggcaaccaacgagaatcgcatctacgccgcctcct

SEQ ID NO: 10214 - DNA, 2130 bp, DROSOPHILA
ccatgcaaataccaacaaaaaaatatacaagcaatttaaattcaaactagagcgtcctgtttaaatacggcgcagtggtgagttagcaggtggtgggtttgcatcggtagaatggggaattgataaaggcgccaataaagttgaccgccaaaagcgaaacaaacaagtcgacagaacaagaaaatcgtcaaggatttggcaatcgaaatcactgcgcacgctggaacccaaaatctgaacttcccaatagttacgtatatcgcaaatagatcaggctgataaaaaaatcattgttttttttctttttaacgcgcagatggcgagcaagcggctaatgctcgatgtggaggaagaagatgatgaaagtggagcgtgtggtcaggagaatttcgatccccatgatgccgatatggaataccaggccaaaaggcgaaaatcagccgtgcaggagactccgctgcaatggatgctgaagcggcatattcctgccagcaccaccgttctgtcgcccatcaccgaattgtcgcagaatatgaatggagcccgcctggatggcactcccaagtccacccagagaatcccagccaacaggaccctgaataactttaatagcctgtcctcgcgaacactcggcagtttcagtagctcctgctcgagttacgagtcgggcaactcgctggatgatgagtacatggacatgttcgaaatggaatcagccgagaatcacaatcttgagttgcccgatgacttggaagtgctcctcagcggacagctgaaatcggaaagcaatttagaggagatgtccaacaaaaaaggctccctgcgtcgctgccttagcatgtatcccagtgaacagccagaggaagcggttcaagaaccagatcaggagaccaacatgcccatgaagaagatgcaacggaaaactctatcaatgaacgacgccgagatcatgagagcactgggagatgaaccagagttaatcggagatctcagcaagccatgtaccctgccctgtttggcgacaggcattagacatcgtgatctaaagaccatctccagtgacacattggccagactgattcagggcgagtttgatgaacaattgggaagccagggcggatacgagatcatagactgccgttacccatacgagttccttggcggacacatacggggagcgaagaatttgtacacacgtgggcagatacaggaggcgtttcccacgctgacctccaatcaggaaaatcgacgcatctacgtcttccactgtgagttctcctcggaacggggtcccaagctattgcgctacctgcggagcaacgacagaagtcagcatacccacaactatccggcactggactatcctgaactttatatcctgcacaatgggtacaaggagttcttcggtctatactcgcagctatgccagcccagccaatatgtaccaatgctggcaccggcgcacaatgatgagtttcgatattttcgggccaagaccaagtcctggcaatgtggcgagggcggagacagtggaatcggcggtggaggctctcgcggcctccggaaatcacgttcacgactgctctacgccgagtgaccatttcaggctatagatacaattctcgaatcgatccacctgccataagctcacagagatctcaatgagaaacgatggctgcccaattttactcatagaattattttgtaatatttaaggacgcacattttaaggttcatttcttgttgcgttgttcaaatgttgtgaaagcactttatatttatttagttcttgattttgtattatgttccacgttgtgtggacacagagcacccaaatgggaaccaccaaagatgggaagaagaacagaaaatggatatatgttctctagtcagtgtatgtaatagtttcaaaattaattaaagttcatttttgtgttcggaatttaaaagttaacttaagaaagtatttcatattttattttagtatttaagcataataatctaaccattggatttaagaacttcaaaggaaattacgaaaattgtctatgtatgaatacaaactatgctgaaactatttatgtggattccacctacatcggtcaacttttattaaaagtatctaaaaac

SEQ ID NO: 10215 - protein, 426 aa, DROSOPHILA
MASKRLMLDVEEEDDESGACGQENFDPHDADMEYQAKRRKSAVQETPLQWMLKRHIPASTTVLSPITELSQNMNGARLDGTPKSTQRIPANRTLNNFNSLSSRTLGSFSSSCSSYESGNSLDDEYMDMFEMESAENHNLELPDDLEVLLSGQLKSESNLEEMSNKKGSLRRCLSMYPSEQPEEAVQEPDQETNMPMKKMQRKTLSMNDAEIMRALGDEPELIGDLSKPCTLPCLATGIRHRDLKTISSDTLARLIQGEFDEQLGSQGGYEIIDCRYPYEFLGGHIRGAKNLYTRGQIQEAFPTLTSNQENRRIYVFHCEFSSERGPKLLRYLRSNDRSQHTHNYPALDYPELYILHNGYKEFFGLYSQLCQPSQYVPMLAPAHNDEFRYFRAKTKSWQCGEGGDSGIGGGGSRGLRKSRSRLLYAE

SEQ ID NO: 10216 - DNA, 3584 bp, DROSOPHILA
ctaaaaccactgctgccgtcggacctcctcctcctttacccctcaattgagcactttgaaggggcatttttttgccgccaataaagaacggcttttaagatttttcaaaaaataaatgggtacatatagaagtggcaattttccaacatttccaacttaattgagaatggatttggcatttaatggattgtgttgtcatggtattaagttttcggtaagctgttaattaatcaagtggcataagcgataacgatgtggcattccataaaaacaagagccggatgcgatgtttgagatcccaaccaaacatcatccagatagccaaaaatgtaaatacattttggctacaacttcactctctaatactttcgctagaattcagggcaactaacttccataatctctgagcaatctttggccattaattgatttaaatatcgggcaacatttatgaacagcaaatatatcaaattagcgccaaaactgaacgctatcaaagcgctccattaagaccccacccccaaagaagaaaaataaatacaaatcgacttcaaagcgccgttcgaaatgaacgcaaatttgactccagtttgggtttaaccgacttttggctgcggggcgtttaattgaatagttcgggctcacagatttgcatacgttgcaggccacgaagctaaaacaaataagacaaatcacgcccagcatttgcgataagcgagccacgaactggtcgctctgttgcaactgttgcaggtacacttaaaaaaaatagcaactagttaaaaagataactagcatcgaacgtattataggtaaatatggaactgatcttcagagtttttcttgctagttcgttactggatattttgctattttttaatctatattgcaaacccctgattatattatttccagtgtattaatagcgaaatgaaatgccgaccgatatcagagtaatttaagtatcctgcggctatcggtgcgcatgcgtaatgcgatattacgtatacgctgcgttgtgccgttgcttacctagactgtggtgtttccccggtccgatgctatcgctagcctcctcatcgctgtcgatgtgcggaaacgagttgcccagacaatagagtggcaatgccggcgaggtggaggcaccacttgcctcattaccaacgctgttgctcctcattttggcctccgagtggctggtcaggagctcctcgccggcactggaacttgagctggagctggagctgctgctcctgtcgctcacattactgttacccgacgaggtggagttcatgctatcctggcgattggtcagacgcctaagcatgtaacggctgttgaacagcttgtttttggtaatcaaatcgctgcgtcgcaacgcgcactttggtgatcccaacaggttattgttgcatccattattgttggcctcatccagagagtcctccccgcggtcatgatgcatcggcatttgcaactcgttgagcgaaacgcgctcgatgctgcgctccacgctcaccagcagattctgcagcagttgcggcagttcaccgcaatcggatgccatcagtgccgccgctgccgtggacatttccagctggagcacgctcaggggcaactcgccgggattctcgtggtcgatgcagtggctctggacgctctcctccttgcgggacgagcgccaaacagcatagagccgcggtttgcaatccgcgtcgctttctgtagattctgcaagaggaagatgatgggagaccagttattgacggaactacagatatgtacttgtacatttttttggaagaatgagtgtgcttcatttaatttgctggcatcttatagatatttaacgctaatcatttaataaaatccgtgaattgtcttgctcttacgtattattgtacgggtcaagtcgtaaataagttattagtcataaaaatatatggtttccgattgcaagcatagaaaaatatagcaataaaatagttttacgcgttagtttttagactcaggcactaaaaaagttataattttacaaaaaaaaaaaaaacgaattccctgaagcttcggcaaaatatcatcaaagcttaatgtttatttgtatctaatcaagggagttaagcacttgatacttaattttgttgatcataaattgaacaaataattaatagttggaagactttatattctatatctaaataaatacctagaaaccggcttgctttactattctcctgctcttgcttccattctagagcatttaaattgcacaagcgagccctagacggccgtaagtgatcgattattttgattagtggttacggactcgtgcgcctgccgccataatcatagttataagaagggccagagcacaccgattccgatcccagtcgacccacttacccaatttgatgcaaagatacagctccgacggacgaagtgcgtgcgcgatctcagcgtcgctcagctgcaagaccagtgctccattggatgttgccaaaggccagccgggatgccataaccaggactgcaagaaacgataagcggtataagtgcctgattgcagattgagtaacgaaatcatttgcaaatttttattattactacgattacatgttcggccagaaattgtgcaggccacaacacccgcaagtgttaagctgcggaaaggaaaccgaaaacgataaagaaaccaaagccatagctggccaaaactaagcgaaaagaccaaaagcctccactgcctggaaagcgcattaaaaatagcccagactgtccgacgtcagacatcagagctgggatatttggatatttggatatttggaggcctgaatgttcgaggtctcccccatgtttgtccgccagttggccatatcggagatggcgagtgtggcaacttttggccgccccagtaccaaaagtgcacaggaaaaacagataactataactatatttgttaaccacagactaaagagatatgaatagttcccttgtaaaacggaaaaggagtttccaatcgagcatcgactagcttaagatatataagttacgcatgtttaaattttaatacttggaagattgaaataatttagtatgataaactaatttaatgaatgaagttcctgttaaactacttaacaaaaataacatttttttgtgtgtattcccgaaaagcccacgaaaaaaaaaaaaaaacaacggaaaacaggcaccgcctggcgatggcgatggaaaattatagataaatcatgcaagtcaaacttttggcaatttttgctaatttttcgttattaccctcagcgtttgtgccaaactgaaaagactgaatagcagaaaacccaacgcagatttcacccctacgggaatgtgaaatcgaatttgagacccgcgactgcaaaaggctagaaaaactaaaatcaaaaaaatcaaaaaccaaagcgagagagagagctcctagagacccgagttaaagcccgatccttttggtcagctattaattgttacaatgcgaaaatgtttcttcacattgttgctaatttgccagttgctcagcgattttttcaacatttgatttttgtcttgtt

SEQ ID NO: 10217 - DNA, 912 bp, DROSOPHILA
atgatttcgttactcaatctgcaatcaggcacttataccgcttatcgtttcttgcagtcctggttatggcatcccggctggcctttggcaacatccaatggagcactggtcttgcagctgagcgacgctgagatcgcgcacgcacttcgtccgtcggagctgtatctttgcatcaaattggaatctacagaaagcgacgcggattgcaaaccgcggctctatgctgtttggcgctcgtcccgcaaggaggagagcgtccagagccactgcatcgaccacgagaatcccggcgagttgcccctgagcgtgctccagctggaaatgtccacggcagcggcggcactgatggcatccgattgcggtgaactgccgcaactgctgcagaatctgctggtgagcgtggagcgcagcatcgagcgcgtttcgctcaacgagttgcaaatgccgatgcatcatgaccgcggggaggactctctggatgaggccaacaataatggatgcaacaataacctgttgggatcaccaaagtgcgcgttgcgacgcagcgatttgattaccaaaaacaagctgttcaacagccgttacatgcttaggcgtctgaccaatcgccaggatagcatgaactccacctcgtcgggtaacagtaatgtgagcgacaggagcagcagctccagctccagctcaagttccagtgccggcgaggagctcctgaccagccactcggaggccaaaatgaggagcaacagcgttggtaatgaggcaagtggtgcctccacctcgccggcattgccactctattgtctgggcaactcgtttccgcacatcgacagcgatgaggaggctagcgatagcatcggaccggggaaacaccacagtctaggtaagcaacggcacaacgcagcgtatacgtaa

SEQ ID NO: 10218 - protein, 303 aa, DROSOPHILA
MISLLNLQSGTYTAYRFLQSWLWHPGWPLATSNGALVLQLSDAEIAHALRPSELYLCIKLESTESDADCKPRLYAVWRSSRKEESVQSHCIDHENPGELPLSVLQLEMSTAAAALMASDCGELPQLLQNLLVSVERSIERVSLNELQMPMHHDRGEDSLDEANNNGCNNNLLGSPKCALRRSDLITKNKLFNSRYMLRRLTNRQDSMNSTSSGNSNVSDRSSSSSSSSSSSAGEELLTSHSEAKMRSNSVGNEASGASTSPALPLYCLGNSFPHIDSDEEASDSIGPGKHHSLGKQRHNAAYT

SEQ ID NO: 10219 - DNA, 3062 bp, DROSOPHILA
tttttgtttaaatatgacttttggcgataagaaatgctaatgtattgcggtgggtcaattttcgctgtcaataaaaacaaagcatgtataattactttaaaacacaaaaatagtttcttatgtgtaagcgcaatccctccatttttcgcaagagttaataataagttataacacactaattaattgccatttacacacaaaggttcaccatttttgctaacaatatgttccttgcaaataaaatagggcaaaaactggttttagtttcgagtaaacttagcattatacaattcttcttcattaacatatataaatgtattcccattgccgctgatttgtgctcataaaagtacgtgaggcggtgatattttgtacactttattcattgaactttaagatctttttgattgattaaaatatgtatatacacatgtacatacatatatggatgaaaaatgtattgtagatgttacaagacatagaaaccaccaaaaagattaaactctatcagatatccacataactgaactacacattttcaataaattgaatttgagtccaattttatttagtataaagtgtactctattagtaagacttacttaatttatcaaagtagcgcaacgttcgctgagcaatgaagaaaacactcaactgaattgatttcttattcaatcttaagtctcagccgatgatcttctgacgagaagctttgaaagctggttccaattgaagttcccagcttacgtattacacagcggaaaaccagttcaaagttttattttattttataaatttatagataataaacatacacaaattatgtacgtatatttgttattaaaaaccgttttaatggtttagcgtgtttgtaaaatgcgatttcaaatatttatttatttttattctcgagccaaggaacaactggaattgaagcccgataacgatagctgtgcgacaaaatcgaaagcatcagtgtgtccgtgagtttcgcctctagacctgtgtgtgtgacatttgatgcgcctacacatacatatgatgaacaggaattctttttagttcatcaaatgaatacaaagtaaagtaaattgaaaggaagcgccgatcgcagttgttcagtattcagagaaacatggagccgtttacccataatgatggcaatcgcgacgaactaataattcagcagaaacgggatattgaaaaagaggtgagtctgcagaaacacttacacacaatagcgacaatgaaccgagaaataatgccgaatttcaataattgcagatcagcgacacaactcccttggtcagcgagcagttgccactcacctgcttgtatgcggaatacagtggcgacgagatcttcaccgccaagatccaggatctgtccaaaaagtacaagttcattcgccgcacccgccccgatggcaattgtttcttccgagccttcgcctactcctacttggagtacttgatctcaaacaccagtgcctaccaggagttcaaaaaactggccgaggagtccaaggagaagctcgttcagctgggatttcctagttttacattggaggactttcacgaaacggtatgtttagccgtacaaatgcaaaacgaattccctatgcttatgcagccttttgtatgtccagttcatggaagtcatccagcgcgttagccccgacaatgcaggaggacacagcacggtccaagatgagttgcacaagatcttcaatgagcagggttactcagactacgtggtggtttacctacgtttgatcacctcgggaaaactgcaggaggaggccgatttttaccaaaatttcatcgaaggcgacctcaccattgaggcgttccgccatctggaagtggagccgatgtacaaggaatcggatcacatccacataatcgctctatgcaccgccctcggcgctggagttcgtgtcgagtacttggaccgtggcgaaggtgggactgtgaaggcccacgatttccccgagggaagcgagccccgaatttacctgatatatcgaccaggccactacgatatactgtatccaaattgaattgctctcagtagtttctagattacgaaacgatttatgtatataagatgtataataaactaccatttatttgcatatatggtgaatattttccttctcttttggttctgcataagattgagattgattgattagcccagcaatggaaacacagattttacacatatcgtagatgttaatttatttaaacactaatctttattatttgatttgaacgattgtgatagtgacataatgaaattgtctaatgttttataaaatattaagttttattaacggtacttcgccatcatttcatccggaaatttctggcgatgcgcagacaatgagaggttgacaataatctcccggtcgtccatccgtcaggcgcctccacagtatgatttaattgtaggatgatattgaccacaagatttcagctcagtaaagacttcggtaaaaaatcccggctcagcattgattttaagcattttatcacttagcttgttcacaatgacgaggcacctgtatgttacattaaagattaagatgcagatggaaaatatttcattgaaattaacttattatttgacatacctgtcccaaaacttttccttcgagtcttcaaccaaaaacggtttgagtggataactgatttcattgcccatatacgaataagacagatacaaacaggtgagtactgatgcctgaagatccgattccttgctctcttctccgctgaccagctcgcggactagcatgtagacaaacaccacattggctgggtttatgaacgccacgtccttggaattaaatgttgtgcttattgtttgaaggacatgtggcagagtagctactgtacctgccatccttggagcaaaaggctgcgatccactgctctgagccacatgaccgcatccccggcatcgaaattgtttagcctctgacaacgacagtgcaagaacatgcccaagcacttaagcaattccgaagtggaggcctgcgaggtgttcgaaaataa

SEQ ID NO: 10220 - DNA, 924 bp, DROSOPHILA
acctgtgtgtgtgacatttgatgcgcctacacatacatatgatgaacaggaattctttttagttcatcaaatgaatacaaagtaaagtaaattgaaaggaagcgccgatcgcagttgttcagtattcagagaaacatggagccgtttacccataatgatggcaatcgcgacgaactaataattcagcagaaacgggatattgaaaaagagatcagcgacacaactcccttggtcagcgagcagttgccactcacctgcttgtatgcggaatacagtggcgacgagatcttcaccgccaagatccaggatctgtccaaaaagtacaagttcattcgccgcacccgccccgatggcaattgtttcttccgagccttcgcctactcctacttggagtacttgatctcaaacaccagtgcctaccaggagttcaaaaaactggccgaggagtccaaggagaagctcgttcagctgggatttcctagttttacattggaggactttcacgaaacgttcatggaagtcatccagcgcgttagccccgacaatgcaggaggacacagcacggtccaagatgagttgcacaagatcttcaatgagcagggttactcagactacgtggtggtttacctacgtttgatcacctcgggaaaactgcaggaggaggccgatttttaccaaaatttcatcgaaggcgacctcaccattgaggcgttccgccatctggaagtggagccgatgtacaaggaatcggatcacatccacataatcgctctatgcaccgccctcggcgctggagttcgtgtcgagtacttggaccgtggcgaaggtgggactgtgaaggcccacgatttccccgagggaagcgagccccgaatttacctgatatatcgaccaggccactacgatatactgtatccaaattga

SEQ ID NO: 10221 - protein, 262 aa, DROSOPHILA
MEPFTHNDGNRDELIIQQKRDIEKEISDTTPLVSEQLPLTCLYAEYSGDEIFTAKIQDLSKKYKFIRRTRPDGNCFFRAFAYSYLEYLISNTSAYQEFKKLAEESKEKLVQLGFPSFTLEDFHETFMEVIQRVSPDNAGGHSTVQDELHKIFNEQGYSDYVVVYLRLITSGKLQEEADFYQNFIEGDLTIEAFRHLEVEPMYKESDHIHIIALCTALGAGVRVEYLDRGEGGTVKAHDFPEGSEPRIYLIYRPGHYDILYPN

SEQ ID NO: 10222 - DNA, 26767 bp, DROSOPHILA
atttttcatttagtgtacgtcttcttggctcattgataagatttctcggaattggattttccttttgcggcttccttcttgcttcctcttctttgcctcctcgcacacacgcgcactcacacacgcacaagctcacgcagcagacgagcgacagtgcacaacgaaaatcgaaaaacaactgaatcggtttatgggatgctacttgggcagcgctggaaacgttgctgttagtttaaaatcggcgtgcctttgagtactatcgataaaataccacagtgcgccgatgatacactggctccatttttatcgcaattcgaaatgtcaacaatcttacattttataatgtaatgtaatgtttgtttattcagaatgatctaccgtttagcatttgccccttcaaatttagggcattattagattactgagtcgttattacaccgaaacatttcatataactacttaaagaaaaaatgaacaaatgaccaggtaacctggtattggaacccggcaataaactggttgaatattaaaaaaccatgttagactaaattataaattcgttaatttgtcagttgtgtgggctcagatcacaaatctgaataagctcagcgacgcttccattattggtgacataatttcatattttacatatttatattcacgaataaatattcgccaatttcctacagggtgtttttgtatgaccgcattactctaaaaatacctcgggaaaatatagccgcaactatcgattggcgcgctgcactggagctgtgctaccatcgctaactcagtgcaacaacaaaattccaacgcaacgccaactaagtgcaaaaaaaatctaaaatttgtgtaaaattgtaaaatcccaatcgcgtatatttctaaatcgtattcgcacagcacagtatgtaaagcactccagtttatttaagtactgtgtgtgtgtgcggtaaacacacaccaataagagtgcgttttcgcgtcccttttcccaccctcttctaatggttccctcttctataactgtgtcaaatcagcagcaacaataaaatatagaacagagctacagcgtgcgtgtgtgtgtgtgtgaaatgcacaaattgataagcaatttgattcaatttaatcttgtttaagtctgatgaatatcagcgcaagcagcccaacacaaaattataaataaaaagttacgaatttatataaatagaatacccttgagtgattttgttagtcgcataaaattaattcaatacatatttgtgttccgcattttttgaaaatataacgaagttctggccaacgagagcaacaacaaaaagcggtcttgtttgtttttcaagctcaacgaaaaaaagaagaaaagaaatctgctctcagtcagctgttttaaagcagccgcctaagtgcgagtgagatagctgcctgcgcgccaaaataaagcaacaacaaaagtggaacagtggttcaaaacctagctaaaaataaaaaaaatccatttatttttgtagcaaaaatataaaataaaagcaaattaagcgaattatacatatatttgttaaggtaagtgatcagcattccatttattttaccaaaaattattcttttgcacttgtttttcccccaagttttttaaatcgtttacttttaatacgcgtgtgtcctaataagtgaagattattaagaataaagtaaaaaatgagtgatgatacgagcgcttcgggcgggacaagtgccccttttccatcgccagttactgcggacccggaaccaggagccactgcctccaaattaccgggtcccatcagatccaatattcccacgcccgctacttctggtaccggaatcccgcagcccagcaaaatgaaggcaccatctagttttggatcgacgggttctgtttccaaaatcggaagaccgtgctgcaatcacacaactcccaaatccggtccaccaccaagaggtaagtctaatcgcattgtgcaacaacgcaaaccagttagtattattgctcaaagcaaatatgttactaagagcagtatttttgaaagtagttaaaggtcttaattatcccctgggtttaattatcatccattttacaagctagaatttaaagcaagatgaaattaaaacacatctgaacaccaatgggaattcaaccagagcccctttgaaaatcttgtcagtgcattgtcacatacatattaacatcttaacaaagaacattaatttcacaattcaagaaaaggggtttttaccgatttccacttttatacgcgagttcttcacttataaaacagttggaagaagtctgataattgaattgctctccggaaaatatcgcagtaaaatatgtttcaatagtatagcccaccactatactatcaccaagtactcatgaaggttaatattaaaaaatgtacccacattcaaatgggaaaacagaaacccaaaaagaatggtgagtttaaataatgcacttttaagtttgacattgtaaaggggtcatttcatcaagtttacttactctctaccctcaatacccgagatttgactacttttgtgtttgcatctttggctcaagcaagtcaagcatccgcctacatatatatatgtgcacccacaagatgtagattgctgtatactataagcgaatgcaatgatctaatggaaacgatgacagacccactcacttgctaaatatatacatacatatacgctgaccccaccccatttgagtgcactttttgcactacattgaacttgcaattatttcggcgagaactcgcgtagttagtgtaaattcttctctaaagagaaaccattaataattcccagcgtcaactgtttcgtttggtaaacaaatgcttcacttctttcaattatttaatcgttttgaaacaccaacgcacaattcaaaaataaacaaaacaaattgccgcccactcttaactctcgatcataattatagagctgccccgaaaagtgtttttggtaaggagaattatggccaattaggcaagtgctgctaccatttaattgatccgcccaatgtggctcatttcaggcacgtaaccgcaccgcagtcgtcaacatacgacgacccactggcccatatagcaaacgatctgccaaacgatccatggatcgattgacgggttttctatttcgccggcacacacgttccatatccgattgacagtcgcaatgcaaccgcaaaatcgtagaaatttattccctgtaaatttacccaaaaacacaaaaatttgtaatgtttagggttacagaaaaaactgagtcacgaggtgtatttaatttgcatccatagaaatagtttacacggcgctatgtgcactgtgatcatttagattatcactttgtattagattggttttgtaactagtttgtttgcccatttatacattatttttaaaatcgtttattggtcgtttattgcacataattattaaacctatttcagaaattaagctgtttgcttggctcaatgaaagtccagtttgttttgatagctccgaattttttgctttagtacatttaaatttctacgctgatttgtttcaaatacgccagtgttgatcgccatatcaaagagattattccgcattttgccaattattaacgaaaacgaagtgatataccgcatgtcccaaatagttgaactactttagtcaattagtagtttatgcgacgcgctgcttaaaaccaaatccgttccaagcgcctgagcgccttgatccgctgcccagatcagctttctaaaatctctcctagcattctggaacggactgtttgactatctgccaagagacccgtcatttggcccgccatactcaatgccaaaagtctgcgaaaatctactcagctcaaatgcgaccgagaaaacctggcgaccggccggcaatctatctctacgtcgtcgttccctaattgaatttgttctggcgatgacacagaaaacgtactcaaaacgtatcttctagcttgttcgtgagctcagatcttttgaggtgtttttgcgctgcgcatttgatgccgggttccgttctcagtcgatctgatatgaaaattgcggtcgtggtgctcgtggatgagcttatgtcacttttattggtttcgatcggaaacaaaagtgaagtgagcctctctcccacccataaaaacggaaagctcatttgtcttcgcattaagattgaatcgaaaacgcgttcgggattgacgtccaatggatgagcatcgtctggcgggggattactccattcgattctagattgagcccagttctgtttacatcaccgactccgtgggagagtcaatattgatgttatgattaaccactttttgtctcacttatttgacttcacatcattaagtcgttgaaatctttataattgaagacacgtgttgcatatttaagctgaaaacgtctcgggtttcagccaacagaaaacagtatcttctcttaaaaggaatatatatacatattcgatttgataagttatgtatttgttatagtttagaaaattttattaaatacgtgtttcaatatttcaatgcgcttttttgtgcattgtcttaaaagctgattcatagatgaatctaaagataattgattctgattaactggcatttagtctctggaattcattgttacaatctcgtcaagcaattcttaaattgttttcctacgtgtaaactttatatataattagacacaacccggcgtttaaaaactttatcgaatctttcaatagccacttcaaacatctttaaagaaaaaataataattttccaaaacttacatacttttttataataaatttcactgcttataaatatttatattttatgaaatatataaggtcacataagatttcttccaagtcgaaatccaaaacatatttgcctattaattattgaatacaacaagaacatattttttagagttttcaaagccaatatggattgttaaaaaaacccaaaaagtgaaattccattttttcgaactcttgcttagttattttcatgcatttactgcacttgtgattagagtgctaaaaaccattgagcgatcgatccatatggtatcgaagaaagggaaaataaaattgcagccatgtggcaattctttgtttgccggattaactcactttgcgtgtccgtgcaaaagtcgaaaataaaaacatttttttacggctcttatttttacgcgacgtttattcaataaaaacaccgagagtgcggagctattgccacagtgtctgctattaaactctggccaacaaagcttcggcaccggattggcaatcggcttcgccgctctctcgctgcgaaaaaaaagtatctcaaagtttgcgctgacttcgcttcgcgattggctctcgacgttcagttacttgaacgacttttcgcgaggcggacgtgtttcagacgcggaattgcaactcagatggcaaccaattgaacttgatcggctctatactatagcttatatagtgaacacgcaaacgaaattgaaaatccaaaatagaagccaactttaacagagagacttacttattgttatacaactcacaaaaggtgatttggtgtgccagcaaattacgaatgtcgttatttaaattggaaatttccaattaaaatataaggcttttaaaaaagaactgtaaaggcataagttatgtgaacctttttctacgtccttgtcgatgccctaaaaggattcgagtttactgcagtgcaagatatttttggaaacttttcgtttttcatatttctggcgacagcctttgaccttggcttggtctggttgataaccaattgttaatcaaatttattcttttgttcctatgtgaaactttgctttggttgtggcctcataaatatttatttaatttcgtgtcttagacaaacctagaaattttccaatttttttgtttaatgtggttttattgagtttaaagataagatacagcgttaattgatatctctgttctaaattataacatgcttagatccttatcatttaaccgattttgttgggcttggcccatttatgactgcacaatttaatgacagcgatatttcggtcaatgaatagttttattcctgttttggactagattttatcagaaagccttggttttttaaatataataggtgtatttaaagcgcataaaaataaaacttgataattatcagaagaaacgacttcaaaggctgggtgtgggccttggcatttgtacttttgggcctttccattagccattgccggtgtactgagatcgtagctaattacggattttccgctggcatccgcattttcctgtttgcaagtacttacataagtaaattgacgcacaaaaacttgtaaatgggctgtgagcacgtgtccccaacctctctctcattgaaatgtcggctaaatcgccgagataaccttaaggcattctatatctccgatatctacgataaactctaagcgacaacaaaagtttatttgccgaaacggcaataacaaagttcggttgcggattgtattgaaaagttgcggttaaccgctaattagatatacaaatttgctattgctgattcgtattttgactgaaagagacacaaacgttgatcggtctaaaaatacgtacatatatatgcgaaatggaatgactttcacagcggcaatatttgcatattgcctaagactttgatttttagtgcaatttgctttttttttctgtgtttgtttgtggtttttggggctcggcgttgacgtcttattgccaaatctactgggcttccactggcggccaacaccatatgcaaatttcaatttttttatttagttgtctgcagctaactttctttccgttttgtggctttcttttcactgccacgttccgttcgtataacgcacattttgtcgctcaattgtttgagtcattttggaccaggccaagttgcttgctgtcatttgccttggcattgttattgctaactggtattttatcagctgttattattattttggttctgttgttgataaggagaacacatttttattttggattccattcacacttccactgactgcgacattgccagcccaaaactcttcaacttttgctgttgccacgctatctttgaattagaactgaccggtgagattctcacattatttcgctaggtagtgaaattgttactcatttaagatgttgatttttcccgaaataagagagaatcaagatgccagttatcttgctggaatgtgtacttgaaaatggaggaatttgagctaaaatctgattaccatatctgttaaagatatttttttagaatgattagggcttgaaaaaatatgaatacgtttacccatatattttttatattcaatatttctttttcatattcatctgtaaaaatttgtatatagcttattatttgtaatactcagcatttgtaggtaaataaatatggatagtaaataaagcatcttatacagtttaaacgtaaaagctgattattagtaaattttaaaaaagtttcgcggctgctgctgcttacacaaatggaatgcaaatatggagactttgtatttagaaccagatattcacataaagattacacaatccacctgcaaaaacttgtgggcgtgtgggagcgatgtcataaagccttttgaaggcatcaccttgacagactgatcatcccatctgtcaaactgggatacatacccatatctttatatatttaacactaacttccgaacacattctatatacttttatatatttgctgtggatcccgccaccggcaataatgatctgtcgtcattcaactcaatttagtcggtttgtttacacaattttattgttgccgtttgttatatttgatttgatatttatatatatatatgcttttgaagctccccaatgagctcagcttggtatttgttctagaactattggcatagacagggcaacctttcgtgggtggtatatgtggcgtatgagtaatgcgcgatgctgtatgatcacgtatacgcacctttgcgcccagctaatttgcattgcactttgtatgacactcatttaggagcatttaattgcggtaaattttccccgcctaattgcgtttcacacgcctcgaaaatgatttttttttatttattgtttcgccggttttctttgcttttccgctggcggcaccttttatttttattttcactgacttcgccggcaattaaattaccgtttctttgactaaacacaaatcggtaatgaaaagagaaaaaattggaaaaggtgtaaccacctttggttaattaatttttatggtccgcacccggtttctttttttcgattatgaaatgatatttcattttgcacctgttttgcttgaaaatcttttcaaatgatttattgtcacaactgagtgaaccaaagtctttctgtggcttttcgtgtaaacaaacccattattgccttcatttctgtttcgctattttttttttttcgttagcttagttttggccagcatatttgtttgttttctttgttgagatacttttctgcgtctaatgaatttacggactacaatattttcgtaagcttaatggaagtgttcattaagaaatgtgaatggaccatagaacgtaatttgttttttttttctaaggaattacaattttaacaaactaaggaatacatcttttaacatttccttctttgatcatatattcctggtttgatcaaatagctgcccaaatgcttaacaaataaaaattaaacaacaattttaatcactttttcctcatttttgtggctattttttgtgttcaccatttttgcccattgttttgcttacacttcagtgcttttaattatttcgtttgcaataaaagaacagcaaaagcaaaagtcaaataaattaacacgtcacttacacaattctcggaccgaacacttaagtctcgcttggaatagcctcaagtgctaagttaaaatgttcaacagaaatgcgtactttaatatatttttttgtagtaaacaatttaatgatttttgctcaagggccttaaatgtataaatgaggtatagagaattaggagaaaacgttttcgtatcctgaaatcttaagatttgtgctcaaaatataaacaaatactaactaaagtaaaaaaaaaaatcaataccaactccacgatagccaaattgagttgatggatgatgggctctcctttaattatgacattaatgtccattttgaacttttaaatacagttatgaattgcgacacgcccacttgtttagttttgcgatcgagcgatccatcgatataaattccaatcggaattatgcgtgggttgcacaaccgcaatattttatggcaactgaccaaatacaaaccaaattactttcagcattcttcgcagtggctctttagccataagtttctgaagagtctcttttatatttttaaaaaagcaaacaaacaataattaagttgtttttgctgcttatctcaagatcgacaacacacgcgtccgttggaatattaattattcacaaataaaacataaaaactctcaagttgcttatttgcctaacttacctcgttaggtggttaattatgggtatgctaaataaatattaattgcaggtggaaaagtcaaatgtcatatcgagtttgaaattctgtcttttctttttttttttgtaggtcattaagtagtgtctagtttcgttctctcaaaggaacttgtttcttcttttagattttgcataatattgatggattgcttttggtaaaatgcaaatttatgttgctgaaacgtcttcaagttgtgttgccgagggaaattctataaaatcaattttatattcattgagtattgtggatcaggactgcgcgtctaacttgacgactttgatgacatatttatagcaaactctttatttatttagacgtttaaaaccaatttatttaaaaatcaaatttatgtttatacccgtataaacgaatttttaattcgtcagaaatgccacaaaagagtgaaaaatgttgtagataactgaagatatttgagtctgcggaaacggtttgcaaagctgcctataagttttattttttcgaagccattccgagaaaaccttcaccgaacactctcccagttatctaatctctttaaaatgaaataagactttgttcggggtggggaggttggtctgccagagcgacccatagctaattgccactttgcactttacattttcttttgccttttattttacacatattttgttggctaagctgagctttcttggcccgttaccatggcctgaattcgctcggcttagcccttagctgtaattataatttaattttaagttaatattttgtgtgctgtttaatttgtcatgctcactttgcgttccttgcgcttgtttttttctttttttatgtttttcattttatttttagaagccaccagcatgagtcgtgaaagcgatgacaatttaagttcgatcaattcggcttatacaggtaaatatgtttttacgtttcacttatattttttcttatgcattcatttgttattttaacttggctactgctcaatgcgtttcatttaatctcttcccatgacattattaatttacaattaatattcaattaattgcttgttgatgtgggggcgaaattaacacatctgtgcgaacacctttttgggcataacattaatcgtatcggaatttgatgaaaattgcttgcaagacttaacgacgtcataacaatatcgatgaattttatattttatataaactaaacaatttaaaacacattaacacgtgaaaaattcgaaacagtacagtattctgaagaaagtacctatgaacgagttatacttttaggctaaaacgaactgaatatattatattatatctataacctagttgaagcacactttataaatggaactgtatacctctagacataataataataatatatcttatcagacgtgtttatttatatcgacccagtaatcatttccttttaattgacatttcgaatacctcaatgtagtttgtgttaaccctgaaaaacacactgttccttcctcccatcacttttggttcagtgatctcccaacgaacaacaggcatttcattgccttatctacttgtgtatgcaacatcttccctcagatagtgaaaatgtcaagtcaagtctcacgatctctgacagctcacagatagtatctatttaccaatcaaagacatatcaaaccgtcaaccgtaatcagtcataattttaatcgtttcttaccttagccgtaggccaacttcattaggcttaagtcgtctttgtagttcctgtgctcattggaatgttcattcaactgtttgcccttctgccacatgtgtttttattgtttcgcattcgaaacacgttctaaacttaaacaaattttaattgtaatgcgaaatacgcgactcgaccagacgcccaaccggattttttttttttttgggtatttactatatagtatatggtatacatctataattaataatatatgggacacgcctttaagcgatcagctcgattagctcacgtaagcatcttcatctggaaaaccagttttctatttggtgaaattctagtttgtcgcacaaagattcctgttgaaaacatttagcatttaaagtaatgacaattaaatattcagatatatgcattgtcgatgcaattattgtgtgcccagaacaatgagcaaaaattaatttaattgagataaaaaatgttagagcaggcacagtagccacattttagcgcgaatgtataacaattggaatatgtgaatacactaatttaagatgccaggaagtacaaagatacaatcagtgcttttaagtaaattactttcagacacacccctgaataaatgttgtatttataaacgtgctatatttacccagattgcttcgctcactgtaagcttcactgtaaccactcgtgcagttcagtggaaatgttagttcagcccacagtgatcaggacttagagatcgccaatcagcagctaataatcggttttcgtcggcattttccacagagactcgcagatggatttgcatctaacatgccgaaaagtcatgtaagtcatgcgcagtccgagttgtggggttgtgaaaaactactcgacatgtgggtagccaaagctgcaggaaaactggcagaaattggttaaaaagcagtaaaatatatataaatatatatttagctaggaaataaactgaattcaaagaacattcaggcttaccttaaggaagctttaatagatagttttagttacaattttcagcgtgagtagcaaacttttattgccgtgcaaaaacccacattatagccacttacgaatcgctcagaactgcattgcaacctacacagggagctattatcgatgaggatggcggtgcacggagctgcacagtttagtttaattaaatgttgtttaatcatctcagaagataatgtgctattgacatgaccagcactgttggctctgttggctgatttatcgccggtcagcgcgcgatcgatccgccataaatggctggcgaaatatttgttttcgatttcaacgtatctccctggctgcttcattttggccagaatcgtgagcaaagtgggtcgcagccaggcccgggttgccttttggccaagtcaagtcaactattgacggcgccacactccacttggcgttggccgggtgagcggtgctctttgatgattcatctgtcagatacatgagttcattagcagcactgacactgaatgtcaactgcaaggaaattgtttgtcatctaggtgcgtgcgtatttttagaatgacgacttttcacagttaaatgttgcaaattaagtgcggcgggggaaaggtgtttcaattagcgaaggtaaagtcaagactgatttattgcctggcattggttgcttgtttttccagccattacataaaatacgaacacagaacatcaaagccagtgttaagtgaaagtttgcaaaataattgttaaaaacaaaaaagggaaccactcaccaaaatacacaacaacaaactgttacaacgcccaattgtgataattaaaaaaaaaaagttgttacgagcatgtaggatacggaaaatactaccgtcatgataatagcaaataataacaaattgtcttgcacgatcggcgaacggtagcgaatgccagcgtatatctgtcagatacaatatactcacaattgaaccttgaagccgtctggtctggccaactcatgtcatgtcacggctgggccaacgcaatcggttgattagccaaaagcagtggcccacgagatataaagccggtacgaagtcttcttcaacacactcgtactcaagcagagcatatctggcgtagattacaagtgaagaaaaattaaaaaaaaaaagaaaaggggaaaataaacgcaatttcaactggcaaaaacacaattaactacacgacgtagacacgctggggttttcatagcgcacaactgaagatgacgctagtgcacaggaaaaaaaaattggaattattaaagttgaaatatagtgaaataccttactacatagacataatataaaattaaactttcatgttattagtttgccaattgcttttttttctgtgcattaaaaagtaagcggaaaccgagttcgtgcaattgataaattgaaatcttttctcgatctccttccttttcggcagcatttcttttgtccgctgcaattgtgtttttaaatccgctgctgtctgtcattcaatggctttgaaaacgttaccaaactgtcgacaatttaattgatttatgctcttatagctctttctcgtgcagttttgccaaaagtatgaattgattttgaaagttgctgtgaaaagaggcacaataagttacacatcaatatcaataaagaattggacacagacaatttagggaaagaaagaaagggatttttaagagatttttacaatggtttatttattcctaaaatgaatttatggcacgtcatgttagcttttttctcgtaatttaaaataaaaaacgtaaattgaggtaactttttatttggagaaattttattaacgtgttttataaaaatcatatagcaagcacacgccaaactctttctctctactcaagccatacttatagatacatacatatatttcgagcttaataacatctcagattaccgttcgccttttttttgtgctggcatctaacctttaccacaactgcttgcggccaagatcttattaaagacaagaaaccttagcacacaagctgccaaaaaactttcacaacccaaaacagcaaattgggcttaacacaaatgcgctaatttttaaccaatatttatatatatctatatatatatacataatatacatatataacaaaaggggaaatgtcaggaaaaacttgctgcacagcttgctcagttaacacccacaaaacacagcgaaatgctaaacaattgcaatgcattttatggaaattcggggcgacttcgtgtaaagatgtatatgtatgtacatttttgtatatctacaaacccgtcctgtctatagatctctatcaagagactgtcaggcgctttacgcgatcttcgctctcacccacacccgactgggatcgcttttcgcccgctagacgctcgctaaaatcggaggctggaagtcgcgcatcttgtaagttattagcccgccatcgccattgtgccagtcgcatgtatctttaaatggtatttcgtatctgtatctgtatctgtatattttctgtttgtttgttttgctttcgttactgcttgttgttttccaacgccaagatgattattatctagaagccactgggcggcgtcgcagctcaggtaagcattcgctacgattgtgagtggacataaatgcaacgcacaggattttgtaacgggggaactttgtggcaaatcatgttttataactaatttattcttttttttttttttttgtttacgtgtactgcaaatatctttgctgtgtcttgtatctgcagagcgtgtctggttctagccatttgcgcaggtggctggcttttatgcatctaggccagttgctcgctccttaaatagtcattctgcagaaacgttaagagcgcaactttatggccaaactgtcgaaataattcccatgcagatggcatatatctcggcatcttcggtagctccaagtattgtcaaactaacaaggcctaatgagccactgcaaacgtgtttaagtttacctctcactgtgggcgtaattgcgcctctaatgagccattgctgtgacaatatttacactgaattaatgtatcaagtcaaggtctttatagggttaactatgcgcattttgtttaatggttgccaaattaaattggccaagtttgtagattaatgaatttggggcaaaatcgttacgcttttaatgctaatcaaattgatgaggaaacgtaatccgtgaaaaatatgaaaaattatttaagtaaatggggaacattttgaacaagatttgcttagcttattactttttgggcttatgttaattttagtgaagggatttgattggggaaaggtaaattaagataaaatattgtctattagttatatataaagtaaaaaatgaatagaatggcacgtgttttgtaacacccagttgttttgtttttctttttaaatgttaaacatgatatgcaattgacatttaaaataaaacaccaatttattttacatgaactgaagtgtaatgtcactgaaatgcagtttgagttcattttcagcaacggcaatgggaaaattatgagcaagttgccatatctaatagatgtgggtggatgcagtcaacagcaaaatgaaattaactgacacgacagccaaacttggcaaaatgttgttatgacttcactgagctgcatgcaagttttatttagctttttaatccgcttgtttcctgtaattttccacttaatggttttccctcagacacagtaaatataaatgggtaatttaaaagtgaaatcggagagaattcattgccacttatagcatagaagtggaatatcgaacagcttgcaaatgtcaagtttacaatgctaaaatccgtctaaataatttatattcattatgcgggggatcgttctcaatggttttccattgagcaggcgatatgcaaatatgccaaatgacatcatacccaagtggaacacagataaaaaatgaactgtattggagagataaatgaaaacgcagtctagccaattttaggattttttttttagacagtattttgattgatgacttaacagttgatactaatgggaccccccaacttgatattattgctttcccatcgaacagataacagcagcgccgtgctgacagcaaacacagagcagttcatcattggacagcgggtttggctgggtggcactcgtcccggacagattgccttcattggagacacacactttgctgctggcgaatgggcgggtgttgtccttgacgagcctaatggtaagaatggtccttactctctctcttaaaggccctattaaaagtctatgcttttgctaggtaaaaacgatggctgtgtgtcgggcaaaaggtacttccagtgcgagccgaaacgaggcattttctcacgcctcacacgtcttaccacatatcccttggccggagcccagactccgacctctccattggccaaaagctccccagacagatcgcgcacagtttctccaactgcgagtattcgcagctctatgcttcgcagtcccggcattggaggcagtaagttattggatctacgaaatggatgaagtgcacaatctctacaaaaacttgtctatttttagagaatggaatggctgtgggcgatcgtgtgattgtctcttctggatttggtagtcgtcctggtatcttacgctatttgggagagacacagtttgctcccggcaactggtgcggtgtggaattggatgagcctagcggcaaaaacgatggaactgtcgatgatatcaggtatacccatgaaaatttatgagatccaagtgcgctgatccatccccattgcagatactttgagtgcaagcccaagtacggggtgtttgtacctattgcgaaggtttcactgtcgccgtcgtccaagaaaacgcgtctttccaggaccggatcaagggagtcgctcacctcgattggcaccatgaacagcatcgccaccacggccacgtcgcgcatgcgcatgaatgctcaggtataagcggtgacctcgaaaggatcaccctcaccacccagttctcccacagaaagaacacccacagtaccttaaaaaaaaaaagcaaacacaaataccgtttaaagttctggttctgttctttgttaatttttatattttacccattaacctacctgttactttttatttgagcccttttactaacgcgttccacatctaatcgcaaatcccttccgttcctagcagcgcaagtcgagcacgcccgttaagccaattttagcgacgccgaaaagccaattttccatgcaggtatgctaactcatctacaagatccacaaataaattgtatggtattcgctgttggtttttccttttcgctcttaaaaactattcgtttgccgagctgtagtcgctgttagcaaacccaatccattaacgttaaaattttgcaaaatattgtacgcagaattaatggtttggctattaaattaggttaaacaaaaaatgtataaagattttgacgttaatggatctgtgccctcttctgtataattgtggtttaacccttagtttgtaagcatttaactaacataatacacactaacccacacaaaacacaacacaaaagacacaccccaaaaacaaaaaaaaactcccaccaaaacaaactatgtaaattaataataaatttatgcctattaagtctcaatgcattttattatgtcatgtgtttgagttggtttatatatatcacaatgtacaataaaaatatttaaatacttcctgcacgctttcgctgttcaagtgttgattgttcaatgtttttgttaaatttgcttctatttgcatgtgtgtgcgttcgctgtcgccggtagaaggtaaagcaacaataaattaatgagtgtttttgcaaccagccccgcaccctatacacctgtactacatacacccacactatatatgtatccgaatctgtatctatatcgtctcgtatctctctacttcttgtgtatcgttatttgtgtgcctaggcatttcataaaagcttgctttgtcctctctgtgctctgtttattttttggtcgatcgatcgacattgtaggatctgctgcgcgagaagcaacaacatgtggagaagctgatggtggagcgcgacctggaccgcgaggatgcccagaaccaggcgctgcagctgcagaagaacatcaacgaggtaattatcttcaccgacaccatgtacgcaccgctgccctatgcggacagatcgcgaccctatcgaccctccaagaagtcgagggttaaggttccacagcaacaacacatttgggtgcccaccaccctgagcagcagcattaccaccagtaccagtactagaccaaccatagcagcagcaacagcagcagcagcagcagcagcagcatgcaacagacagcccctgcagcagcagcaacagccgcatctgcatcagaagcagcagcaggccaagccaaagaaagtttggttttgcgataaaaagaaactctttccagttggctgacttcgcggctgattcgggcccagtttgcaatgtttgctcattcatttgtgcagtttcggtttcgattaattgtgttttgtttttgtttgattttatttttgcattgcacccgcgctctggctgtttacaaaacaaacacacacaaccattttctcgttttcacacagctgtttttttttatgattttacccatcattgtcttgtgtttatttgttgttgatttaactcaaactcatctaatttttggcacgttacgttttatgttttgttctttaaccacagtgaagacactcaactcattcccaattgccagtcattttcccaaattgattcatcaaattaacttgaaacgctgagaagagtacaaatttcataagtttaactaggcatgaaaggttttgggggttcaacagcatttaactcggtcaaaatttaaaataacaatgggttaaggttattgctgatatgtatacaaacgaaattgattttacatcaacttgtatacatacattttataataattattattctttttgcattttgtgctggcgcaaaattttttatttaccaataacttgcatctgcgaagattgaatatgcataagataacaaaataagttttcatgggttcatctcagttcagatacacagatttctacacttaaattatcatatacgcaatctcgaaattacagcaagaaaaacgcaaaaacaacctattgttaattatttgcattcttaattatatacgttagcacttttgcactgtttgcttatccgcacagtgcgtttggagaaaaaaagctagcgcacacaattataccctattattgtttcctaaatttgaagaagggactgtttacttttatgtgcttttcgcaaccgctttggggcttttctagaagacgactgtcttgtgggatgattgagttttgtgctttctgtttggttttgttttcaataaattgtttgtgtttatatttatatgcggatacgtgttagacttttctatttgtcgagcgcactttgagtttgagtgttaaattagcaacaaaattatcacctgaaattcccggtcccagccacaccaaatccatattttcctgcctttctcatccactgatcaagctatccatcctttttaacgcaaaaccaaaaagataatctgactaccaatttgaacaaaattaggctggtccttaagagttgaaattctgtttgcacaagactatttttgtatgattcttatagcaaatactgatcgaagcggatcgctggagacgcctgatagcgagacacagcataaaggtatccgatctgcgacgcgagttccgcggctggtccggaaaacacgagagtcactgcatcctgcacagtgtcctcacaccgctgcgcatcaagtagaaatccggatgagaggaatgggcgaccatagtgctcaaaactattcgattcgacgatttttgaattacatttctttgcaccgagaaaggaaccactgaagacaaagttgaagtctgcacagcgttttaagctgatacaaccaaataaagaattaaagatctttaaaataatgaaaaaaggaaaccataaaaaaaaacgaaagccaatcgaaaaaccaaaacgaataaagttaacttaaatggtttgattggcgtaaaaatatcaaaaacgaaattaaaaagataaaaaaaacggttaatggaaaagttgactgacaattttcgattcttttgacgaaagcgaatttttcttgctgttggtttagttattacgatatacacttaaatactatatatatgaagaaaaatacactaacaatatgcaaaacatttttacaatctcccaatgttgttttatttatggttttaacttgcgtgctaatttcctttcctatttctttgacccctcgatcctcagctaaaagcaagaatcgttgaattggagtcggcattggacaatgaacgaaagaaaactgaagaattgcagtgctccatagacgaagcccagttttgtggcgatgaattgaatgtaaggacaaacagaagtcgtgtctggaaatgtacattgttgggttaaaaagttgatgttcgatagaatttttagtttactatatttgctcttattaaagtttagcttgatatatttgttaatattgagaatcgttaaactgattgttaaattctgaaatcaacaaggaaaaatctcaaactaagcttatcgttcgttttaatgcgtttttcaagctattgcatttgctggatccaaaagtatgctatataaatattgacttttgtaagcgaaaaacaaactctaaaaattattgcatgcggctcagtattactgagtattaatacaatagaatatgacgaactagtcaataaaatatttaatattccaattaaaatataatatgttactgttattaaatggaaaacgcatatatcttccgggaaataaatgaatagagcaagtcaatgtacatttccatgcactgagaataaaactaggccccctatactaataatataattcctatataataggctcagtcacaggtttacaaggaaaaaatccatgatctggagtcaaaaatcacaaaactggtgtccggtaaggaataacaattaaaattccaagtgaaaatgcttaataccttgatgcatcctccttagccacgccaagcctacaaagtatactaccgcccgatctaccttcagacgatggtgctttgcaggaggaaatcgccaagctgcaggaaaagatgaccattcagcagaaggaggttgaatctcggattgcggaacagctggaggaggagcagcggttgagggaaaatgtaaagtaccttaatgagcaaatcgccactctacagtccgagttggtgtccaaagatgaggccctggagaaattctccctctcggaatgtggcatcgagaatctccgaagggaactcgaacttctcaaggaggagaacgaaaagcaagctcaggaggctcaggctgagttcacccgaaaactagccgaaaaatccgtagaggtgttaagattaagctctgaattgcaaaacttgaaggcaacatccgattccctggaaagcgaaagggttaacaaaaccgacgaatgtgaaattcttcaaaccgaagtacgaatgcgggatgagcaaatcagagagctaaaccaacaactcgatgaggttaccacacaactaaatgtacaaaaagcggatagttctgctctggatgatatgcttcgattgcaaaaggagggtactgaagaaaaatctactcttttagagaaaaccgaaaaggagctagttcaaagcaaagaacaagctgcgaaaactctaaatgataaggaacaacttgaaaaacagatatcagatttaaagcaattggcggaacaagaaaaactagtcagggaaatgactgaaaatgcaatcaatcaaatacaactagaaaaagaatccatagaacagcaattggctttaaaacaaaacgaacttgaggacttccaaaagaaacagtcagaatcggaagttcatcttcaggaaatcaaagctcagaacacgcagaaggattttgaattagttgaatctggtgagtcccttaaaaaactgcaacagcaattggagcagaaaactttgggtcatgaaaaactgcaagctgctttggaagaactaaagaaagaaaaggaaacgatcataaaggaaaaggagcaggagctccagcagctccaaagcaagtcagctgaatccgaaagtgctttaaaagtcgtacaagtacaactagagcaactccagcaacaggctgccgcatctggagaagagggatccaaaactgtggccaaattgcacgatgagattagtcagcttaagtcccaagctgaagaaactcagtccgagttaaaatccacccaatccaacttggaagccaaaagcaaacaattggaggcagcaaatggcagcctagaagaggaagccaagaagtcaggccatctgctggaacagattaccaaacttaaatctgaagtaggggagacgcaggcagctctcagttcatgtcatacggatgtggaatccaaaactaagcaacttgaagccgcaaatgcagctctggagaaggtcaacaaggtaagtctgtgaaataaacgacgatatagttattgtcattctttaattaaacaggaatacgcggaatcccgagcggaggcttctgatctgcaagataaggtgaaggagatcaccgatacgctacatgctgagcttcaagctgaacgatcgtcctccagtgctctccatactaagctgtccaagttctcggatgaaatagctaccggccacaaggaactgaccagcaaagccgatgcctggagccaggagatgctgcaaaaagagaaggaactacaggagctgcgacagcaacttcaagatagtcaagactctcaaacaaagctgaaagcagagggagagcggaaagaaaagtctttcgaggaatctataaagaatcttcaggaagaagtcactaaggccaagacggagaatctagagctaagcactggcacacagacgaccataaaggacctgcaggagcgactggaaatcaccaatgctgagctccagcacaaggaaaaaatggcaagcgaagatgcgcagaagattgccgaccttaagacccttgtggaagccatccaggtggctaatgccaatatatcagctacaaatgcggagctctccactgtattggaagttcttcaggcggagaagagtgaaacaaatcacatattcgagctctttgaaatggaagccgatatgaactcagagcggttgatcgaaaaagttactgggattaaggaggaactaaaggaaacccatctgcaactggatgagcgacagaaaaagttcgaggagttggaggagaaattgaagcaagctcagcaaagtgaacaaaagttgcaacaggagtctcagacttccaaggagaaacttacggaaatacaacaatccttgcaagaactccaagattctgtaaagcaaaaggaagaacttgtccagaacttggaagaaaaggttagggaaagcagttccatcatagaagcgcagaacacgaaactaaatgaaagcaatgttcagttggaaaacaaaacttcttgtttaaaggaaacccaagatcaattgctagagtcacagaagaaggagaaacaattgcaggaagaggctgccaaactttccggtgagctgcagcaagtgcaagaggccaatggagacataaaggattccctagtaaaagtagaggaactagtaaaggtgttggaggaaaaactccaagcagccacctcccagttggatgcccaacaagccacaaataaggaactccaggagttgctggttaaatctcaagaaaacgagggaaatctgcaaggagaatctttggcagtcactgagaaactacaacaactggagcaagcaaatggggagcttaaggaggctctgtgtcaaaaagagaatggccttaaagaacttcagggcaaacttgatgaaagtaatactgtattagaaagtcaaaagaagagccacaacgaaattcaggataagttagaacaggcccagcaaaaggagaggactcttcaagaggaaacatccaagttggcggagcaactgagccaattaaagcaggctaatgaagagctccagaaatcccttcagcaaaagcagttacttttggaaaagggtaatgaattcgacacccagctggcagaatatcagaaagtcattgatgagatggatgatgcggcttccgttaaatccgcgctgctggaacagctacaaaatagagttgcggaactggagaccgcactccgtcaagccaacgatgcccaaaagactgcttatctggagactaaggaactgaggcgccagctggaatcgctggaactggagaagtcgagggaggttctgagcctaaaggctcagatgaatggtgcgagcagtaggtccggaaagggtgatgaagtggaggtgggtttcttttttttaagctaatattttatatattttgcaaacaatgggccttgtcaatttccagtcactggacatcgaaaccagtcttgccaagattaacttcctgaactcaattattgctgacatgcagcagaagaatgatgcactcaaggcaaaggtgcagacccttgaaaccttgccaatggatttcaccaagtgagttaaattctttttcatctcggtcgaagcattttcgttcataaatgtatataatatatttaagacctcatgccttcgatgccctgacaaagcggaaaccggctcccagacttttctgcgacatctgcgatgagtttgatcagcacgatacggaggattgtccaatccagggaagcgaagatcaagactactccacaccgtcatccgagtccaacaacaacgagaaggagcggaagctgccggcacccaggaaatactgtgattcctgcgagggtgagtaaaataaaatatcaaattttactgacatttaacaatgtttttcccaattacagtttttggccacgatacgagcgaatgtgccgatgatgaaacctattagttagctctagttaaattctattatttccattttactttgttttagactctatagcataaccatattgcgagatctatcagatgagatacttttacctcagcagagcttcactcaatcacacaaagaaatttctctacttaaaattgtgatcttgcgttatgcacacatccatggatagtagtctattttaaattgtttttatttattgaatgcgattcgtggcaaacacacaatcggttgttttcgtaatttttgagtgtaaacatagtgtaaaaaataaaatcaagaacgtggaagaagaagcttttattgggttttcataagactaaggaattaattggtaattatatgattaatcgccgccctccttcttctccttgatggcgtcctgaaatcagagaaacatggatattaaagaaatgtttcgaggacgttttgtgcaggtaatactttgaaacgctcttcgaagagagataattctgctagaagatcggttatggcgttcatgaatgcttcctgcggagaataatcggccgtagtctggatgcggatgacgaacttgtgctccagaggatgcggaaccttgtagccggcaaacagaacattgggatccttcagcagttggctgcaggcaagaatgcaaatttaatgtgtaatcagacgggcttgttggccaacatacttgcggatcatgttgcccagcgtgtgatcctctttgtttatggtgaatatagccgcattggtcactttggtgtccagttccttgatgattctgcagccgcgccataacaaacataaaaacgggttaaaggtggtcattcggagtagtctgttttctttactcactttttctcgccttcatagagcagaaatgactcaaaggtaggtggtgcgttcattttgatgtcttacttttcgttagttactgcaaaacttataaattgtttattaaaatcagcagcacgctcagcaaaattctccggtacagtgttgactaacgcccaagtgcaacacaagctaaagtagctatatctagcaaaaagtagctagaacgcctagctaatttattttagtattttataaatcatttttaatgtgagcatctattaaataaaataaaacttgtactttgaatttgaaaataatttaatttgcttatgttttttggtcattaaataaatagcttaatcacttcttgcaaccaacactggcagccgatacctatcgcatagacaagctgttgtgggccatccctaggtttcggtggttgaattatttgcaaatttttatccaa

SEQ ID NO: 10223 - DNA, 6000 bp, DROSOPHILA
tcttctaatggttccctcttctataactgtgtcaaatcagcagcaacaataaaatatagaacagagctacagcgtgcgtgtgtgtgtgtgtgaaatgcacaaattgataagcaatttgattcaatttaatcttgtttaagtctgatgaatatcagcgcaagcagcccaacacaaaattataaataaaaagttacgaatttatataaatagaatacccttgagtgattttgttagtcgcataaaattaattcaatacatatttgtgttccgcattttttgaaaatataacgaagttctggccaacgagagcaacaacaaaaagcggtcttgtttgtttttcaagctcaacgaaaaaaagaagaaaagaaatctgctctcagtcagctgttttaaagcagccgcctaagtgcgagtgagatagctgcctgcgcgccaaaataaagcaacaacaaaagtggaacagtggttcaaaacctagctaaaaataaaaaaaatccatttatttttgtagcaaaaatataaaataaaagcaaattaagcgaattatacatatatttgttaagttttttaaatcgtttacttttaatacgcgtgtgtcctaataagtgaagattattaagaataaagtaaaaaatgagtgatgatacgagcgcttcgggcgggacaagtgccccttttccatcgccagttactgcggacccggaaccaggagccactgcctccaaattaccgggtcccatcagatccaatattcccacgcccgctacttctggtaccggaatcccgcagcccagcaaaatgaaggcaccatctagttttggatcgacgggttctgtttccaaaatcggaagaccgtgctgcaatcacacaactcccaaatccggtccaccaccaagagaagccaccagcatgagtcgtgaaagcgatgacaatttaagttcgatcaattcggcttatacagataacagcagcgccgtgctgacagcaaacacagagcagttcatcattggacagcgggtttggctgggtggcactcgtcccggacagattgccttcattggagacacacactttgctgctggcgaatgggcgggtgttgtccttgacgagcctaatggtaaaaacgatggctgtgtgtcgggcaaaaggtacttccagtgcgagccgaaacgaggcattttctcacgcctcacacgtcttaccacatatcccttggccggagcccagactccgacctctccattggccaaaagctccccagacagatcgcgcacagtttctccaactgcgagtattcgcagctctatgcttcgcagtcccggcattggaggcaagaatggaatggctgtgggcgatcgtgtgattgtctcttctggatttggtagtcgtcctggtatcttacgctatttgggagagacacagtttgctcccggcaactggtgcggtgtggaattggatgagcctagcggcaaaaacgatggaactgtcgatgatatcagatactttgagtgcaagcccaagtacggggtgtttgtacctattgcgaaggtttcactgtcgccgtcgtccaagaaaacgcgtctttccaggaccggatcaagggagtcgctcacctcgattggcaccatgaacagcatcgccaccacggccacgtcgcgcatgcgcatgaatgctcagcagcgcaagtcgagcacgcccgttaagccaattttagcgacgccgaaaagccaattttccatgcaggatctgctgcgcgagaagcaacaacatgtggagaagctgatggtggagcgcgacctggaccgcgaggatgcccagaaccaggcgctgcagctgcagaagaacatcaacgagctaaaagcaagaatcgttgaattggagtcggcattggacaatgaacgaaagaaaactgaagaattgcagtgctccatagacgaagcccagttttgtggcgatgaattgaatgctcagtcacaggtttacaaggaaaaaatccatgatctggagtcaaaaatcacaaaactggtgtccgccacgccaagcctacaaagtatactaccgcccgatctaccttcagacgatggtgctttgcaggaggaaatcgccaagctgcaggaaaagatgaccattcagcagaaggaggttgaatctcggattgcggaacagctggaggaggagcagcggttgagggaaaatgtaaagtaccttaatgagcaaatcgccactctacagtccgagttggtgtccaaagatgaggccctggagaaattctccctctcggaatgtggcatcgagaatctccgaagggaactcgaacttctcaaggaggagaacgaaaagcaagctcaggaggctcaggctgagttcacccgaaaactagccgaaaaatccgtagaggtgttaagattaagctctgaattgcaaaacttgaaggcaacatccgattccctggaaagcgaaagggttaacaaaaccgacgaatgtgaaattcttcaaaccgaagtacgaatgcgggatgagcaaatcagagagctaaaccaacaactcgatgaggttaccacacaactaaatgtacaaaaagcggatagttctgctctggatgatatgcttcgattgcaaaaggagggtactgaagaaaaatctactcttttagagaaaaccgaaaaggagctagttcaaagcaaagaacaagctgcgaaaactctaaatgataaggaacaacttgaaaaacagatatcagatttaaagcaattggcggaacaagaaaaactagtcagggaaatgactgaaaatgcaatcaatcaaatacaactagaaaaagaatccatagaacagcaattggctttaaaacaaaacgaacttgaggacttccaaaagaaacagtcagaatcggaagttcatcttcaggaaatcaaagctcagaacacgcagaaggattttgaattagttgaatctggtgagtcccttaaaaaactgcaacagcaattggagcagaaaactttgggtcatgaaaaactgcaagctgctttggaagaactaaagaaagaaaaggaaacgatcataaaggaaaaggagcaggagctccagcagctccaaagcaagtcagctgaatccgaaagtgctttaaaagtcgtacaagtacaactagagcaactccagcaacaggctgccgcatctggagaagagggatccaaaactgtggccaaattgcacgatgagattagtcagcttaagtcccaagctgaagaaactcagtccgagttaaaatccacccaatccaacttggaagccaaaagcaaacaattggaggcagcaaatggcagcctagaagaggaagccaagaagtcaggccatctgctggaacagattaccaaacttaaatctgaagtaggggagacgcaggcagctctcagttcatgtcatacggatgtggaatccaaaactaagcaacttgaagccgcaaatgcagctctggagaaggtcaacaaggaatacgcggaatcccgagcggaggcttctgatctgcaagataaggtgaaggagatcaccgatacgctacatgctgagcttcaagctgaacgatcgtcctccagtgctctccatactaagctgtccaagttctcggatgaaatagctaccggccacaaggaactgaccagcaaagccgatgcctggagccaggagatgctgcaaaaagagaaggaactacaggagctgcgacagcaacttcaagatagtcaagactctcaaacaaagctgaaagcagagggagagcggaaagaaaagtctttcgaggaatctataaagaatcttcaggaagaagtcactaaggccaagacggagaatctagagctaagcactggcacacagacgaccataaaggacctgcaggagcgactggaaatcaccaatgctgagctccagcacaaggaaaaaatggcaagcgaagatgcgcagaagattgccgaccttaagacccttgtggaagccatccaggtggctaatgccaatatatcagctacaaatgcggagctctccactgtattggaagttcttcaggcggagaagagtgaaacaaatcacatattcgagctctttgaaatggaagccgatatgaactcagagcggttgatcgaaaaagttactgggattaaggaggaactaaaggaaacccatctgcaactggatgagcgacagaaaaagttcgaggagttggaggagaaattgaagcaagctcagcaaagtgaacaaaagttgcaacaggagtctcagacttccaaggagaaacttacggaaatacaacaatccttgcaagaactccaagattctgtaaagcaaaaggaagaacttgtccagaacttggaagaaaaggttagggaaagcagttccatcatagaagcgcagaacacgaaactaaatgaaagcaatgttcagttggaaaacaaaacttcttgtttaaaggaaacccaagatcaattgctagagtcacagaagaaggagaaacaattgcaggaagaggctgccaaactttccggtgagctgcagcaagtgcaagaggccaatggagacataaaggattccctagtaaaagtagaggaactagtaaaggtgttggaggaaaaactccaagcagccacctcccagttggatgcccaacaagccacaaataaggaactccaggagttgctggttaaatctcaagaaaacgagggaaatctgcaaggagaatctttggcagtcactgagaaactacaacaactggagcaagcaaatggggagcttaaggaggctctgtgtcaaaaagagaatggccttaaagaacttcagggcaaacttgatgaaagtaatactgtattagaaagtcaaaagaagagccacaacgaaattcaggataagttagaacaggcccagcaaaaggagaggactcttcaagaggaaacatccaagttggcggagcaactgagccaattaaagcaggctaatgaagagctccagaaatcccttcagcaaaagcagttacttttggaaaagggtaatgaattcgacacccagctggcagaatatcagaaagtcattgatgagatggatgatgcggcttccgttaaatccgcgctgctggaacagctacaaaatagagttgcggaactggagaccgcactccgtcaagccaacgatgcccaaaagactgcttatctggagactaaggaactgaggcgccagctggaatcgctggaactggagaagtcgagggaggttctgagcctaaaggctcagatgaatggtgcgagcagtaggtccggaaagggtgatgaagtggagtcactggacatcgaaaccagtcttgccaagattaacttcctgaactcaattattgctgacatgcagcagaagaatgatgcactcaaggcaaaggtgcagacccttgaaaccttgccaatggatttcaccaaacctcatgccttcgatgccctgacaaagcggaaaccggctcccagacttttctgcgacatctgcgatgagtttgatcagcacgatacggaggattgtccaatccagggaagcgaagatcaagactactccacaccgtcatccgagtccaacaacaacgagaaggagcggaagctgccggcacccaggaaatactgtgattcctgcgaggtttttggccacgatacgagcgaatgtgccgatgatgaaacctattagttagctctagttaaattctattatttccattttactttgttttagactctatagcataaccatattgcgagatctatcagatgagatacttttacctcagcagagcttcactcaatcacacaaagaaatttctctacttaaaattgtgatcttgcgttatgcacacatccatggatagtagtctattttaaattgtttttatttattgaatgcgattcgtggcaaacacacaatcggttgttttcgtaatttttgagtgtaaacatagtgtaaaaaataaaatcaagaacgtgg

SEQ ID NO: 10224 - protein, 1690 aa, DROSOPHILA
MSDDTSASGGTSAPFPSPVTADPEPGATASKLPGPIRSNIPTPATSGTGIPQPSKMKAPSSFGSTGSVSKIGRPCCNHTTPKSGPPPREATSMSRESDDNLSSINSAYTDNSSAVLTANTEQFIIGQRVWLGGTRPGQIAFIGDTHFAAGEWAGVVLDEPNGKNDGCVSGKRYFQCEPKRGIFSRLTRLTTYPLAGAQTPTSPLAKSSPDRSRTVSPTASIRSSMLRSPGIGGKNGMAVGDRVIVSSGFGSRPGILRYLGETQFAPGNWCGVELDEPSGKNDGTVDDIRYFECKPKYGVFVPIAKVSLSPSSKKTRLSRTGSRESLTSIGTMNSIATTATSRMRMNAQQRKSSTPVKPILATPKSQFSMQDLLREKQQHVEKLMVERDLDREDAQNQALQLQKNINELKARIVELESALDNERKKTEELQCSIDEAQFCGDELNAQSQVYKEKIHDLESKITKLVSATPSLQSILPPDLPSDDGALQEEIAKLQEKMTIQQKEVESRIAEQLEEEQRLRENVKYLNEQIATLQSELVSKDEALEKFSLSECGIENLRRELELLKEENEKQAQEAQAEFTRKLAEKSVEVLRLSSELQNLKATSDSLESERVNKTDECEILQTEVRMRDEQIRELNQQLDEVTTQLNVQKADSSALDDMLRLQKEGTEEKSTLLEKTEKELVQSKEQAAKTLNDKEQLEKQISDLKQLAEQEKLVREMTENAINQIQLEKESIEQQLALKQNELEDFQKKQSESEVHLQEIKAQNTQKDFELVESGESLKKLQQQLEQKTLGHEKLQAALEELKKEKETIIKEKEQELQQLQSKSAESESALKVVQVQLEQLQQQAAASGEEGSKTVAKLHDEISQLKSQAEETQSELKSTQSNLEAKSKQLEAANGSLEEEAKKSGHLLEQITKLKSEVGETQAALSSCHTDVESKTKQLEAANAALEKVNKEYAESRAEASDLQDKVKEITDTLHAELQAERSSSSALHTKLSKFSDEIATGHKELTSKADAWSQEMLQKEKELQELRQQLQDSQDSQTKLKAEGERKEKSFEESIKNLQEEVTKAKTENLELSTGTQTTIKDLQERLEITNAELQHKEKMASEDAQKIADLKTLVEAIQVANANISATNAELSTVLEVLQAEKSETNHIFELFEMEADMNSERLIEKVTGIKEELKETHLQLDERQKKFEELEEKLKQAQQSEQKLQQESQTSKEKLTEIQQSLQELQDSVKQKEELVQNLEEKVRESSSIIEAQNTKLNESNVQLENKTSCLKETQDQLLESQKKEKQLQEEAAKLSGELQQVQEANGDIKDSLVKVEELVKVLEEKLQAATSQLDAQQATNKELQELLVKSQENEGNLQGESLAVTEKLQQLEQANGELKEALCQKENGLKELQGKLDESNTVLESQKKSHNEIQDKLEQAQQKERTLQEETSKLAEQLSQLKQANEELQKSLQQKQLLLEKGNEFDTQLAEYQKVIDEMDDAASVKSALLEQLQNRVAELETALRQANDAQKTAYLETKELRRQLESLELEKSREVLSLKAQMNGASSRSGKGDEVESLDIETSLAKINFLNSIIADMQQKNDALKAKVQTLETLPMDFTKPHAFDALTKRKPAPRLFCDICDEFDQHDTEDCPIQGSEDQDYSTPSSESNNNEKERKLPAPRKYCDSCEVFGHDTSECADDETY

SEQ ID NO: 10225 - DNA, 3259 bp, DROSOPHILA
agatagccggcaaaggccttcttgccccacgggcactcggtgggattggcaatcggcgcaaaagcggacaccgactggtacagcccgggattcttaagcgcgcagatcagggctccgtggccgcccatactgtggccgaatataccgcgtttaccgggaaccacgggcagattggcattgaccacatccaccagctcctgggtcacatagctgtacatcttgtagtgcttcgaccacggctcctcctttgcatccacatagaatccagccccgcttccaaagtcgtatgcatcatcttggccggcaatttccacgcccctgggcgaagtgtccggattgacgacgatcaggttgtggcgggcggcgtgctgctggaatccgctcttctggatgaagttctcatgcgtgcaggtcagtccgctgaggaagaacagcaccggacacggtttaccctccaaagcggccggcggcaggaagacgccaaaggtcatgtcgcacttcaaggtgtccgagcgatggcgatacacgcgttgctcgccctcgaagcacttatttgcggacagctgttcgagcgtcatgttctgggggtgaaacggagtaaataatttgtaagctaaaactgaaatccattaatttttaaaaacgcacttgttttttgacgatctaaaaataacaagcgataagaaaacagtgtgaccgcgtgtagagcgccaaaagtgggaagctttcagaacatcttggtatcgatgattaaaagggtagatcccataggagttaatattttctagaattctttaaattaatataaatctattaattattacatattgatgatgtattaaatatgtaaaaattgcaattattacaaacgaatatattcctcataagtaaacattgaattttaatgtgcccgtttcatacaaaaatactaactccataacgattgttacgcaagtaccatcactagccgggaagaagaagcgccagttggcgaaattgctattgttaattgttgttaacgtgaattactagataagtacataaatttaaaagccggagaatgtcggaagaagcggctagcacctcgtcctttggcttcaagaagcggaacctcaagaagggagctggaattcgtcgcaaaaaggaaaccagcagtgatgaatctggtaggaacttaattttaccgccaacaaagtaaatgggcaaatattattgatattccagcaaaaagcagcgatgaagagaccaaaggcaaagccagtgctctggtgcgagccgagaaccgccgaaagcgcacgaatcccaacttccagagcaccaagacaatgagcaaagcaaagagacaggcgggaggagttggtgatgatggctcatcctcagcctccgacgatgataaactgggcattgcgtacaaatccaaacgcgaggcgctgcccagtggaccccaagatcagggagctacatcgattaacgaaatggacacagaattggatcgcgatgcgcaggcaattcatgcgcgagctctgaaaatcaacgaagagctggagggcaaggcggacgataagatctatcgcggaattaacaactatgcgcagtactacaagaagcaggatacagcggcagggaatgccagctccggaatggtacgaagtggcccaattagggctcctgcccatcttagggccactgtcaggtgggattatcagccggatatatgcaaggattacaaggaaacaggatattgcggctttggcgacagctgtaagtttctgcacgatcgcagtgattacaaagcgggctggcaattggaaatggatcacgaaaatcagcgaacgggtgatgtagactccgatggcgatgataccaagtatgagattcactccgatgaagaaacactgcctttcaagtgccacatctgccgacagagttttgtcaatcccgtggtaacaaagtatgaagatgataacgatttctaaactggatttactgaataaataacatatttatctttcttccaggtgcaagcactatttctgtgaaaagtgcgccttggcccagtacaaaaagtcacagcgctgcatcatctgttcccagcaaacaaatggtattttcaatcccgccaaagagctgatagctcgcctcaagacaaacccaatggaaaactcagatagtgatgaggaggaggaatttgggaaaaaggaggataaagcggaagcaggggaggaagctcaggagatttcttcggatgatagtgattaaaatatttttttaaatcatttatacaggttgtgaaagtaaatagggacattgattagatgcttcacataaaatccattttacagcacatttgccgcataagtgtagaaagtaaagtaaggattgtaccaccgataggtggcgtgtaagaaattgtaaaaccctttgccccaaagagaattgctgataaatcactattcttacttgtaactagaaaaatatattttgataagttttcaaccaagaaatactagttctgtggtatttattaaaatttttacttatttttgggcgatctattacgattggttaacatacaaattatgcacagcagttcatctgtaagttgttttaacacgtatatatgtatgtattcattattatttataattcatactaaaatttgatacatagggacgggactggaaagttaatcgtgaaaagcattttataaaattaatcacaacgaggattttatattaatgtttagtccgcaggacctaaaagccttactcacctcggtcataatgtggccaaaactgagcacaatgctccgtcgcttgggaagatttgaacaggcgactatggaatatacgaatgagcttctaccactcacactgggcagacgaaggaaatttcttcccattcccaagggagctgcaataactttgtgatttcgatcgagtattgcttgacgtttgaaacgatcaaaggccaactttgaccaaatttaaacttggcaagcaactgaaactactgccttcttgaagcggcaaaattttggcccaatcttatagccataatttaattgtcagcactttcatttcccgtttcgctcgcatcagaaagcacaggcacagaaagtaggggaattggaagctgggaaacgtagtaaagcgggccaaacttatacggaagtgaattcgtttgacttttgcccgctaaaatcaaaacctcctgccaaacttctaggccgcattgtttcacagcacaaagccgaaat

SEQ ID NO: 10226 - DNA, 1134 bp, DROSOPHILA
tattgttaattgttgttaacgtgaattactagataagtacataaatttaaaagccggagaatgtcggaagaagcggctagcacctcgtcctttggcttcaagaagcggaacctcaagaagggagctggaattcgtcgcaaaaaggaaaccagcagtgatgaatctgcaaaaagcagcgatgaagagaccaaaggcaaagccagtgctctggtgcgagccgagaaccgccgaaagcgcacgaatcccaacttccagagcaccaagacaatgagcaaagcaaagagacaggcgggaggagttggtgatgatggctcatcctcagcctccgacgatgataaactgggcattgcgtacaaatccaaacgcgaggcgctgcccagtggaccccaagatcagggagctacatcgattaacgaaatggacacagaattggatcgcgatgcgcaggcaattcatgcgcgagctctgaaaatcaacgaagagctggagggcaaggcggacgataagatctatcgcggaattaacaactatgcgcagtactacaagaagcaggatacagcggcagggaatgccagctccggaatggtacgaagtggcccaattagggctcctgcccatcttagggccactgtcaggtgggattatcagccggatatatgcaaggattacaaggaaacaggatattgcggctttggcgacagctgtaagtttctgcacgatcgcagtgattacaaagcgggctggcaattggaaatggatcacgaaaatcagcgaacgggtgatgtagactccgatggcgatgataccaagtatgagattcactccgatgaagaaacactgcctttcaagtgccacatctgccgacagagttttgtcaatcccgtggtaacaaagtgcaagcactatttctgtgaaaagtgcgccttggcccagtacaaaaagtcacagcgctgcatcatctgttcccagcaaacaaatggtattttcaatcccgccaaagagctgatagctcgcctcaagacaaacccaatggaaaactcagatagtgatgaggaggaggaatttgggaaaaaggaggataaagcggaagcaggggaggaagctcaggagatttcttcggatgatagtgattaa

SEQ ID NO: 10227 - protein, 357 aa, DROSOPHILA
MSEEAASTSSFGFKKRNLKKGAGIRRKKETSSDESAKSSDEETKGKASALVRAENRRKRTNPNFQSTKTMSKAKRQAGGVGDDGSSSASDDDKLGIAYKSKREALPSGPQDQGATSINEMDTELDRDAQAIHARALKINEELEGKADDKIYRGINNYAQYYKKQDTAAGNASSGMVRSGPIRAPAHLRATVRWDYQPDICKDYKETGYCGFGDSCKFLHDRSDYKAGWQLEMDHENQRTGDVDSDGDDTKYEIHSDEETLPFKCHICRQSFVNPVVTKCKHYFCEKCALAQYKKSQRCIICSQQTNGIFNPAKELIARLKTNPMENSDSDEEEEFGKKEDKAEAGEEAQEISSDDSD

SEQ ID NO: 10228 - DNA, 6567 bp, DROSOPHILA
gatggcgaggcggatgagcccaaactgctgttcgccagcgaaaccccgtcgcagcagcgctacatttgcgaggtgctggcgcccttcgcctggacgtatgtgacggtggcgcagtccctgcaaatactgcacaagaactccatgctggagtctgaatttataagctttgtgattaacgatctgagcagcaaggtcaagcgcggcagctgcatctatggtaagtcgcgctttatgcatcaagagttacacctaatgtgcaaccccaaaactcactttcagccgaaagcatatccaccgactccgtgcgcaactgcctgaagctgttggagaaatggtctgtgatcgaggtttgcaaccagcagggcatgcgcctgatctcactcaacacgctctacgagatgtctcgtgagtcgctcaactcgatcgtgaagaagatcgacgcaattgtaccaaaattcaactcgggctacttcagtgtaacgccttaacaatggtcgctcgctttatttttggcactcatgttttatccttgtatagtgcatatccacttaagtttaaagtgcgtactcctagatcttagacttagctatgtctagttttatagtcatacgagtttatatatgccaaagtgctagctttactgtaactaagcgacaaacagtgaaatatgaacaaatttctaatgtataatttaaaaaccttttctatatgcggcctctgtgcggcaggacaaccgaaaacaatatcaactatactgaactgattgattaaacttcataactttataatagaacatcttacataataatcgtctcactttattttcacaacatccatctgttcagcacaatctccactagattgtctctaaaaaacatacgtcataacttttaggaaataaatacatgtggtagataaaaatattcattcataatacaacaaaaatgtaatgttaaaaaattttcttgagtttaagcgatttctatataattggcatccattactcgtccttcgcatccattggctcatcgtccgcacttatgtgtttcaccttgggagtcttcttaggcttcacatggatacgaacggcggatgcttttgcccgccgcatctgcttcaacttggcatgggcctttaaaagaataataggtttataactccataaatagggtatttcttgaacagcttaccttaactgcatcatccttgagtttgccgcctatctcgccggaacaccgctttgctccgcagaagcaggccttcttgctgttgttcattaagtcgtcccacaagtagttgaaggtgagctccgagttctaaaaagagcagttttatcagttataccatgatcgccatgtgatcagtgccactttaacgtaccactggaatgtctttgattgcaaatatgcccacacgatggatgcaattgacggtccacttctgagtctcgcagttgggctcgcacgaatggttcatgaagcgagccaagttgcccttcggtcccgcatcgattataaagtccttttccacacccaagaagtagtagttctcgtcgcgatcacgctgcttctgctccatgcgccgctggaactcggcatggttgatcacctcgcccacgtactcgatgacaaagtcacccacggctatgggctcacggttgacgaggccaaatcctcgctcgttcatgtagaccacctccaaacgtggcgacttgcgttgctcaaacattcgattctcgcaaagactgccagccttgcagtactccggattgcattcattgaacagcatgcggttaaggcagccagcttccgggccacagggatgctcgtccaccggcaggcagttacaagtactcaaatcctctagattctgcgagaatcgcaacggtggcaccgccttattggtcttgattttcacatatggaggcggatggagcttattaccgctttggcgttccatgtcctgttcctgccggcgggctttgatgatcggaaggaagcgcgacgcctcttccacgccggtggtgtagttgcgaaacagctgcgatttggtcttatgtccatctcccgtatccccctcgatgtagagataaacgcgacgtcgtgaaatccagccatgatcgtgtgtgccaaagaatcgcaccacaaagtcattctcgccgtgagccttctttagtatattgctgggcacctcagtgggtggcaggataatggccggccaccagcggaagttgttgaacttcgcccacacgatctcgccgtacagcggtagacgaccgctctcgcactcctcacagatgtagctctcattggtcttgatgggaatattccggcagtgggcgtgcacagcaatggggcacgtttcgcagcataccaattcgccgcctttgacgcagatgtagcaccacagaacattgacgtgggcatccgccttggcgatgttgtgacgcggacagattatattggtagtgttgagcatctgggtgccggctggaatgcattttgagagctggtgatacgtggccgggcagcgaacgcacttggccagtttggagctgcccagctgctggaacttgccgctgggatcgtcggagacgcatgtgtggcacacgtgccgtggacaacgcgccgaatgtttgctgctgctcgcctgcggccaatatttgcagcaactcgtgtgaaaccgctttccacacataggctggctgcatgtcaggagcttatcttcgattggcgtgtgcgatgatgaatcctccttccggggagtgcttggtacagctggcgattcaacttgatggcaaatgacacagccttccggttcgcccacattgcactcatgacacaccagtgaggtaccaacggcaacaacctccttggcgtcggctgttacatgatcctcatcgggactgggagatttcgatgtgggtggaatgaccagagcctttcgactgcctattttgggcatcggagctcctgtcacctttcgttccaggcagtcggcatgcagccagctcgagcaggtgcgcgagcagcgcactagatcggatcccgcctggtaacaatatttgcatatgggctcgcggctaagcccacggaagaggtacttgctgtccagctgcaagatgtcttcaatcacttcttctatgggccggttgacgggcttcttggtctttgggggctcggaaaggcgacgatctggctccgatggtgcgggcgttgtactgggtgtcactactggagtcatgctacggcgcaccatcatggtcataaggcgattcgaaagccgcttgatagtgccaacaccgctgccacgaccaaccaccgacgagcccaaaggctcctcaatttcgccgctggccaagtcgcgctctagctcgcgcaactggatttgctttagggaccaaatattgctcaccacggagagcagaaccttctccactttttcatctgaccggttcatcattacatattccatgacggcagacaagagctgtctgaactcgggattttcataagcggagctgtccacagttgtttcggtctgtgaaggagttactgccatgctgttgctgccagtatccgcttcggtgccattgctcagtttgcggcgcttggcccgcttttcgtttttgctctttacgggcgagaaagccggactaaagggcgactccgagcgttctcgtttcacggccagcaactgcgtgccttgcttgttgtgcaggttgtccgtggagtcgtacaggctgctgcccacgtcagaagtgtcctgcatcatatacttggtccgcttgcgtttttgcctattaagagtgctgaaaagttaaaccatgtttattgtattcactgtgataatagagaaagcgatagttggtccacttacacaacgttttcgtacgtctggtagaatttttcgagacgatcggagtacgggatctgggtcatagcttgcgcctcttcgatggcttgtcgccagatgacaacctttgtccgcttgggcaccatctgacggtacttggcgctctttggtccatgcttaattcgcaattcctcgcgcatgtcatcgaaagccttcagtccggcaaaggtcagcagattctccggtttaatccagttgcgtcgtccattgtcggcgaaaaagcgcacatgcacttgaatgggaacgttggcgttgtcaagggatgagcgctgaggatggctcggcatgttgcccacaatctggccaagcggatccggacacaccatgcagggccagaagcagtacgagaagaccttgccccaaaacaaatcaccaacttggtaggtgggccaaccgggatcagtgactatggacaggcctttggcgctatcgatgctcacagaggagggggatttgatggatgtggcgagcgccgtggagctcaagtcgggtggagatttcagatccacctccgtggaggaggccaatggcagggcaaatgccagttcttcagtacttttttccaggtctttcggctcttcagtgataactatggaagtgctctctactggattattaactatatctaacctgatagtatcctcttgctttatatgaacatctacggctgctttgtgctcagcctcagtctctgatttaatggagatcgcggtagtttgagcctcttgagttggggcttcatctgtccggtcaacttcctcatctattggctccgtttttactgacttttcgtcaacctcttgctggtttttttcgtccagttcgagggttactttcgccttcggcactcttttcattttgcgctttacgtgcttgcgaacgattggccgtatgcccaggtcctcggagcccgcctcgaaaccggtgctgttgggcgaactagcgccgtttttgattagcagcttctcgatggggctcatgtaggtcttgctgagcagctgattagcgctatcatctccaccacctcctcctcctcccccgggggtccttggtgacgcattatcatgggccagggtctcgccagcactgctgttatttaaagccgccgcttggttaacgcgtcgcctcgtcgtgcgtattgtgtcatcggaatcggaaagcggcgtgggtgagttggcattggcatagccaatatatttggggctcagcgccgactgcaagttgataagatctcgtttccctaaagcagcacacacaggcgcacacacaaaagcagatatattagcatatggacggcatacggcggggtatattgcgccattgttacacttactgttcaccatggacacacgctgttgttgctgtttttggactggcgtctgccgctgactctccagctccgactcctccgccgcgggctgtgcgccgttctgcaccgggttttggccgggcttgtccagcagtcgaaccggagtgctgttgttggtgtccctcggaatttcgacatcatcgccttcggtggccaccgactcgtcgttgcccgcagccacttcgtcggtggcggtcagggaatcggacgcggagttgcacagcacattgccgtgggcagcgtcgccctcgatctcggagtgcgcgtccgtgctcagcttcattctgcggtccagtttaatcgcgctctcgtcaattaaacactaccgttaattcgacaatttctaagaacacagaggcttcgcttgcgccaaaacttcgactgcaaccgtgggcatcgcggtagctatcgatccatcgatacgatcgctgaaagataggcgtcacacattcctatcgattatacttagccaagattcgcaccgtaatgcacagtgaggcgaagtgttttcttttacttatagtatagttatataattaataataatttttataataatttttgaactaaatcataagcgccgcggggtgttcttttattcgctctcaggcacgtcatccaatacaaatttctaactacaggtttctaaaccttctatataaattttttgaaaaggttccttagccacgactgaggtactacactggccaggggacttcgttacagattgtttttataatagttattcggagttaacagatactgccatgtattgttgttttccaaaactaaatattttaactttaactcaattctttcaccttaccgaaaacaacgtgaatacctgaattttacattaatatgaacatttaagttcttaatgtatagctgattaaatgcaacttggctttaaaggtaaaaactcggtggcacaaatatttctatactttattattctttcattcataactcaaaagtaaaaatgtatctgtatctgcaattcgtcaaatttggctagtaaaactgagaagttggcatagctaccgctcacgcacgacgcccggatccaatcagggcgaaactcacgtggggcggccatccctagcgtaaacatatgtacatacatgtaaacgcatgtaaagacaaactcgacgtttatcctggatttcctcggcactcacgggtgttgcggcaagcaaaagcacacgaataacaagggccaaggagcatggacgactttatcaagacactgattgccgaggtgaagtcgcagggcgtcttcg

SEQ ID NO: 10229 - DNA, 4270 bp, DROSOPHILA
atgaagctgagcacggacgcgcactccgagatcgagggcgacgctgcccacggcaatgtgctgtgcaactccgcgtccgattccctgaccgccaccgacgaagtggctgcgggcaacgacgagtcggtggccaccgaaggcgatgatgtcgaaattccgagggacaccaacaacagcactccggttcgactgctggacaagcccggccaaaacccggtgcagaacggcgcacagcccgcggcggaggagtcggagctggagagtcagcggcagacgccagtccaaaaacagcaacaacagcgtgtgtccatggtgaacaggaaacgagatcttatcaacttgcagtcggcgctgagccccaaatatattggctatgccaatgccaactcacccacgccgctttccgattccgatgacacaatacgcacgacgaggcgacgcgttaaccaagcggcggctttaaataacagcagtgctggcgagaccctggcccatgataatgcgtcaccaaggacccccgggggaggaggaggaggtggtggagatgatagcgctaatcagctgctcagcaagacctacatgagccccatcgagaagctgctaatcaaaaacggcgctagttcgcccaacagcaccggtttcgaggcgggctccgaggacctgggcatacggccaatcgttcgcaagcacgtaaagcgcaaaatgaaaagagtgccgaaggcgaaagtaaccctcgaactggacgaaaaaaaccagcaagaggttgacgaaaagtcagtaaaaacggagccaatagatgaggaagttgaccggacagatgaagccccaactcaagaggctcaaactaccgcgatctccattaaatcagagactgaggctgagcacaaagcagccgtagatgttcatataaagcaagaggatactatcaggttagatatagttaataatccagtagagagcacttccatagttatcactgaagagccgaaagacctggaaaaaagtactgaagaactggcatttgccctgccattggcctcctccacggaggtggatctgaaatctccacccgacttgagctccacggcgctcgccacatccatcaaatccccctcctctgtgagcatcgatagcgccaaaggcctgtccatagtcactgatcccggttggcccacctaccaagttggtgatttgttttggggcaaggtcttctcgtactgcttctggccctgcatggtgtgtccggatccgcttggccagattgtgggcaacatgccgagccatcctcagcgctcatcccttgacaacgccaacgttcccattcaagtgcatgtgcgctttttcgccgacaatggacgacgcaactggattaaaccggagaatctgctgacctttgccggactgaaggctttcgatgacatgcgcgaggaattgcgaattaagcatggaccaaagagcgccaagtaccgtcagatggtgcccaagcggacaaaggttgtcatctggcgacaagccatcgaagaggcgcaagctatgacccagatcccgtactccgatcgtctcgaaaaattctaccagacgtacgaaaacgttgtcactcttaataggcaaaaacgcaagcggaccaagtatatgatgcaggacacttctgacgtgggcagcagcctgtacgactccacggacaacctgcacaacaagcaaggcacgcagttgctggccgtgaaacgagaacgctcggagtcgccctttagtccggctttctcgcccgtaaagagcaaaaacgaaaagcgggccaagcgccgcaaactgagcaatggcaccgaagcggatactggcagcaacagcatggcagtaactccttcacagaccgaaacaactgtggacagctccgcttatgaaaatcccgagttcagacagctcttgtctgccgtcatggaatatgtaatgatgaaccggtcagatgaaaaagtggagaaggttctgctctccgtggtgagcaatatttggtccctaaagcaaatccagttgcgcgagctagagcgcgacttggccagcggcgaaattgaggagcctttgggctcgtcggtggttggtcgtggcagcggtgttggcactatcaagcggctttcgaatcgccttatgaccatgatggtgcgccgtagcatgactccagtagtgacacccagtacaacgcccgcaccatcggagccagatcgtcgcctttccgagcccccaaagaccaagaagcccgtcaaccggcccatagaagaagtgattgaagacatcttgcagctggacagcaagtacctcttccgtgggcttagccgcgagcccatatgcaaatattgttaccaggcgggatccgatctagtgcgctgctcgcgcacctgctcgagctggctgcatgccgactgcctggaacgaaaggtgacaggagctccgatgcccaaaataggcagtcgaaaggctctggtcattccacccacatcgaaatctcccagtcccgatgaggatcatgtaacagccgacgccaaggaggttgttgccgttggtacctcactggtgtgtcatgagtgcaatgtgggcgaaccggaaggctgtgtcatttgccatcaagttgaatcgccagctgtaccaagcactccccggaaggaggattcatcatcgcacacgccaatcgaagataagctcctgacatgcagccagcctatgtgtggaaagcggtttcacacgagttgctgcaaatattggccgcaggcgagcagcagcaaacattcggcgcgttgtccacggcacgtgtgccacacatgcgtctccgacgatcccagcggcaagttccagcagctgggcagctccaaactggccaagtgcgttcgctgcccggccacgtatcaccagctctcaaaatgcattccagccggcacccagatgctcaacactaccaatataatctgtccgcgtcacaacatcgccaaggcggatgcccacgtcaatgttctgtggtgctacatctgcgtcaaaggcggcgaattggtatgctgcgaaacgtgccccattgctgtgcacgcccactgccggaatattcccatcaagaccaatgagagctacatctgtgaggagtgcgagagcggtcgtctaccgctgtacggcgagatcgtgtgggcgaagttcaacaacttccgctggtggccggccattatcctgccacccactgaggtgcccagcaatatactaaagaaggctcacggcgagaatgactttgtggtgcgattctttggcacacacgatcatggctggatttcacgacgtcgcgtttatctctacatcgagggggatacgggagatggacataagaccaaatcgcagctgtttcgcaactacaccaccggcgtggaagaggcgtcgcgcttccttccgatcatcaaagcccgccggcaggaacaggacatggaacgccaaagcggtaataagctccatccgcctccatatgtgaaaatcaagaccaataaggcggtgccaccgttgcgattctcgcagaatctagaggatttgagtacttgtaactgcctgccggtggacgagcatccctgtggcccggaagctggctgccttaaccgcatgctgttcaatgaatgcaatccggagtactgcaaggctggcagtctttgcgagaatcgaatgtttgagcaacgcaagtcgccacgtttggaggtggtctacatgaacgagcgaggatttggcctcgtcaaccgtgagcccatagccgtgggtgactttgtcatcgagtacgtgggcgaggtgatcaaccatgccgagttccagcggcgcatggagcagaagcagcgtgatcgcgacgagaactactacttcttgggtgtggaaaaggactttataatcgatgcgggaccgaagggcaacttggctcgcttcatgaaccattcgtgcgagcccaactgcgagactcagaagtggaccgtcaattgcatccatcgtgtgggcatatttgcaatcaaagacattccagtgaactcggagctcaccttcaactacttgtgggacgacttaatgaacaacagcaagaaggcctgcttctgcggagcaaagcggtgttccggcgagataggcggcaaactcaagggcccatgccaagttgaagcagatgcggcgggcaaaagcatccgccgttcgtatccatgtgaagcctaagaagactcccaaggtgaaacacataagtgcggacgatgagccaatggatgcgaaggacgagtaa

SEQ ID NO: 10230 - protein, 1401 aa, DROSOPHILA
MKLSTDAHSEIEGDAAHGNVLCNSASDSLTATDEVAAGNDESVATEGDDVEIPRDTNNSTPVRLLDKPGQNPVQNGAQPAAEESELESQRQTPVQKQQQQRVSMVNRKRDLINLQSALSPKYIGYANANSPTPLSDSDDTIRTTRRRVNQAAALNNSSAGETLAHDNASPRTPGGGGGGGGDDSANQLLSKTYMSPIEKLLIKNGASSPNSTGFEAGSEDLGIRPIVRKHVKRKMKRVPKAKVTLELDEKNQQEVDEKSVKTEPIDEEVDRTDEAPTQEAQTTAISIKSETEAEHKAAVDVHIKQEDTIRLDIVNNPVESTSIVITEEPKDLEKSTEELAFALPLASSTEVDLKSPPDLSSTALATSIKSPSSVSIDSAKGLSIVTDPGWPTYQVGDLFWGKVFSYCFWPCMVCPDPLGQIVGNMPSHPQRSSLDNANVPIQVHVRFFADNGRRNWIKPENLLTFAGLKAFDDMREELRIKHGPKSAKYRQMVPKRTKVVIWRQAIEEAQAMTQIPYSDRLEKFYQTYENVVTLNRQKRKRTKYMMQDTSDVGSSLYDSTDNLHNKQGTQLLAVKRERSESPFSPAFSPVKSKNEKRAKRRKLSNGTEADTGSNSMAVTPSQTETTVDSSAYENPEFRQLLSAVMEYVMMNRSDEKVEKVLLSVVSNIWSLKQIQLRELERDLASGEIEEPLGSSVVGRGSGVGTIKRLSNRLMTMMVRRSMTPVVTPSTTPAPSEPDRRLSEPPKTKKPVNRPIEEVIEDILQLDSKYLFRGLSREPICKYCYQAGSDLVRCSRTCSSWLHADCLERKVTGAPMPKIGSRKALVIPPTSKSPSPDEDHVTADAKEVVAVGTSLVCHECNVGEPEGCVICHQVESPAVPSTPRKEDSSSHTPIEDKLLTCSQPMCGKRFHTSCCKYWPQASSSKHSARCPRHVCHTCVSDDPSGKFQQLGSSKLAKCVRCPATYHQLSKCIPAGTQMLNTTNIICPRHNIAKADAHVNVLWCYICVKGGELVCCETCPIAVHAHCRNIPIKTNESYICEECESGRLPLYGEIVWAKFNNFRWWPAIILPPTEVPSNILKKAHGENDFVVRFFGTHDHGWISRRRVYLYIEGDTGDGHKTKSQLFRNYTTGVEEASRFLPIIKARRQEQDMERQSGNKLHPPPYVKIKTNKAVPPLRFSQNLEDLSTCNCLPVDEHPCGPEAGCLNRMLFNECNPEYCKAGSLCENRMFEQRKSPRLEVVYMNERGFGLVNREPIAVGDFVIEYVGEVINHAEFQRRMEQKQRDRDENYYFLGVEKDFIIDAGPKGNLARFMNHSCEPNCETQKWTVNCIHRVGIFAIKDIPVNSELTFNYLWDDLMNNSKKACFCGAKRCSGEIGGKLKGPCQVEADAAGKSIRRSYPCEA

SEQ ID NO: 10231 - DNA, 3809 bp, DROSOPHILA
tactttaaaataagtatttcaacagataaatttaaatacatttattgttgttgacagaagtaataaaaaagggcttaaaagaagtgcatataatataataagaattttcattcttgtaagttgctccacttcttattatatgatatcttgttcctaaattggcaatacaattaagtttttattaactaattaactaaacaataaataaagttcccagttttaaatatttggacgctcacaagattcgaattgtgttctatttcatcattccaaaataacaaaaataccgtagtccgattgacacacacatttcaaccaccataaacatcgataaaacagctgatagttttccaaattcatttttacaataagttaattgcccacatcggtaaatttattagaaaattattctattaaaacgataaatgatgaatgaagcggacagtttaaccgaaatattcaggggcggcttacctcactgccttctgattgtgttttccctgttgttaacatgctcaccggtaatgccaagcgaattcgaggttatttccatgtccaaatacgatctaaatggacaacattatggtaagcaaataatgcaaatgacatatattaattatgtaagttcattgtagatcacgtctcggatattttgtacaccaatgcatcgaatataaacttaacaatttcgagggtgcgctgacccacatttttatgtgcactgacgagggctttatttaattagcacttttgtatctcattaaaacacaattttcactaattattattcttatccgatgtattttggaatatacttaactaaccatgtgaaaaatgattatcttcaattttttaggaagccgcgtagcttcaatatccctagaagcgaggtctttgtactcgtggaatacttcaagacactgtgtgctcacacggtaagtgtaaactcttcactactgttgctcgaaatgtttttaacattgtaatttgcatcaaacaggttaaccgacttgtcaatccatgattttgataagttacggcaaggtgcaggaggccttattctcatgttgccggcgaatatcttgaatctggatccagaaaccaaagaacttataactattttggagcaatcaatgctgacccacacagctgctgttcccatttacttcgctccgtacaacaaagatttggaaaagatcatcgatgatattacgtacacgactacggacagtccgggtcaaaatcaaacagcgttggcacaattggttgtaaccgtctcggccaacagatatcacattaatgtcggcggcggcagcattgcggccaataagaatagcaaaattcccattatccacggcgaactgatacccaatcaattggccctaaaacccacggaatctgttgcagatggacaaaaactccccgtcatcttgataaccgcgaatctgaaaacctttggtatatataatgtaagtaatctggtgactgagtagatgaataatttagtctctgattttgcaacctaaaactaaaataacaccataattctgcttacaagataagggcttcttatctgaaagattgtggcctttatctaagtggttcaagtggatttatgattctcggcaatgatttgaaaggtcaaaagagcttatctgaagtagattcacttataatcataattattttgtcttaaattcaaggattatccggtgaatgctgatgctgcagttttgctggtgctgatggagttgtttagtaaattacactatacatccagtatggcaccgaagtatcgactcagatttttgctttcggacgcaggcgtcctactaaacttccaaggctccaagaagtggctcgaggttgatgataatgcgctgcaggtaaaaaaatgtcttctaaaggttatatatatcagtttttatctaaaatctttatctctattagaacgttgagtttgtgctctgcttggacaccattagcgagagcttatcctacacaacggaaaatgctttgtacatgcatgtttccaagccacccaaggataagacttctattagcaacttcttcaaactcttgaagtcatcagctgaaaagtattccaatggtctggcggtcgagggtgtgcataagaagatcaatctagcagacaccaaactggcctgggagcacgagcggttcagcataaagcgctatccctcgttcactctatcgtctgtaaagagtccaagaagccccattcgtacaaccattttcaaaaacgacgagagtcgtctagtggagcacactcttaacacgacgcgaattattgcggaagctctggctagttttatgtacaaagtggatccaacctccagcatttttgagggacagttggtaagtttgcaatgcttggcacttagcaagatattaacttatacttcatctttaattttattaggccattaaggaggaaaacatcttgccatactttggagttaaatccatactgcataataacgacgtgaaggatgctttcgaaaaatatcttaacaatgttaagatcatttacgataaacccgacgccagagacccagaatttatgttctataacgagaacgaggttaaactgaatgtttacagagtgaagccggcgatctttgatctcttcctgactttcgtcattggcgcctatctattggctgtattcctggccatacaatacttcccccggttttacgatgaagtttccaagctaacgaaggaggatcccgcgggtcaatccaatggacactcttctgaacgagtcagaatgaagtcacattagtaacaaaatggtattgagtataatattgcgattgcgagtagggaaacttatgttcaaaattatttttcaaaacttttctaatgctaattgaacgattgttaataaactctatagaactgtagaaatctgtccacgtccatgtccatgtggctatcgaaattgactccttttgttttaaatgaaaatggctccgattatcataagtacattttttgttttattgcgtataaatttggtttatgtttaatataaatattatttgtgtacagcgtaattaattgcactcattaattagcacgagccgttgttgaagttagaactagctgagttatgcgctcgacttggcttcggtagtgggttccaatccaagttcgatgaagtgggcgacgactccctgaattggcccttaaacttgcttatcttgcttatgaacaaattactttggcctggtagttcattggtatccgatgtgctaactgatatgttggcggatgtcacttccttggacgatctattattaacgttatttaactcattgggatagttgtatttgttctcagcatatgagggcgttaaataaacctttgtgcccttcgctgcgctttcgtttagaatcttctgattcctacttatggactctagcacttccttgatggacttcttcttcctcatcctcggcgtgggcgtggaattcgattcccgttccgccgatagggaagatctatagcgatcgtttgtgggtctctcctcatatcttaatcttacattattttccagctcaaactcttctcgtatttgtagaacgtcgctggtttcagatgggttcggctgaattacattggaaaccacatggttctccgttttctttgatattgcaccatttgcattgagcacttcttttttgggcacttgactggaagcactggaactagtaatgttctcttcgaaaatctgagaaatctgtttgaccgtgccaaatgaattggttttccgctcttcc

SEQ ID NO: 10232 - DNA, 1447 bp, DROSOPHILA
gttaaccgacttgtcaatccatgattttgataagttacggcaaggtgcaggaggccttattctcatgttgccggcgaatatcttgaatctggatccagaaaccaaagaacttataactattttggagcaatcaatgctgacccacacagctgctgttcccatttacttcgctccgtacaacaaagatttggaaaagatcatcgatgatattacgtacacgactacggacagtccgggtcaaaatcaaacagcgttggcacaattggttgtaaccgtctcggccaacagatatcacattaatgtcggcggcggcagcattgcggccaataagaatagcaaaattcccattatccacggcgaactgatacccaatcaattggccctaaaacccacggaatctgttgcagatggacaaaaactccccgtcatcttgataaccgcgaatctgaaaacctttggtatatataatgattatccggtgaatgctgatgctgcagttttgctggtgctgatggagttgtttagtaaattacactatacatccagtatggcaccgaagtatcgactcagatttttgctttcggacgcaggcgtcctactaaacttccaaggctccaagaagtggctcgaggttgatgataatgcgctgcagaacgttgagtttgtgctctgcttggacaccattagcgagagcttatcctacacaacggaaaatgctttgtacatgcatgtttccaagccacccaaggataagacttctattagcaacttcttcaaactcttgaagtcatcagctgaaaagtattccaatggtctggcggtcgagggtgtgcataagaagatcaatctagcagacaccaaactggcctgggagcacgagcggttcagcataaagcgctatccctcgttcactctatcgtctgtaaagagtccaagaagccccattcgtacaaccattttcaaaaacgacgagagtcgtctagtggagcacactcttaacacgacgcgaattattgcggaagctctggctagttttatgtacaaagtggatccaacctccagcatttttgagggacagttggccattaaggaggaaaacatcttgccatactttggagttaaatccatactgcataataacgacgtgaaggatgctttcgaaaaatatcttaacaatgttaagatcatttacgataaacccgacgccagagacccagaatttatgttctataacgagaacgaggttaaactgaatgtttacagagtgaagccggcgatctttgatctcttcctgactttcgtcattggcgcctatctattggctgtattcctggccatacaatacttcccccggttttacgatgaagtttccaagctaacgaaggaggatcccgcgggtcaatccaatggacactcttctgaacgagtcagaatgaagtcacattag

SEQ ID NO: 10233 - protein, 460 aa, DROSOPHILA
MLPANILNLDPETKELITILEQSMLTHTAAVPIYFAPYNKDLEKIIDDITYTTTDSPGQNQTALAQLVVTVSANRYHINVGGGSIAANKNSKIPIIHGELIPNQLALKPTESVADGQKLPVILITANLKTFGIYNDYPVNADAAVLLVLMELFSKLHYTSSMAPKYRLRFLLSDAGVLLNFQGSKKWLEVDDNALQNVEFVLCLDTISESLSYTTENALYMHVSKPPKDKTSISNFFKLLKSSAEKYSNGLAVEGVHKKINLADTKLAWEHERFSIKRYPSFTLSSVKSPRSPIRTTIFKNDESRLVEHTLNTTRIIAEALASFMYKVDPTSSIFEGQLAIKEENILPYFGVKSILHNNDVKDAFEKYLNNVKIIYDKPDARDPEFMFYNENEVKLNVYRVKPAIFDLFLTFVIGAYLLAVFLAIQYFPRFYDEVSKLTKEDPAGQSNGHSSERVRMKSH

SEQ ID NO: 10234 - DNA, 7887 bp, DROSOPHILA
acaatcaatataatatacatttactgttaagctcaaagttatatattttccactgtgcattagctgcgtgtttttgcaatttgacatacttttgttaaccagcaactgcaactgcaactgcagcagtggcaaaggcaaaggcagcatcttggggcagcatcttgggacagcatcaacaatcatagtaatattggcaaaacttaatagtggcgcgaaagtatgacgaatatgtaaactgcagctaatcccgcaacaaatgaatgcgataaatcaacggaattgcattagccgggccaaaaggactcgtccgaaaacgggcgtagctcgaactgtcacagttgctgattaagcgagattcccagcgtaagatactgagacgagttttgtgggtgcgtgcgactgcaattatgcgcatggcgcgcacggtagcccagggcatgcgatgtgcaacactgtgtgcagcagatccctttcccccaattggccaaaaactcattagccagtcaattaaaaggccaggaagtggcagatgcacggtgtggcgtcttttgcctgctatccagccacctggatgcctccgcttatctaacgactccatttggccgctgactggcagcatcatctctcaatcccaatctgccaagcgatcctgaaactaatgccaaagcgactggagcagtggacactaagcggatgtgcgtaataaattaataaagcccgcattaaacgcaatgcatattcaattaacaatgtcagtgcgccgccagtgtatcttgcagatacattcggcatttgcgtttcgccattcagcgattgcagtcacattcgccgcatttggctgcgcctgccgcatttcctgtcagcaaatggcaaatcccaggccatagctcattaaagcttcgcgctacaaagttgccgagagaaacccattttatggatattgtaaatcgttcggcgaacctagggttttaaagctgccaaaaggaatacagcaattagcctagaactttcttagctggaaagctaatagttgcattactttaagaataatatttgaagatattaatgggtataacccatattttccatgcagcacacaagagctagcagtttacccatttacccacttatatgctcattcattagtggacttacctcactgatctcatcctcgagggcccgttgccgggtcagttgcctcaatcgctccctgcgctgctcagtcagctgttccaggcgttgggccgcccgatccacctcgttgaagaggagcgtcaccttgcgcagcttgcaggcggcatctacgttcaggaatgcccccgaagaggaagatgaggatgattgcggctgtgacgtcatgcgcggcgagccgggagcagaggtgatggccctggccaaatcctgcagcctggccaactggccagcacccatcttgcgcagactgtgtagctgcgaatccatcagcgcacgactgagggcgcgatgctggccataaagttggcggcgcgtgggcaaaccctgaagatcggcggcgcgtatttcgctgagggcgctcaccaaacgaccgccggccgtcgagcattggcgttggaaggcctccagttgggcgaaaaactcccgccacttggtggcatcgtgatgacgctggctaatcccgggcagcgtggacagcgcgggaacggagggcagcaatccagcgggcagctgcgatggcgcaacacttgtcgtgacttggtccacgctaatgaatttaaccaaatccactggcgacggcgacgaaggctcctgtttgtttgtttgttttggggtcagagtcagagcagagaaaaacagcgtattcgttgtcattagtggacaagttctgttttttttttttttttgtttttgcccagtcggtcatgtcggggcgggttaattggctggggatcagagtctcaaaagagcacgggctggggcgttagcccgttgcctggcctttcgatctcaccccctgacaaaagcacagagaaaaatctattatattaagatgcattcattaaacgtagaaccattttgaacaatgactttgaagtaagttttcacatagtttttaaacagttgtgggccctaagataactaaatttttactttgtatgctgttaaaggtacttaaatcatttttctctgtgatccttttgtgcaatccgaaaggtcaggcggtataaactttaaactcaccgggtgatcactgttattgttctgctgctgctgctgctgcagcttctgttgctgctgcccattgcacaattgcagcaaactcgaatcgggacaaacggccaaaatttcacaattgccaatttgcttggccaagagtctgagactttggcaaattaagtcgattacgcataaatgttgagacttctcgatggcaattaaaatggtaaatgtctgttgggcgggttgttgtttctgctgttgctgctgctgttgctgctgctgctgctgctcagtgcttttatggccattgattgtagctgtcgttccgggtgttgccggggtggtgaaggggcaggagctgcaatggtaagaacagtgaaaaacgagccatgaattgtggttcaaaccggccgagaaggtgcacggtcaagtcgcataaataacatcaaagtgttcgtctgctgtcgatcagaggtgggcagatatcaatgaactagttctacatgatattgtccaagattcttagatacaaaatctacttttttttgttcgtaattttatagctgcaatatatagtatattaagatgtcttacagcaaaacaactaagcctccaataaattaaactttttatgcaaaaagttgttgagagcataacattttcaagagctattaaaactgtttttgtgggagttttaattacatttaagaactctattcagctgcacgtattgcaaacttctttcaggcatgaaattaaaacggaaattttcttatacttcccaaggtgtctgtatttgcgataccctccttgaagatgagcaacccaacaaaatgcatctaactgcaccagggcaccttattagaattgttaaatttaatgcggccgcaggctgtaatttttcaataaatcattataatctcatggagcgttgcccgcctgattccgcctgcgaattaatcgctctgtttcccgctgattcccaggctaccatgtgaactggttcgcatgtgggccgcacagatccaagggtgggggaataaaaagcgcataaagcttgggcggattgggtggtggtgtccgtttgggtagcagaacacaccaacttggctacgcccaaaacaagttcactttaattggcaataagcggcctctgcacttggactcggccagatgaagcactttacctttcagtagctcagcggggagaagtcacgtaactatgacaagttggtagccacttttaatcagcgtaaataaaaattgaaattgctgctaatggcggctggtgggcattgcattaacagaagccaagagccgtgtccttacactttagacaaagtttgcacagccgcttcaaaaaaattctttgccggccaagataagctaactgtaaacgcatgccaggccaggccagaatctcgtttctcacatgattctcaatgggtctctctcaattggcagtgcagtcgcagccacaagtccacccccaggttgtcttccagatgcagttgctctcgccgctagatgcagttgcaaattgcacgcaatgctcacgggccaagatccgctgatggtggcgtgccacagcggagtctttgggtctcagtccgcggcttaatgatgccgcacagtgcgcacaggctataaagatcgcctggcatttcaattccgtagcagcccatactcacgatcaaatgagccgacagcgattttttttttattatttccaggtcgctgaagaaaataccctaaccgtaagttgagacagctgccttgaaattttataaaacctttatcgagtggcataattctgctaatagatgcatcaaaactttaagtttagttgtatcaaaacatgtatttgaaatcataattgtttctttttttatggtattatggtccaatactttcgtctataaaattgttatttaaattataagggacacttagtacttcctccatatgcctttcaactcatcttccatgaacccattttgtggatcaccccaaaagctgtaaccccgttcaatctttgccatgggcaattataatagtgaacctcgtctgggatgaatccaaatgcatttgggttttgctctctccgtcgattttgtagggcaagacgcattaaaatatgagcacaatcctaggtcgagcgtgtgtaacccgagcttttctttttttttatacccgtattatgcgcgggcatgcatatttatactaaaactctggcgaactctgggtacctttcgcaggcgaagattccgagaagtgcagcccgccaaacggtgtccataaaaacaaatttaattgcaagctgtcacacacacacgatggagggagttgtggattggcatcgcggtctgcctttttttcttgaattttttttttttttttttttttttttttgagtcaaatagccagggagtcagggagctggagctgaagctggagatggagtagaggtcagacctctggcccagacaaatgatgtaagctatggataaggcaagtggccatgttgacactgacgcactggtgaaaactgaacgcagaccaaagagccaagagccaagagccatgaggcgagcgaagccaagtcagccaacatctaatatttgccgtccatctggctgacattcggaattggacaggcagctaatgaataccttacacatgtcggcaaacaaaacgcaaataatgtcaatggtctggcagatccaactcgtcatgagtcaggtcaaaaaaaaaaaaaaaaactggatggcatgggataagtgtagtggagtttagatgctgataatgatgatgatgatggtgaggcgatgaggctacagcagatgtgccagttttcagctgctgctgctattgctgccactgccagtgtttgtcaaagacttttctacacgatttggccgcgtttttaccaattggcattgaagcaattaacatcagcatgcagctggattttcaaactaagtctctcttggcttaaactagaacgggaatcgcactcaacaactctaagtggccgccagatacgagtgtgttctccgctgtcgatttagatttcacagatttctgatatttccaggaatcgtgtggcagttggaaccttttttgcgaggcaacagcaacaacaactgcgcaaaactaaaagttcacatcataaattttaaagtgtcacgaatctgtctgggaggaaaatgaaaaaaaaaagaaaaaatcattcatatgcctgcagttatcgtgccctctctttccatccccatccccacccccactctcaccctctcactctctcgtcaaagggaagccgcacacagtccctcgaaagacgtgccgctagaagcagccccacaaacattggcagccagcctgagtggaattctaatttacactgaacagcaggcgaaaaagcgctgttattaggagttcattgggttttcccagaccctttcccatgacctttgagatgaacttgttaacggaatgtcgttaatacacttttaacgcgcggtgtggatatgaagagttaaaagctctcatccttttaaaaagtttttatatattgggtctttgaaaagtggcagaataataaaacttattaaattcggttaattgtttctctgttaccacgccattatctttcgatcagccttatcttatatcctttaaaatcctcaatcgctcttgaccctattgtttgagcaccagttgagagtaccgattttccccgccttatttgtttactccataaaaattccccccccttcactcaaagatctggggcagatagccaaccctgctggacagtgtttatcgacttttagcccagacttttgttctattttctaaggcaacgttcttgcctcacaatgcaagtgctgttcgatgttgccgttggttttttctgctgctgctgcatgtttccttttagccaaagtggcaaattgactgacatgcattcgggccgaaacgaaactcttgcgggagtgaagaaaaggggagtgcaggtgaagcgagactcgaatagtgggaacagaacagaaaaccaccgacttaaaggcttaaatgcagctccgcttcattcccagcgccatttggctgactagctggcgcatttgcatatcggctcgtaaatatggatgggccgacgggtctgccgggtctgtgagtctatgaacttattgccagacaaattgaaatgcctgattcggctgcagatgctgattctggccgggggattcgagacgggggtagcatggagtactcgtactggttctctgcgattgcctacagctgctcgttgagcccattcccatgcgttactttgacactaaaccgatgaggctgattctaattcggaatcagatatggaaattgagatatgcacacagcgaaaaatgcgcaatgtgcgatgatatcatacaatataagtcttagaatggttgaaatgccaagtgaatatggatattagcttcattggcatgccaacttttaagtgctcggagtatatttgtgcaatttgttcccagtgtagatcgtaggaacccccactcacctgcgctcgggaattgtgctgtagtagaggagcagcgtggccatttcatagcaattgatgccggcggacgccacacaagccgcgtccacagtcacaagtgggtcgccttggagggtgcgtgtgcctgcaaagaaacgaagatatgtatagtacgagcgtagttaagagatgggccataaaagatctccagatgtgggaaatcgcactgggacgcggtctcaattggtgcaccctgggtggccacttcgccatcgataatgtgcgaaaaagcgtgagcacattaattgaaaagcgccaactttatgcacttccaccaaccgcttttcgccaaacactaggaaaatcgccagcggcaaattgcctggcggggcgttacaaaagcgattccaatttataagcaaattttccgttgatttcggcccagtgaaagtctagaattagttgaggatcgggctggcggagcggcgaaaatggaaagtttgtcacctatgtgcaccgcatgcggatggatgctcacctggtaaatagacgccactggtcagcagtttctcaggcagctcggcaattgagctggacggcagtagctctgtctcgcaggtctctgcagagagaaaaaatatattaacatataaattcattataatataaaaataaattcaaaataaaacacttagaaagaaaacttttgccaactacataataacatttatagagcggaaaaaaaaatggatctttaatattaaatatttaaacactaacttgtttttaagtttgagtaaaaacttggtacacatttttctccgtgttaaattagttatcagaaaagacttgcgaaaactcacacgaaagtaaagtgcctaaaaatatgggttaattgtattttaaatgctcgacggaaccttgaaaactggtccaggatctgcgcggtttgcataataatgtcatttgattaatttccaactgccgaacggcgcacaccagcactcaatctctaggaagggggcgtggtcggagtcgcagccgccaagccgtggctcggcttcgttgccccaaaaactagttcgtcataaattgtgttcagctctgccaacggggactttcgcatgcgacaaatatttcccaat

SEQ ID NO: 10235 - DNA, 1235 bp, DROSOPHILA
gcacacgcaccctccaaggcgacccacttgtgactgtggacgcggcttgtgtggcgtccgccggcatcaattgctatgaaatggccacgctgctcctctactacagcacaattcccgagcgcagtatgggctgctacggaattgaaatgccaggcgatctttatagcctgtgcgcactgtgcggcatcattaagccgcggactgagacccaaagactccgctgtggcacgccaccatcagcggatcttggcccctcctgccccttcaccaccccggcaacacccggaacgacagctacaatcaatggccataaaagcactgagcagcagcagcagcagcaacagcagcagcaacagcagaaacaacaacccgcccaacagacatttaccattttaattgccatcgagaagtctcaacatttatgcgtaatcgacttaatttgccaaagtctcagactcttggccaagcaaattggcaattgtgaaattttggccgtttgtcccgattcgagtttgctgcaattgtgcaatgggcagcagcaacagaagctgcagcagcagcagcagcagaacaataacagtgatcacccggagccttcgtcgccgtcgccagtggatttggttaaattcattagcgtggaccaagtcacgacaagtgttgcgccatcgcagctgcccgctggattgctgccctccgttcccgcgctgtccacgctgcccgggattagccagcgtcatcacgatgccaccaagtggcgggagtttttcgcccaactggaggccttccaacgccaatgctcgacggccggcggtcgtttggtgagcgccctcagcgaaatacgcgccgccgatcttcagggtttgcccacgcgccgccaactttatggccagcatcgcgccctcagtcgtgcgctgatggattcgcagctacacagtctgcgcaagatgggtgctggccagttggccaggctgcaggatttggccagggccatcacctctgctcccggctcgccgcgcatgacgtcacagccgcaatcatcctcatcttcctcttcgggggcattcctgaacgtagatgccgcctgcaagctgcgcaaggtgacgctcctcttcaacgaggtggatcgggcggcccaacgcctggaacagctgactgagcagcgcagggagcgattgaggcaactgacccggcaacgggccctcgaggatgagatcagtgagctaagaaagttctag

SEQ ID NO: 10236 - protein, 362 aa, DROSOPHILA
MPGDLYSLCALCGIIKPRTETQRLRCGTPPSADLGPSCPFTTPATPGTTATINGHKSTEQQQQQQQQQQQQKQQPAQQTFTILIAIEKSQHLCVIDLICQSLRLLAKQIGNCEILAVCPDSSLLQLCNGQQQQKLQQQQQQNNNSDHPEPSSPSPVDLVKFISVDQVTTSVAPSQLPAGLLPSVPALSTLPGISQRHHDATKWREFFAQLEAFQRQCSTAGGRLVSALSEIRAADLQGLPTRRQLYGQHRALSRALMDSQLHSLRKMGAGQLARLQDLARAITSAPGSPRMTSQPQSSSSSSSGAFLNVDAACKLRKVTLLFNEVDRAAQRLEQLTEQRRERLRQLTRQRALEDEISELRKF

SEQ ID NO: 10237 - DNA, 3512 bp, DROSOPHILA
acacgttgaattccgccccggcgtaaaagaagcgaattttgagaaatgtgtatttaattaatgccccgcataaataatgccaatgccagcggatttggatcaccaccgcctcccatctcataaactgtcaggcgttgttaacgtccgtcaggtatcctgatttatcgttatataagaggagcagaccacatataccctcgatgtttaccattaaagctgcaccgatgcaacggagatctctggctggctggctgactggctgactggctagctggttggctggttggctggcactggctctggccccagtctaattgtttatgaacgatatgtttggtttttatgagctgcccggcccggctcgtctaaaataaaatttttggttaaactaccgactaaaaatcgaggcgaacaagcgataacaaccgaaataaatggctatattgcccgtgaagcgagccacaaaattcgaaataaaagagcgcgatctttgggctaacgatcggatcgcggcgatacggctccgtctgctgctggccagggcagagcacagactgactggctactagccaccagtggttgtcgctcgccagccttttccttcgcctttctttttcggggagcgcgacgagccaacaaaaagaaaaacaatggcagccattgttagccagcataaacataaaatcgttctgcatacatatgtacgccacttgggagcggattcggacgtgggatttgggcagggcggagctgccacctgcagcaaaccgacgaaggaattactcgagcagacgtcatcgttgcttaattacgccataaacatgaactcaactccgccgatgaatccgccgctgctgcggcagtgtgcgcacaaatttagaatttagatggatttaggcatctcttttttaatggtacacagagcatggtacatgggcagctatttttatatcttcgctagccacgccagccgaccgccacaattccgccccgttttaccattaaacgttgacatcgcttttatgaatgcctttggctatctgttggcatgccattagcgcatcgtaaagcccgaaaaggggggcaacgactgcgaggagcatgacgtggtgtgaataacatctaaccacttgttggccagccagtggtcatggctcgtttgccaatttctcatgggtagacgtatgctgtatgctaggtcatcgaaactattactgcctgtcagagatgcgtagcgctcccatgtccaggttgagttcggtgaggatgtcgttgggcgcggagccctgcatagtcaggccagcgatcacctgttgcgcctccggacagttgatgcaggcgtttcggatggccaagatgctccactcccgcatcactgagggataaaaagtaaaatgttaagctatgctttagcttgtttcaaatatgtttcttacatgggtttcgagcatccatcgttgtgcattcaagaagcgtgggcagcagctgtgtgtccaggcagtatcccttgttggccttgttgtcatacagaagattggcggagcagcgtacgagtaacgttttgagttcataggacacctttttttcgtagcccgcatcaatgtccgaagtgagtgccacctcttccagcttcgtcatgggcttatcaaggccgcctccatccggttccttgccagcagacacaatgcatctcagcaggctgctcacgttgatgaacagcgattggtcgttgggatatacattagcatacttctctgagccgcttgcacttgcgatgatgcgcagtaaggtgtgaacttcacgtggatgaagctcatgcttaagctttatcgtttcacgcaggaggcaatcggatttcatgcggaattctttagcaaagtgctgcagtaaaaacagcgtaacatcaccattgggactgttttccctcagatagtgggccacgtagtcgaggaaagcaacacgatcttcagtctccagcttttggtaacaagctacgcaggctcgtccattctggacaatgaagtgctccaggaagaagtgtagatactcgaagttataggtgcactgggcttcgtttagagctcgccacagttgcagacaagttttaagtgccaccaagtcggtgataagaccatgaccactgatatatatgttgtacatgatcatgaggagcacattattcgaacttcccaagggagaagcgtaagcttgttcggcgatcttcaagccatgctgactccagataagtgcttgggtggtctcattgttaaccacactattggctagcacctgcagagatagattgtgtataagccgatgctccgtgcgcatcactggactgaaagccacagcatttaaaaagctggaaaactccgcactttcagccaaagtctcttggttttccctgccttttgtgagcaaaagtcgtaggttcttgagtaatgccgagatttcctcctcattttcggttatgctcaggcgcacgagcttgtgtaccagctctttagtttcgcttttctggggtaaatcatttatttaaataaatctcgcgagaataacaataatatttaccacatgctccattttcgatagacccacagctgtttgccgccaagtgtaatcgattggccagtgcagcgctagccaacactgtctcaattgggtcaacggagtgtggccacactgcgctccacaaaagaaaacaaaagaaaagggagaaaagcaatttcgttttgggaaattttctaagtcatgtagcaaacgaaacgctacagcgaaatcaagataaacaaagcaatgtcactgcgtgcgcttcggaaaagagaaacaggcactggctacggcaacaataacaaccatttagcagcaccagcaagaacttcacaagcaacgctctttaagaaggccagcacagcaataacgtcaccgaagaaatcgttgctcaaaactgggaactccgtctgcggattggacaaacggagtcagttccgggagcagaagctactcggtcgcaagtgccactcgagtcctgacctacgacaaatcggaaaataccaaaacaacagcctgttgcgcagcaaatcggagggggatgttagtttaatcctggccagtaactccggtgctccattgacggtggcaaacgccaagtcagaggtttgcctgcaaaggattagctctcacagttacgaacaatctccgagaacgccgataaacaaaagcgaaatgctcggcggtgcacgttcccatcgcgacctgacgcagtcgtcctatggcaaccaggcaggtggacattccgtggatttggaatccaggtctagaactcctcggcggatgagcgagtgcagcttgggctacagccaatccagctcccggcacactggctccaactctatgttcgccagccagatgactctctcctcgggatcggtggtgccgcccgtggaccccaacgctgtgctaagggtgcccattattggttacgaggttatggaggaacgtgcgcgtttcac

SEQ ID NO: 10238 - DNA, 1451 bp, DROSOPHILA
cgaaactaaagagctggtacacaagctcgtgcgcctgagcataaccgaaaatgaggaggaaatctcggcattactcaagaacctacgacttttgctcacaaaaggcagggaaaaccaagagactttggctgaaagtgcggagttttccagctttttaaatgctgtggctttcagtccagtgatgcgcacggagcatcggcttatacacaatctatctctgcaggtgctagccaatagtgtggttaacaatgagaccacccaagcacttatctggagtcagcatggcttgaagatcgccgaacaagcttacgcttctcccttgggaagttcgaataatgtgctcctcatgatcatgtacaacatatatatcagtggtcatggtcttatcaccgacttggtggcacttaaaacttgtctgcaactgtggcgagctctaaacgaagcccagtgcacctataacttcgagtatctacacttcttcctggagcacttcattgtccagaatggacgagcctgcgtagcttgttaccaaaagctggagactgaagatcgtgttgctttcctcgactacgtggcccactatctgagggaaaacagtcccaatggtgatgttacgctgtttttactgcagcactttgctaaagaattccgcatgaaatccgattgcctcctgcgtgaaacgataaagcttaagcatgagcttcatccacgtgaagttcacaccttactgcgcatcatcgcaagtgcaagcggctcagagaagtatgctaatgtatatcccaacgaccaatcgctgttcatcaacgtgagcagcctgctgagatgcattgtgtctgctggcaaggaaccggatggaggcggccttgataagcccatgacgaagctggaagaggtggcactcacttcggacattgatgcgggctacgaaaaaaaggtgtcctatgaactcaaaacgttactcgtacgctgctccgccaatcttctgtatgacaacaaggccaacaagggatactgcctggacacacagctgctgcccacgcttcttgaatgcacaacgatggatgctcgaaacccattgatgcgggagtggagcatcttggccatccgaaacgcctgcatcaactgtccggaggcgcaacaggtgatcgctggcctgactatgcagggctccgcgcccaacgacatcctcaccgaactcaacctggacatgggagcgctacgcatctctgacaggcagtaatagtttcgatgacctagcatacagcatacgtctacccatgagaaattggcaaacgagccatgaccactggctggccaacaagtggttagatgttattcacaccacgtcatgctcctcgcagtcgttgccccccttttcgggctttacgatgcgctaatggcatgccaacagatagccaaaggcattcataaaagcgatgtcaacgtttaat

SEQ ID NO: 10239 - protein, 352 aa, DROSOPHILA
MRTEHRLIHNLSLQVLANSVVNNETTQALIWSQHGLKIAEQAYASPLGSSNNVLLMIMYNIYISGHGLITDLVALKTCLQLWRALNEAQCTYNFEYLHFFLEHFIVQNGRACVACYQKLETEDRVAFLDYVAHYLRENSPNGDVTLFLLQHFAKEFRMKSDCLLRETIKLKHELHPREVHTLLRIIASASGSEKYANVYPNDQSLFINVSSLLRCIVSAGKEPDGGGLDKPMTKLEEVALTSDIDAGYEKKVSYELKTLLVRCSANLLYDNKANKGYCLDTQLLPTLLECTTMDARNPLMREWSILAIRNACINCPEAQQVIAGLTMQGSAPNDILTELNLDMGALRISDRQ

SEQ ID NO: 10240 - DNA, 2268 bp, DROSOPHILA
gtactcatattgccgaaaggaagccaaaaaacttaatgagcccccatccgaatgaatcaatgggcttgcataaattaagctgatgacaacacacaaaatgcaaacaaattcgccaaatgtatttatgtatatatatatatatatggtgaatccgcattcagtacgagtatagtatatattccctatattcgtgtaggcatatacatatgtatgtacaacgagtggggcgtgtttaaagtcttttcgaatacgcgcccatttccaagaattgcaaactcagactggcgagaacaacaatgaggcagcaacagcagcagcagcaacagcagcagcagcagcagctgcaacagcaacagcagcaccccaaaaacctgccttaaagtgaagcgagatttacagcatgtacgacaacaatttgcaggcattgtgtgaaaggggcagctcccagaagggggcgtggcagcgccgaaacgtgacccagacaaagtttgcgaaattgtctaaaaaaaaaaaaagggacagcggccacaacaacagggtacaacattatttaatgcttttttaattagatgcagtcagagccgcgttcgctgcattttaaaacagctcgcttatggttatgaatccctatatatgtatataccataacgtacatatactttcatatcagtttattatacagtcgctttgatctgcatacaaattcaaattacaaatcaatttcgcatttcgcgtttcaagtttaatttggttagctcacttcgcagattgcgattcgcaaaagctgttttttatcctcataacttttgtgctgagccagatgaatttgcatatgataaattatttattgccacgaaaatatactttggtctaacgcccagcaaacttttcagactctttgcccagtgatttgcatagaaagacattctggctcttttcgatttcactcgaccatacccactaatcctttctgctgtcccccaaaaagatggatactcactttggaactgtttggcattcgtctcgaggactccgcgcaggctgctggtgtgatgatgaagcagttgctcgaacattccggcggctttgtcccgcagctccagctccgtggcattgttgcagcagtttccgccacaaatggcgcttcatgatttcggtgtacagttgatggatcatcatacgcgatgaaggcaccatacgggtataaaccttcgaaaagagcgagtgggtcatgttctccgaaatctgcgccaattccaggacgtgacctgccgcaatgaaatcagagagaaaagcatccatgaaaatattgttatggttattgttagtcctagcgaaatttaatcactttgccgccaaaagtttcccctgctgggatttgctgggaacttttgccctaatggactggctgggacttccacttccgcccacttggaaaaaagaattgttgccattgctctttatttctgggcatgagtaagcttttagttaatgaaatacaatttaatatggctgttatccttgccaggtaaaatgaaatatgaataaagttgctgaaatacaagctgaaatctacttaaaaaagtgattccattactggcattattaaaccccaaaaaaggttaagttagcaatttgttgctaaaaaaacaagtaaaataaataccagtaaaagtttttactttaataaggctttaataagttctataaatatattttctaccaataaatgaatactagtttttgctgtattggaatcagatgttctttattagactccccttttaattaccatttatcgactgctatctataatctgtcaatcatccggcgattcgggcggtacaggttgttaaattctctttatattcagacactaatcacagagctgagcgtaagaaaaaccaaatgtgacacaacgttatctgtcaaggtgtcagcagcagttgtgcgaattgatttggatacacagattggctatcgatactcagatatacaaaggtaagctcggatacagatacactcctctggcagcctgtcattagcgcagattacaaatggccaaggccagatatcggcatctatatgctatagacgagtgagggagttatctgtatacaatcgggggaaactgtcaaatcggcgtgtgatttctcacacacacacacacacacacacacacacacatactgacccgccttcttttggcccctgacaaattctaaattgcaatatgctgtcttgtatatcgttttcaaacgaaagtgt

SEQ ID NO: 10241 - DNA, 3422 bp, DROSOPHILA
caatctgttcgggtttctcgtcgtggaaggttcgttgcgcgcgcggaaaaactgaaaagaaggcgagtgcatttcctcgacctgagaacgccggtggccaaggagctttgcaattaaatctattttcgccgacctaagtacacaaaacgtaggagaaaattaaaaagaagaaaaaaaaaacaaatctaatcgctggcaaatcaattgctaaggaattgagtactattcgttgttatgtcatggaaagtctctgaataagttaagaaaatacttgtgagaaatttagcgacctttcaaaactagaaagtagaaaagcaaaaagtgctagacacgcgctctctcttcgaccaccacccaccaccacccactatcgccatcccacgtttactaccacgtttattgctcacgcgtgtttttggggccttttgttttgtgcgctcgtgtttgtggccgtgtgtgccagtgtgtgtgtgtgcgtgttagccggcaagtgcatttgtgtgagtgtgtgtgtttgttgccgcgaacagctgttcacccagacagcatgcagaagtaaatacgaagaagtgctgcaaaatagagtaaataaaataaccggctaaaataaaaataagagaagcattcaaaggcaaatcaaatttagccccatcatccactgtgtctgcacacagaaatcacccatcaaaaatggcggccaggagcgtgcggctagcgcagcttttgctatttaccctgctctgcggcttcgtcggcctgtcagccgccaagcacctggacctggatggtatccaccaccaccagcaccacctgcacagcgccaccacgcaccacagacgtcgcctacagcgggactcgcgggcgaaggacgccgttgggggatcgacccaccagtgtgatgccgtcaagagctacttcgaatcgatcgacatcaagtcgagtgggacttacagcgaaaaaggcgccatttgtggcggaaactgctgcaacaatgccacggagctggagctgcgggacaaagccgccggaatgttcgagcaactgcttcatcatcacaccagcagcctgcgcggagtcctcgagacgaatgccaaacagttccaaagtcacgtcctggaattggcgcagatttcggagaacatgacccactcgctcttttcgaaggtttatacccgtatggtgccttcatcgcgtatgatgatccatcaactgtacaccgaaatcatgaaccatctgatttacacctccaactatacgaacagcaatggccaactgggcaggcgaggaattggcagtgtccagagcaacttggaggaggctgtcaggcacttctttgttcagttgttccccgtggcctaccaccagatggtccatctgtccaagaacaatttgggtgacttgcacgaggactacgttaactgcctgcagcacaacttcgacgagatgcatccattcggggacattccccagcaagtgcagtccaacttgggcaagagtgtccatatgtccaatgtcttcatgaatgccctgctccaggccgccgaggtcctcagcgaagcggatgccctttatggcgaacaactgacggacacgtgcaaactgcatctcctcaagatgcactactgccccaactgcaatggacaccattcaagttctaggagcgaaacgaaattgtgctacggctactgcaagaacgtaatgcgcggctgttcggcggaatatgccggactactggacagtccctggtcaggtgtagtcgactccctgaacaatctggtcaccacccatattctctcggacaccggcatcattaatgtcatcaaacacctgcagacttatttctctgaggcaatcatggctgccatgcacaatgggcctgaactggaaaaaaaggtaaagaagacatgtggcacgcccagcctgacgccctattcgtccggagaaccggatgcgcggcctccgccccacaagaacaacgtaaagtgggccactgacccggatccgggcatggtcctcttcctgtccaccatcgacaagagcaaggagttctacacgaccatcgtggacaacttctgcgatgagcaacagcactctcgtgacgatcactcctgctggtcaggcgatcgtttcggggactacactcagctgctgattaatccgggcactgatagccagcgatataatcccgaggtgcccttcaatgcgaaggctcagaccggcaagctgaacgagctggtcgacaagctcttcaagattcgcaagagcattggagctgcggcaccttccaacagcatacaggcgacgcacgacatccagaatgatatgggtgagggctccggcggcggagaaggtcagatcggcgacgatgaggaggagtatggaggcgcacatggttccggagatggttccggcgatggaccccatacgcccatcgaggaatccgaaggcaccaccaccaacgaagtggagtcgcgtgacagcggcaagaccagtgggtccaacccactggaaggcaccgcgacgtggatgctcctcactctagtcacaatgctctttagtagctgtagttaaggatgctgccccagcccaagggattgaacacaaaaaacgcaatgccccccactgtgcgagggcaatgaatgatgtaaccagaagaagagcaacagcagatgcacacgaatcgagttaaatcattaattaataactattatcattattattattatttgtgtaattcttaagttgttacaagtaatttataggccctaagcgcattcatctagcaatcgactaacaactttacaaaccagaagcgaaccgtgaaacccttgaagtgcacctctccttctagcttttccaaatttgatgctcatcgaacttccatgccgaatccaactagacttgtgtgccatataaatgcgttggatatttgcatacgaatcgagcaattgctaaacacaactaactaaaaacgaaaattaaactaaataggctcgcaatcaagcagaatcccttttccatagagtgtgcagtttgttcagatacatgttaatatatatagcgtacagtacacaaagctcaatgttcaaagcaagttgttccttttcggtgtaattacacaagtaaacagatctaaaatcagaggcgtggcaccacattcaattgctaggttttttgggggcgatcacaatatattatatacgtaaaggatataaatctgttagctgtagctcagtgaatgttaaactaaaatgaaattattgttgtctacacctttcgaactgaacgaatgcgaacaattttgaaattgatcaattgggtaatcgaaatgcgaaatgcatacgaatggaatttagttgagtaaacgcacggaaaaactagaagacttacagctttatacgcatacaaaaaaaaaaaaaaaa

SEQ ID NO: 10242 - protein, 626 aa, DROSOPHILA
MAARSVRLAQLLLFTLLCGFVGLSAAKHLDLDGIHHHQHHLHSATTHHRRRLQRDSRAKDAVGGSTHQCDAVKSYFESIDIKSSGTYSEKGAICGGNCCNNATELELRDKAAGMFEQLLHHHTSSLRGVLETNAKQFQSHVLELAQISENMTHSLFSKVYTRMVPSSRMMIHQLYTEIMNHLIYTSNYTNSNGQLGRRGIGSVQSNLEEAVRHFFVQLFPVAYHQMVHLSKNNLGDLHEDYVNCLQHNFDEMHPFGDIPQQVQSNLGKSVHMSNVFMNALLQAAEVLSEADALYGEQLTDTCKLHLLKMHYCPNCNGHHSSSRSETKLCYGYCKNVMRGCSAEYAGLLDSPWSGVVDSLNNLVTTHILSDTGIINVIKHLQTYFSEAIMAAMHNGPELEKKVKKTCGTPSLTPYSSGEPDARPPPHKNNVKWATDPDPGMVLFLSTIDKSKEFYTTIVDNFCDEQQHSRDDHSCWSGDRFGDYTQLLINPGTDSQRYNPEVPFNAKAQTGKLNELVDKLFKIRKSIGAAAPSNSIQATHDIQNDMGEGSGGGEGQIGDDEEEYGGAHGSGDGSGDGPHTPIEESEGTTTNEVESRDSGKTSGSNPLEGTATWMLLTLVTMLFSSCS

SEQ ID NO: 10243 - DNA, 6318 bp, DROSOPHILA
attaatcgcacgagggaaaaattagtttgtctgtaatcacagaataccgaaaggattagagtaaaatgtttgcaagctacttttttttgtagtttaatcgcattttgcaatttgaaaatcgacaaatcgcagcattttaattatttttactttgaaataaacgtaattaatgggcaatcgaaaaagggaaattgcttcttgcaaaatgagctctggaatatatttttccttttaaaaataacgcagccatgtatttatattattaaatataatttaggcaaaatatgattgccttaattataatattagcttttctaagacccattgactaatccttctttttgatttttttgttcaattttcttgcagcaagcggcgttaaacgagacacaaaacaagttcgacaaggagacgcggcaaatgcattacgttataatttcattaaggacaacagcctttctctgccgccagtgaaacaacgtagccgggagataaaagagaggttggagaagaaagaagagagctggggaaaggcgtgcggagaaagtcagaaagccgcaaaaggcgacaatagcccccgagcccattgcctacttctgagcgctgtcaagcgcgaatcaagagcctggcatttttatgaaattaatacaaaggacgttgaaggagtagaggctgagccgagtggaagcggaagtagcagccatgacaaaagcaccagcgacaggacaatgatgggccgcactccgatagcgattaaagtggaaggagaagcgctgcttttatggcccgacactgctcgagtagacgtgacagcgtccgatcggctaataatatttacccgcggaaaaagcccgactgcataatttgacatgccaacgtgagccagctggcgaaaattgtttatccaagtgctgcacaggcagagccaagaaaacgcaagtacgaaacatagaaggatctttgaacaaaggacttagcccagcaggaggcacttgagacaatgagtggtctgccaatctggataccgctccttgcacttctggccataactgccgcctgtccgccggaggtgtgtgtatgcaaatggaaggggggcaagcagacggtggagtgcggcggccagcagctctccaatctaccggagggcatggatccgggcacccaggtcctcaactttagcggcaatgcgctgcaggtactgcaatcggagcggtttctacgtatggatctgctaaacctgcagaagatttatctgtcacggaatcagttgatccggatacacgagaaggccttcagggggctgacgaatctggtcgagctggatctcagcgagaatgcgctgcagaatgtgccaagcgaaacgtttcaggactacagctctctaatgcgcctttcgttaagtggaaatcctatcagggagttaaagacatccgcctttcggcacttgtcttttctcacgacactagagctgtccaactgccaggtggagcggatcgagaatgaggccttcgtgggcatggacaacctggagtggctgcgactggacggcaatcggattgggttcatccagggcacccacatcctgcccaagtcgctgcacggcatcagcctgcacagcaatcggtggaactgcgactgccgccttctagacatccacttctggctggtcaactataacacgcctctggcggaggaacccaaatgtatggaaccggcgaggctgaaaggtcaggtgatcaagagcctgcagcgggagcagctggcctgtctgccggaggttagtccccagtcgagttatacggaggtgagtgagggcaggaacatgtccatcacctgcctggtcagggccatcccggagccgaaggtcctttggctgttcaatggccaggtgatgagcaacgacagcctgatggacaacctgcacatgtactactatatcgacgagacgatcggagtaagcggcgccgaggagaagcgcagcgagatcttcatctacaacgttggtgccgaggataatggcaccttctcctgtgtgggccagaacatagctggcaccaccttcagtaactacaccctgagagtcataatcaaggagccgccggtggtgaatgaggtctccttccccagggattacatgaactacattgtggccagcagtgccggaggcggcattatcttcgtggtactcctctgcaccatagtggtcaagtgcaagaagacctcagagccggccaagcagcgcaagaagtgcgatcaggtgacgagtattgccggtggcactgactcctcgacggggagcacccaggacacgggcatgggcatgatgaagtgcgcctcgatactgaatgatggcggtgatagtatgaacggaaacccaggacttctactgggcgataccttgacacccaccaaggcggcgaatggagcagctggcggtggcattattttgggcaatcagatgaagcagaacctactcctctacgccactccgaactccgcccagcagcagctgcagctgaatgtcaacctgatgggcactggaccgggatcaccgccgttgctcctgagcaatggccacggcttggcggcagcctactgctctcctccagcttcgctgcggaactaccaagagaaaaatccggacttggtcaacgatgcggagagtgtcaagcacaagcttaagacggcggtaagtctggacggagccggggagtacgagacgcagagcgactgtggtcagtacgagggctgctatcagctggcggccgctccacatccgcatcagggacaccagcaccctcatccgggacatccgctgatgggacgttttgcccaggcgatgaccactttgccgcgcggcatgcaactgaagccggctccccatcaagttgatgtccacctgaatccggtgtgcttcctgggccaagatggatccttcgcatacgattacagcagtgcccatatggtgcagcagccacctcagcaacagcagcagcagcaacaggtgcagcctgccaataacttctatcgcacgttgccacacaataggttgcacaaacagcagcaatttcaggcggctgcggcggcaggcggaaatgtcggtgtgggtggcaatcccacactgcgctacagcctcgaggccgagttcatccagaggggtccgacggtgagctacgagaagtaccagctgcccaatgtgcgcttcacagcggagggttatcctcagcagcagcagcagcaacagcagcaacttcagcagcagcaacagttgcagctccagcagcagcatcagttcccctcaccgccagagggctacaaaagcgatttggcggtgatgccggcgccgtttcagcaatggcccagctgtttgcccggctaccgattcgcccagtcacccaccagcctgccagcggttgcaactccaccaccagccgcagtggtggcaacaccaccaccgcccacatcagcagtaagcacacaatccacggccacatccaccattccggagctggatgaaagcgaggcgagttcgccgcgcctcgaggaagccgccgggtctgcagcgccacctgccggtgaggaggagagttcggacaccgcaaaactcaaacagcttaatggccccttggccgacagtcccgacgagggatacgtgggcgatggccaggaaaccagcgacatttgacccagccagcagccaactgccagggatgaagcggccttagacgattcagtggctctgtaaatggccaggctgatcaccaaaaccactcatagcctaagttcacccttcacttgtttccgtcccgctgattttttacttcacttacattttcccttttctgtttgctgacttgccccaagaaaaaaggaagcaaaacaaaaaaaggcagacccaagtttaacctaataattggctgaaagagagagctccgaatgcgagtccgaaaagtagaagggccagaaaaccaaataaagggagagcaggaaccggacctcttcagcaagccgatgttcaaatgcccagtgtaaaaggatccagtttcagttagttaatgggaatgaaggaaaagttcacgtcaggtgtaggaagttttacctcaacaatatattttttgtaaattgcttctgatcgaaagttgagtttcaaacaagaagtgttatagatcaaataaatcaatataagaggtcaaattttgatattcaaaccatttcaatttgtgactttagttacagttgcatgaagtgagaacccacaaaatatcatgacttttcctctggactctttgcgtttagagtatttggcagaacaataggcggacctaacctaataaagccgaaaaacaaagacgccgctaaacaaaagcctcttgtcgttgtttgtttctgtttgctgcgtgcttcgagtggcaagctggcagcattttatttccgctgatgtaattgaaaaactttttcatttaatataaagttttcagcagcttccccgcagcacaatggcaagaaagcgaggaaagaaaaagcaaggggacgcaaagaaatcccaggcctagaagactactagacatgtgggggggttcctatgtgggctatgtgtgctgattgagttgttgtattctcgaaggcgttgttagttgacaatcgacgaggaagtcccatccacccctttctgtgcatccacttcacgaggttccgagtcggtggctcacttcagagccaagtggcatgtgttttcgccatggcgacacctgctctccgtggcacaaaggactccaactcgaggacccggctgttgaactgttgagcctttcaagggaaaggaccaagccgagaattccggccgaaaatcgcgtagtgtgctctagtttatgaaattttaattcgggccacatccgctccagagttgcatttaaataatttatcgcgtttattttccatagaactttcttcgagtctgaaacaaacctttgtccttcaccctacaccccacactcactttagaatttgattgtcccgccttaagtttgttgtattggatcaaacagacatcaacacgagtgtttccgggtatcgttaaagtagatatcgtaaattagatcggctaacattgtaagaactaactaaatttaggataaccccgtttgagacttgtatgtaaatgtagccatagaaatcgtttaagcagacccctagctttcccttttaacgtaaaatttatgtaaagtgttcaagacttttccactgtaacataaatcgaagaaaaatggagaaaagcggaaatgcttggaaaagtattttgaagaaacaaaaaagaaaaacaattagcaatagctaaatgcatatgagggagtgagggcggaagcaatcatttaagcacaatatggaatattgtaaattgcataaataaatcattagacttaagaacaaggcaaacacactcgtactcgaaatgatttgtgtatgtagcgaatgactaaattttattttcaccaagtgagttagttggcaaatgcaccaaaaggaatatagaagcagaaactaaatttaaaaaaccgaaaatacaacagaaacacattttagcctagcaaactgtttaaatctcaacccaaacacagacacactcaaggtacatatattaaacaaaagaattgcctgctggcagaataattttaaaatattatatggcatacactacaatataaagagaatgtttagcataagttaatggttaggcaaagcagaacatacacgcataaaccgaataaaaggcccataaacggtaacacagacaaaaattcagaaggtctatgggaagacacacaatctagttataaattaattctctaaggtaaattaaaatcgaaatgcataaagataataagagaagcaaagtgtataaaaggataagagagaaattaaaccgaataaaacgcattaaactgaagaatttaataaaaactaaattatgtcgctttttatttaagccaaatggacgagtgccgcactgccaacaaaggggacgcaaacaatttcagcgattgaatattaaatagatggagatggatccttttccccttttttccaccaggataatgccggactaacgaagaatggcgagggaaatgcaaatgcgccgctaagtaggcaacgcaaaaacgtccatttgaaaatggagggaatgcttagctagatgtgttgaagtatagcaaagaaattaaatcagaaatgaacgaggtggcggatgaaaaatgcacacaaatagccttttgttgattaaatgctattttaagcttttaaatgcaaaattgaaataatttg

SEQ ID NO: 10244 - DNA, 4318 bp, DROSOPHILA
atgagtggtctgccaatctggataccgctccttgcacttctggccataactgccgcctgtccgccggaggtgtgtgtatgcaaatggaaggggggcaagcagacggtggagtgcggcggccagcagctctccaatctaccggagggcatggatccgggcacccaggtcctcaactttagcggcaatgcgctgcaggtactgcaatcggagcggtttctacgtatggatctgctaaacctgcagaagatttatctgtcacggaatcagttgatccggatacacgagaaggccttcagggggctgacgaatctggtcgagctggatctcagcgagaatgcgctgcagaatgtgccaagcgaaacgtttcaggactacagctctctaatgcgcctttcgttaagtggaaatcctatcagggagttaaagacatccgcctttcggcacttgtcttttctcacgacactagagctgtccaactgccaggtggagcggatcgagaatgaggccttcgtgggcatggacaacctggagtggctgcgactggacggcaatcggattgggttcatccagggcacccacatcctgcccaagtcgctgcacggcatcagcctgcacagcaatcggtggaactgcgactgccgccttctagacatccacttctggctggtcaactataacacgcctctggcggaggaacccaaatgtatggaaccggcgaggctgaaaggtcaggtgatcaagagcctgcagcgggagcagctggcctgtctgccggaggttagtccccagtcgagttatacggaggtgagtgagggcaggaacatgtccatcacctgcctggtcagggccatcccggagccgaaggtcctttggctgttcaatggccaggtgatgagcaacgacagcctgatggacaacctgcacatgtactactatatcgacgagacgatcggagtaagcggcgccgaggagaagcgcagcgagatcttcatctacaacgttggtgccgaggataatggcaccttctcctgtgtgggccagaacatagctggcaccaccttcagtaactacaccctgagagtcataatcaaggagccgccggtggtgaatgaggtctccttccccagggattacatgaactacattgtggccagcagtgccggaggcggcattatcttcgtggtactcctctgcaccatagtggtcaagtgcaagaagacctcagagccggccaagcagcgcaagaagtgcgatcaggtgacgagtattgccggtggcactgactcctcgacggggagcacccaggacacgggcatgggcatgatgaagtgcgcctcgatactgaatgatggcggtgatagtatgaacggaaacccaggacttctactgggcgataccttgacacccaccaaggcggcgaatggagcagctggcggtggcattattttgggcaatcagatgaagcagaacctactcctctacgccactccgaactccgcccagcagcagctgcagctgaatgtcaacctgatgggcactggaccgggatcaccgccgttgctcctgagcaatggccacggcttggcggcagcctactgctctcctccagcttcgctgcggaactaccaagagaaaaatccggacttggtcaacgatgcggagagtgtcaagcacaagcttaagacggcggtaagtctggacggagccggggagtacgagacgcagagcgactgtggtcagtacgagggctgctatcagctggcggccgctccacatccgcatcagggacaccagcaccctcatccgggacatccgctgatgggacgttttgcccaggcgatgaccactttgccgcgcggcatgcaactgaagccggctccccatcaagttgatgtccacctgaatccggtgtgcttcctgggccaagatggatccttcgcatacgattacagcagtgcccatatggtgcagcagccacctcagcaacagcagcagcagcaacaggtgcagcctgccaataacttctatcgcacgttgccacacaataggttgcacaaacagcagcaatttcaggcggctgcggcggcaggcggaaatgtcggtgtgggtggcaatcccacactgcgctacagcctcgaggccgagttcatccagaggggtccgacggtgagctacgagaagtaccagctgcccaatgtgcgcttcacagcggagggttatcctcagcagcagcagcagcaacagcagcaacttcagcagcagcaacagttgcagctccagcagcagcatcagttcccctcaccgccagagggctacaaaagcgatttggcggtgatgccggcgccgtttcagcaatggcccagctgtttgcccggctaccgattcgcccagtcacccaccagcctgccagcggttgcaactccaccaccagccgcagtggtggcaacaccaccaccgcccacatcagcagtaagcacacaatccacggccacatccaccattccggagctggatgaaagcgaggcgagttcgccgcgcctcgaggaagccgccgggtctgcagcgccacctgccggtgaggaggagagttcggacaccgcaaaactcaaacagcttaatggccccttggccgacagtcccgacgagggatacgtgggcgatggccaggaaaccagcgacatttgacccagccagcagccaactgccagggatgaagcggccttagacgattcagtggctctgtaaatggccaggctgatcaccaaaaccactcatagcctaagttcacccttcacttgtttccgtcccgctgattttttacttcacttacattttcccttttctgtttgctgacttgccccaagaaaaaaggaagcaaaacaaaaaaaggcagacccaagtttaacctaataattggctgaaagagagagctccgaatgcgagtccgaaaagtagaagggccagaaaaccaaataaagggagagcaggaaccggacctcttcagcaagccgatgttcaaatgcccagtgtaaaaggatccagtttcagttagttaatgggaatgaaggaaaagttcacgtcaggtgtaggaagttttacctcaacaatatattttttgtaaattgcttctgatcgaaagttgagtttcaaacaagaagtgttatagatcaaataaatcaatataagaggtcaaattttgatattcaaaccatttcaatttgtgactttagttacagttgcatgaagtgagaacccacaaaatatcatgacttttcctctggactctttgcgtttagagtatttggcagaacaataggcggacctaacctaataaagccgaaaaacaaagacgccgctaaacaaaagcctcttgtcgttgtttgtttctgtttgctgcgtgcttcgagtggcaagctggcagcattttatttccgctgatgtaattgaaaaactttttcatttaatataaagttttcagcagcttccccgcagcacaatggcaagaaagcgaggaaagaaaaagcaaggggacgcaaagaaatcccaggcctagaagactactagacatgtgggggggttcctatgtgggctatgtgtgctgattgagttgttgtattctcgaaggcgttgttagttgacaatcgacgaggaagtcccatccacccctttctgtgcatccacttcacgaggttccgagtcggtggctcacttcagagccaagtggcatgtgttttcgccatggcgacacctgctctccgtggcacaaaggactccaactcgaggacccggctgttgaactgttgagcctttcaagggaaaggaccaagccgagaattccggccgaaaatcgcgtagtgtgctctagtttatgaaattttaattcgggccacatccgctccagagttgcatttaaataatttatcgcgtttattttccatagaactttcttcgagtctgaaacaaacctttgtccttcaccctacaccccacactcactttagaatttgattgtcccgccttaagtttgttgtattggatcaaacagacatcaacacgagtgtttccgggtatcgttaaagtagatatcgtaaattagatcggctaacattgtaagaactaactaaatttaggataaccccgtttgagacttgtatgtaaatgtagccatagaaatcgtttaagcagacccctagctttcccttttaacgtaaaatttatgtaaagtgttcaagacttttccactgtaacataaatcgaagaaaaatggagaaaagcggaaatgcttggaaaagtattttgaagaaacaaaaaagaaaaa

SEQ ID NO: 10245 - protein, 894 aa, DROSOPHILA
MSGLPIWIPLLALLAITAACPPEVCVCKWKGGKQTVECGGQQLSNLPEGMDPGTQVLNFSGNALQVLQSERFLRMDLLNLQKIYLSRNQLIRIHEKAFRGLTNLVELDLSENALQNVPSETFQDYSSLMRLSLSGNPIRELKTSAFRHLSFLTTLELSNCQVERIENEAFVGMDNLEWLRLDGNRIGFIQGTHILPKSLHGISLHSNRWNCDCRLLDIHFWLVNYNTPLAEEPKCMEPARLKGQVIKSLQREQLACLPEVSPQSSYTEVSEGRNMSITCLVRAIPEPKVLWLFNGQVMSNDSLMDNLHMYYYIDETIGVSGAEEKRSEIFIYNVGAEDNGTFSCVGQNIAGTTFSNYTLRVIIKEPPVVNEVSFPRDYMNYIVASSAGGGIIFVVLLCTIVVKCKKTSEPAKQRKKCDQVTSIAGGTDSSTGSTQDTGMGMMKCASILNDGGDSMNGNPGLLLGDTLTPTKAANGAAGGGIILGNQMKQNLLLYATPNSAQQQLQLNVNLMGTGPGSPPLLLSNGHGLAAAYCSPPASLRNYQEKNPDLVNDAESVKHKLKTAVSLDGAGEYETQSDCGQYEGCYQLAAAPHPHQGHQHPHPGHPLMGRFAQAMTTLPRGMQLKPAPHQVDVHLNPVCFLGQDGSFAYDYSSAHMVQQPPQQQQQQQQVQPANNFYRTLPHNRLHKQQQFQAAAAAGGNVGVGGNPTLRYSLEAEFIQRGPTVSYEKYQLPNVRFTAEGYPQQQQQQQQQLQQQQQLQLQQQHQFPSPPEGYKSDLAVMPAPFQQWPSCLPGYRFAQSPTSLPAVATPPPAAVVATPPPPTSAVSTQSTATSTIPELDESEASSPRLEEAAGSAAPPAGEEESSDTAKLKQLNGPLADSPDEGYVGDGQETSDI

SEQ ID NO: 10246 - DNA, 4153 bp, DROSOPHILA
tctgcaccaataatccgtgtctaataatcataagagatggaagtgcatcatactgctcattctgaatgtgtgaataattaagtgctgtggccttggcgggttaattattataatttttttttttactttccggttctttaaagtgttttgcttactcacccctgagagcgcgacagtaatcagtttttatttccagtgtgcgcctcaataacggatattctaatttggtttaaagctcgtaaattataaaccagacaaaattaagtgcacttcaatattatcaaggtcttgattttcgtagtttttactgattgttctgctacttgtagtgttaaaaaaaaaaattaatttataaccaaagccactaaaaatatgctaatttctgcaaatcacaaaattccgccgtggaagcaatcaaatgtttgttgatattatgaggtttgacattgatttgaactggtcaaaagcgatgggaattataatgaatcgggcgtatttaattggcattcagtattttatgcgaattaattagcatgttgtcaatggtaaaactgtgtcatatgtgtctgcatttttaatggcacgaatttcaatttcgaactctgttattatttacaatactttttatcatgaagaacttctttaagaaaatattttttttttctaattgtcactttctagggttaaatcttataggagaagagttgaagctatttaaatattaatttgtatattactataaagtagatattttcaaaaatttcaagcggcatcaaaataatgtattttgtacttatgtatgttgggttacctggggttaaagcttagacaaatataaagacaatgccaaagagagacctaactgtacttcatcgctacttctctggccgtctttttcccgcgagaacgcaagtaccgtttaagcttttctggactttcttctagagccgacgagagattttttcaaattttctatttaatccacagcagcagcagagtgatcaaaaggcgatcgaagcagccggcgaaatgggaagaacactggaaataaccggaagacagaatgataagagtctggagaagaatccggagcgcttcacgaagaatgtgacggagaaaggcgccgatcctgagaacggagacccggtgcgcaggcgcggccatgagaccagcgaactggaggcggctacgcatctcttcaagggcagcgtcggtgccggactcttcgccatgggcgattgcttcaagaacggcggattggcaggagcaaccatcctgctgcccatcattgcggtgatgtgcgtccactgcgagcgcatgctgatccgtggttccgtgctggccgtggagcgcacgcccggcgtggactttctcgactatccggaaacagtggagaagtgcttcgagcacgggccacgcccactgcgaaaaatgtcgcgcgtaatgaagctgatcgttgaaatgttcctctgcgtcacgcagtttggcttctgcgccatctactttgtcttcatcacggaaaatctgcaccaggtcctccagcagaacggcatcgttatcagcatgagcatggtgatgctgatcaccctgctaccggcgatgataccctcgctgatgaccaacctgaagtacatctcgcccgtgtcgctgtttgccaatgtggcgctgctcttcggcttgattgccaccctgaccatagccttctcggatggacccatgccgtccgttggcgacaggcacctcttcactggcggagctcagttggccctgttctttggtaccgctctgttctcttacgagggcatcgccctcatcctgccgctgcggaactcgatgcgccgaccggagaagtttagcacccggttcggagtgctcaactccacgatgttctttaccacggccctgttcatcttcaccggattcgtgagctatgtgcgatggggcgaggaggtagccggcagcataacgctaaatcttgtagtggaggaagtgtaagtagaatcaccaggttaagataatatgaaattacttgtaatgattttttacattttattttcgaatcgcctgttttgttattaatattattgatttcattgcagtttttcgcaggtggtgaaagtgatcgctgctttgggcgttttcctgggctaccccatccagttctttgtgatgattaagattttgtggcccccactaaagaggtctaataactgcactcaaaagtatcccattacctcgcaggtgtgcctccgtttctttatggtgatgatgacatgtaagtgggttgtaaattaaaaaaatatatatatatacaattggaaatggaatcactatattgatcaatatcaatgataatgtagtaatatccgttttaaatgatcatagctatagcttttacgctattcggaatatatttctatatgtgcttttccagttggcgttgcgctggtcgttcccaagctcaatctgttcatctcgctgatcggagcactgtgctccacctgtctggcttttgtgattccggtgctgatcgacttcgtgacgcgggcgcaggtgcccaaggcactgggtgtgtggtcctacatcaaaaacattctcatcctgacggtggccgtgctgggcatcgtcactggcacctaccagagcatcgtggagatcgtcaaggagtttaagtaggcttagagagctagcaagtatattttgtacataaataatgctgtcattccgcggaactatgtgaatgcgttgtcctgttctgatgtaagattaatttgtgtatttttccactcttttttttattattattttgttgatagttttaagctgtgcatattttttttttgtttgtatgtataaaaaaaatgtttatttggcacaaaaacgaaaggaggcataaaggaaaaacatgatctgcagctataacccattttaataattgattaccatagcaatagggctttgattgtgtgagagcctgcaaatgatcgttaaagccatatgtatgtaataaatgctattcatcgattttataaatatatatgtataaagtattaactagccttcagccaacaatgtttaacactaagttcttttacaaagtgaaaaatatgcgcttttgagagcgtataaatcaataaacataaatcaacaacgaatttaatacattcaaagcagtttattcgtaaattttggtggtaaatactctaagatcggcagtatattagtgagtcttttacattcccggtcccgaaagactcttctccatgaacttcttcttggcaaagcatatccaccacttgctcggctttccatccggagtatcaaagaccttttccagcaatctgtttccggtttcctggcgcaactgcaggaagtactgacgcatcagctccggatcctcgggcttggtgtatattccgttcagcggaaatcccgcatctccgggtatatcgaaccgcgagatggccagcgtatagagctcctgctgaccctgcgatttgcttgtgcatcgggccaatcgcttcaaacattccgtgatgtagagcgttatgtagatgagcaccctgtccacctccgactgcgattagatatacaatgtatgggtaataggggttttttaaaaagtaattttaaaagtttaaacatagcaacaatattctaagaatgatatcataattgataagactattattgctataagctatatagtaatataagctatataagctataagctattattgaacttttaaaaaaaaattccaagctccaaaaaaataatttcattatgtagaaatacccaactcttggaacaccatataagaaaggggtattactaaaaatttaacaaataacttcactcttatcaggctgattgtaacgacatatttctacaaataagggcggtgagataacgcacttggttttaacattataaaattgactccactagggctttaagattgtttcgaaatatttaacaagctgtgccgtcttcttaatgtatcttcattttaaaaattagaatatcgcctcgctttatctctatgctcatttctttgtccagtcaccaaccttaacttcgtaagtgcggaagaaaatgttcgatttccagaagtagagtgactcatcgatgatgtcgttgggaatatcaa

SEQ ID NO: 10247 - DNA, 1886 bp, DROSOPHILA
atcaaaaggcgatcgaagcagccggcgaaatgggaagaacactggaaataaccggaagacagaatgataagagtctggagaagaatccggagcgcttcacgaagaatgtgacggagaaaggcgccgatcctgagaacggagacccggtgcgcaggcgcggccatgagaccagcgaactggaggcggctacgcatctcttcaagggcagcgtcggtgccggactcttcgccatgggcgattgcttcaagaacggcggattggcaggagcaaccatcctgctgcccatcattgcggtgatgtgcgtccactgcgagcgcatgctgatccgtggttccgtgctggccgtggagcgcacgcccggcgtggactttctcgactatccggaaacagtggagaagtgcttcgagcacgggccacgcccactgcgaaaaatgtcgcgcgtaatgaagctgatcgttgaaatgttcctctgcgtcacgcagtttggcttctgcgccatctactttgtcttcatcacggaaaatctgcaccaggtcctccagcagaacggcatcgttatcagcatgagcatggtgatgctgatcaccctgctaccggcgatgataccctcgctgatgaccaacctgaagtacatctcgcccgtgtcgctgtttgccaatgtggcgctgctcttcggcttgattgccaccctgaccatagccttctcggatggacccatgccgtccgttggcgacaggcacctcttcactggcggagctcagttggccctgttctttggtaccgctctgttctcttacgagggcatcgccctcatcctgccgctgcggaactcgatgcgccgaccggagaagtttagcacccggttcggagtgctcaactccacgatgttctttaccacggccctgttcatcttcaccggattcgtgagctatgtgcgatggggcgaggaggtagccggcagcataacgctaaatcttgtagtggaggaagttttttcgcaggtggtgaaagtgatcgctgctttgggcgttttcctgggctaccccatccagttctttgtgatgattaagattttgtggcccccactaaagaggtctaataactgcactcaaaagtatcccattacctcgcaggtgtgcctccgtttctttatggtgatgatgacatttggcgttgcgctggtcgttcccaagctcaatctgttcatctcgctgatcggagcactgtgctccacctgtctggcttttgtgattccggtgctgatcgacttcgtgacgcgggcgcaggtgcccaaggcactgggtgtgtggtcctacatcaaaaacattctcatcctgacggtggccgtgctgggcatcgtcactggcacctaccagagcatcgtggagatcgtcaaggagtttaagtaggcttagagagctagcaagtatattttgtacataaataatgctgtcattccgcggaactatgtgaatgcgttgtcctgttctgatgtaagattaatttgtgtatttttccactcttttttttattattattttgttgatagttttaagctgtgcatattttttttttgtttgtatgtataaaaaaaatgtttatttggcacaaaaacgaaaggaggcataaaggaaaaacatgatctgcagctataacccattttaataattgattaccatagcaatagggctttgattgtgtgagagcctgcaaatgatcgttaaagccatatgtatgtaataaatgctattcatcgattttataaatatatatgtataaagtattaactagccttcagccaacaatgtttaacactaagttcttttacaaagtgaaaaatatgcgcttttgagagcgtataaatcaataaacataaatcaacaacg

SEQ ID NO: 10248 - protein, 459 aa, DROSOPHILA
MGRTLEITGRQNDKSLEKNPERFTKNVTEKGADPENGDPVRRRGHETSELEAATHLFKGSVGAGLFAMGDCFKNGGLAGATILLPIIAVMCVHCERMLIRGSVLAVERTPGVDFLDYPETVEKCFEHGPRPLRKMSRVMKLIVEMFLCVTQFGFCAIYFVFITENLHQVLQQNGIVISMSMVMLITLLPAMIPSLMTNLKYISPVSLFANVALLFGLIATLTIAFSDGPMPSVGDRHLFTGGAQLALFFGTALFSYEGIALILPLRNSMRRPEKFSTRFGVLNSTMFFTTALFIFTGFVSYVRWGEEVAGSITLNLVVEEVFSQVVKVIAALGVFLGYPIQFFVMIKILWPPLKRSNNCTQKYPITSQVCLRFFMVMMTFGVALVVPKLNLFISLIGALCSTCLAFVIPVLIDFVTRAQVPKALGVWSYIKNILILTVAVLGIVTGTYQSIVEIVKEFK

SEQ ID NO: 10249 - DNA, 4726 bp, DROSOPHILA
aaatttattatgtcaggtgtctttatgatccttatgcccattcttctgatgaacttgctcatcggtttggccgtcggcgatattgagtcagtgcgtcgcaatgcccagctcaagagactggccatgcaggtggtgctccacacggagctggagaggaagttgccccatgtctggctgcagcgagttgacaagatggagctgattgagtatcccaatgaaaccaagtgcaagctgggcttctgcgatttcatcctgcgcaagtggttctcgaatccattcaccgaggattgtaagttgtctgggaaaagatctggtactaggtccatccaatacactttcaacttctatgcagcctccatggacgtcatctccttcgacaacaatgatgactacatcaacgcagaattggaacggcagaggcgaaagttgcgcgacataagtcgcatgctggagcaacagcaccatctggttcggctcattgtccaaaagatggagatcaagacggaggcggatgacgtggacgagggtatatccccaaacgagttgcgatccgtcgtcggtttgagatcggcaggcggaaatcgatggaactcgccgcgagtccggaataaactccgagccgccctgagcttcaataagagcatgtagatcccttcgttcgaaggaacttggctttataacaaaatctgtgtatcgtccttagtagaaaaattgcaccatttttaatatatctctatgtgtgtgtaaatcgttgtcccacagtgacgtggatcgtgtgtgtatgtgacgatcgtattgtgtgaggtcctgaaaggaataatacatcgaatttataggcaaggatcatgggctgttctcgtaacttgattaagctgtggaattcaacagatctattgtagttttaaatgcaatttgcaaaagtgtgtattgttatttggatgtcttttaaaaagtatataaaataaaatcatattaaccagaaaaacagcatacattttggaacaaaggagacacactcctcaagtcaaatacaaaattcttatttatttatgacaatgataaatggtaaagtgacaatgtatgagagtagttttaacgattggcgataaagagacataaacttatttactaaatgtaagatgtgggatgaagcgtgcgatctacatgaatgtgatcttcgtgcgtcccatgttgacctgccagacattgagctcctcgtaatcatcgatgcatttgtccacctggtcgggcttgaatcctttggttgtgcagcggtccatgatgtcggagattttgactgcctttccagagccagccagttcacgaacgatggcaaagattcgatccgaagtgttgggtacgctgaaaatgagaaatatttttgttagcacaaggatttacttacatcctttgcaactacttactgtcccttctggtgctcgtggatttggttgagcgagtccttagacatctccagcagacgcagtgcttcagccacatcatctttctccacgctatcggaaagacgcaacctagccaaagcggtggacaaccgcaggattcccaacaagttacgtgccgaggtgaaggtcatgtccttctggttgcgcgcctcccgacgcaactccacataagctcccacaatgtagtcggtgagctcatccggaatagttggattcttgcgcttgcacaggttaatgtagcgccgcataagattcatgtccagagcctttactcgagtgggtggctgtttgctgtggctatgcacataggttatgtgcttggccaagcgcaaatcattatcgcgatccggtttatcctggatgagccacagcagatcgaaacgtgagagcagggctgcgggaagctgaatgttctgctccacggtacgacgaggattgtagcgtccaaaagcgggattagcagcggccaggatggaaacgcgagcgtttagggtcgtcatgatgcctgctttggctatcgaaatggtctgctgttccatcacctcgtgaatggctgtacgatcctgatccgccatcttgtcgaactcatcaatgcagcagactccctgatcagccagcacaagagctcctccttccaatgtcatctcgcctgtgagagggtccttcatgaccgcagcggtaagacccacccccgaagaacctcgccctgtggtgtactgcgatcgcacggccaatcggctaatgtagcccagcagctgcgacttggccacaccgggatctcccatcaggcagatgttaatgttgccacgaatcttcatgccatcgggccgcttgtcaactcctccgaccaacagcaagagcagcgctttcttaacatccaaatggccatagatttcgggtgccaagctggtggccaagcgctcgtagaagtcatcctgggccaattcctccagctcttctggagtcagctcggcatccttgtccgaaatctcgtcgttcttgttgatacagatgatgcgctattaggaaggtaacaatatattaaacatttatataatattgttgcacttaaacgaggtaactcacgtgagcttgaaggaatgtctccgagagcaaaccctgaatcatctgagcgaaacctgtgcgcattagtggcaagaacactccagagaccacaatgtgatccccaggctgggccattcgagtgacctcacccctgcacatgatggtcatgctgcgcggaatgtggcccacgggcacctggtcgctgtgctcctgcattttgacctcctggaacttgacgaacttggagccgcgggtctgcagatacagacgacctcccgctttgttcactcggcaatcatccgacgggcaatcgtgcacgggcgtgaaggatagcgagttaactggctgatacgtctccgagccacagcgatcgcatgtgtaggtggcaaccaccatcatgggcttaacctccgtgcagcgtgtaacaatgccgcgaacggtgaccagtttaccaatgtgctgggccttaacctcgcgaatagagtgcgccttctctgtggacagtggtttgaagcccacctcgctaaaaggagttcgatttttagagttagattcggaggaaaactgcgaaaatcgctcaattgaaaaacttacaatcgcttcatcagctccgaggggaaagagttccgctcatcgcgctgttccatgggattcctggtgcgggactccatcatcaggcggtgctcaatgtacacatccagagcatccttggcgtgtacctcctgctgtttgtagctgggcaggagttcagcaattacatcgctgaatatggacgtgtatcgccgacaattgtcgaccaccgcctccgcgagactttcattgaattccgccagatcatccagatcgatggtgatcagaacttgctctcgatgggccaacttcaccagctgagatccgtagacgaactcctttttgccatcatcgtcgcacttgcagaattccgaaaggaaggtcttgatagattctgcaaatcaacaaacattgaatgtttgatgcttcgtccaagataaagacttctttgtacttacctcggtcttgggcataatctcgtcgagccattttgggcttggttttttttttttttttgtactttcaacaatgaacaacaaattgcgtacagctgcttgccaaaggtgttttttcggacgctgtttgctgggaaatgcggggaaaacaatgagaatgtaaacgcttcccgccaaaaacgcgtttgattagagatggtactatagattgagatgtgagataaattaaaaatataaaactatcgttatatttttacataattacatatgtagaatgtataatgaaaattgttgttatagataattgtaattatagataacttcaaaattaatacatttaaatgttcgtgaaccataaacttacacttttaaatatttattaccatatcattatatctttaaaatacacgtacttttaatgtcgggaaacatgtagagtatttgcttacatgtccggagctgccactctgacttcttcatatgatggaagttgccacccgcaattctacacatgtgtattcgattctagtcaagaatgctgagttcaatggtgttgccacctgcttgcataattaagacgcgctaaatttgaatttcaaatattgacgtttattcaggttttaaatgaaatttacaaaagttctcattttcgcttgtctgccgttacactcatagcactattgcgtatcgctttcaataaacttcttggacttgcgtttcttgttacataattatttattggtttttaggcatctaaaagtagtacatttatttttagtgcaattttcgattcgcattggttatctccgaatagatttacaacgagttacaatttaatatgttgcgtttacgtttaacttaaatattattaatcacatgcaatagttaaataataatgatacaaataataattatacatagttcaaccagctcgccggcacaatacgatctaatttcgatcgaatcgaagtgtatatgcgatatatgtatgtatatatgcctatatgccaatttgtgtgcggcggcagttggcgtttcctttgttaatttgctactaactaaatttgttgttttcgttcaactgtttgctttttacacattacgcgctaatcgttacgtttacgcactagcatataattacgatttaattagttaattcatttatgtatttat

SEQ ID NO: 10250 - DNA, 2462 bp, DROSOPHILA
cgggaagcgtttacattctcattgttttccccgcatttcccagcaaacagcgtccgaaaaaacacctttggcaagcagctgtacgcaatttgttgttcattgttgaaagtacaaaaaaaaaaaaaaaaccaagcccaaaatggctcgacgagattatgcccaagaccgagaatctatcaagaccttcctttcggaattctgcaagtgcgacgatgatggcaaaaaggagttcgtctacggatctcagctggtgaagttggcccatcgagagcaagttctgatcaccatcgatctggatgatctggcggaattcaatgaaagtctcgcggaggcggtggtcgacaattgtcggcgatacacgtccatattcagcgatgtaattgctgaactcctgcccagctacaaacagcaggaggtacacgccaaggatgctctggatgtgtacattgagcaccgcctgatgatggagtcccgcaccaggaatcccatggaacagcgcgatgagcggaactctttcccctcggagctgatgaagcgattcgaggtgggcttcaaaccactgtccacagagaaggcgcactctattcgcgaggttaaggcccagcacattggtaaactggtcaccgttcgcggcattgttacacgctgcacggaggttaagcccatgatggtggttgccacctacacatgcgatcgctgtggctcggagacgtatcagccagttaactcgctatccttcacgcccgtgcacgattgcccgtcggatgattgccgagtgaacaaagcgggaggtcgtctgtatctgcagacccgcggctccaagttcgtcaagttccaggaggtcaaaatgcaggagcacagcgaccaggtgcccgtgggccacattccgcgcagcatgaccatcatgtgcaggggtgaggtcactcgaatggcccagcctggggatcacattgtggtctctggagtgttcttgccactaatgcgcacaggtttcgctcagatgattcagggtttgctctcggagacattccttcaagctcaccgcatcatctgtatcaacaagaacgacgagatttcggacaaggatgccgagctgactccagaagagctggaggaattggcccaggatgacttctacgagcgcttggccaccagcttggcacccgaaatctatggccatttggatgttaagaaagcgctgctcttgctgttggtcggaggagttgacaagcggcccgatggcatgaagattcgtggcaacattaacatctgcctgatgggagatcccggtgtggccaagtcgcagctgctgggctacattagccgattggccgtgcgatcgcagtacaccacagggcgaggttcttcgggggtgggtcttaccgctgcggtcatgaaggaccctctcacaggcgagatgacattggaaggaggagctcttgtgctggctgatcagggagtctgctgcattgatgagttcgacaagatggcggatcaggatcgtacagccattcacgaggtgatggaacagcagaccatttcgatagccaaagcaggcatcatgacgaccctaaacgctcgcgtttccatcctggccgctgctaatcccgcttttggacgctacaatcctcgtcgtaccgtggagcagaacattcagcttcccgcagccctgctctcacgtttcgatctgctgtggctcatccaggataaaccggatcgcgataatgatttgcgcttggccaagcacataacctatgtgcatagccacagcaaacagccacccactcgagtaaaggctctggacatgaatcttatgcggcgctacattaacctgtgcaagcgcaagaatccaactattccggatgagctcaccgactacattgtgggagcttatgtggagttgcgtcgggaggcgcgcaaccagaaggacatgaccttcacctcggcacgtaacttgttgggaatcctgcggttgtccaccgctttggctaggttgcgtctttccgatagcgtggagaaagatgatgtggctgaagcactgcgtctgctggagatgtctaaggactcgctcaaccaaatccacgagcaccagaagggacacgtacccaacacttcggatcgaatctttgccatcgttcgtgaactggctggctctggaaaggcagtcaaaatctccgacatcatggaccgctgcacaaccaaaggattcaagcccgaccaggtggacaaatgcatcgatgattacgaggagctcaatgtctggcaggtcaacatgggacgcacgaagatcacattcatgtagatcgcacgcttcatcccacatcttacatttagtaaataagtttatgtctctttatcgccaatcgttaaaactactctcatacattgtcactttaccatttatcattgtcataaataaataagaattttgtatttgacttgaggagtgtgtctcctttgtt

SEQ ID NO: 10251 - protein, 720 aa, DROSOPHILA
MARRDYAQDRESIKTFLSEFCKCDDDGKKEFVYGSQLVKLAHREQVLITIDLDDLAEFNESLAEAVVDNCRRYTSIFSDVIAELLPSYKQQEVHAKDALDVYIEHRLMMESRTRNPMEQRDERNSFPSELMKRFEVGFKPLSTEKAHSIREVKAQHIGKLVTVRGIVTRCTEVKPMMVVATYTCDRCGSETYQPVNSLSFTPVHDCPSDDCRVNKAGGRLYLQTRGSKFVKFQEVKMQEHSDQVPVGHIPRSMTIMCRGEVTRMAQPGDHIVVSGVFLPLMRTGFAQMIQGLLSETFLQAHRIICINKNDEISDKDAELTPEELEELAQDDFYERLATSLAPEIYGHLDVKKALLLLLVGGVDKRPDGMKIRGNINICLMGDPGVAKSQLLGYISRLAVRSQYTTGRGSSGVGLTAAVMKDPLTGEMTLEGGALVLADQGVCCIDEFDKMADQDRTAIHEVMEQQTISIAKAGIMTTLNARVSILAAANPAFGRYNPRRTVEQNIQLPAALLSRFDLLWLIQDKPDRDNDLRLAKHITYVHSHSKQPPTRVKALDMNLMRRYINLCKRKNPTIPDELTDYIVGAYVELRREARNQKDMTFTSARNLLGILRLSTALARLRLSDSVEKDDVAEALRLLEMSKDSLNQIHEHQKGHVPNTSDRIFAIVRELAGSGKAVKISDIMDRCTTKGFKPDQVDKCIDDYEELNVWQVNMGRTKITFM

SEQ ID NO: 10252 - DNA, 3017 bp, DROSOPHILA
gcccttcttcatcagcacgttccgccgatggccggagccatcccagtagctgaacgtgatggagatgtcctcgtccttcagctccgcctgctgcattacccattcttgacgcagctgctcgcgcagtctgttctcctgctcctcgcgctcgcgatctggcagaaaggaagtgtccacgtcaggattcttgcatatcttcttcttctttatgggcaaaatgtcttccttgatctccgtccacttgggcttgggctgatcctcctgcttaatcttcagctgtttcttatcgtgatcctcgtcgtcctcctcctcctcctcctcgtcgtcgtccaggttgaaggacagcgcctggatctgccgcttctgcttgttcttctccgcctgaatggcctccagggcgcgctgcttctcccgatccttttcgtccttcttctgggcgagcttcttctcccgttcccgcactatatcctcctgcttggccttcatctcgtcgagggtgaccagaccaatggtcgaggacttgagctgctgctccacggcatcgtagtgggtggcaaacttgttctcaatcttgtccagcttgagctcctcctcgatcttcttcttgcgaaactcgatctcctgctgctggatctcccgcttcttcatcagctgggctgcacggcccgcctcgctggcggcacctttgtagtgggccatccttagttgtttctgtatttatttatatttttttttatttaattcgtaaacgaaatttgtaaacatccaattggtgtgaccgtagcagaaacattgaaaaatgccattcttcgtataaaaaatttacagcacaaaacactaccttaccaatttgaaataataaaatatttaatcttgaaattatttaaaatttactagctgtccattcccctgatataagagcaaaaagaagaggatcactatttctctgcaacgattttgaaaaataaagataaatcttagatttttagctgttttttttaatatcctttatatttagttacagtcgtaagtttttctttaacttgcttcatgctttcgctcagtgtactaaatctacgttgatccattggaagattcctcctgtgcctcggatttgtcctcctccttgctgtcaccatcggcatctgttccatcatcgccaggttggcttggatctggattgctggagctactgccgttgctctcggccaaatcgttctggtcgaaaccattcgtgtattccggcgttggagccgtgtcattggcgctgggcggcggggtaatcttccgcagctgctgacgggcggcatggacgatcttttccagctcgacgcactccgtctcgatctcgtagttcttggagaccagcagcacccaatgggcttccagggagcgcagtcgctcgccggcctgcgtttgcgcctgcttgcgctgccagttgacatcttgaatgtccttcttcagctgctgcagctggagctgcgccttcgcctgcatggcggtgaagacctccaggtaggacttccatgcctccgtgccgtagtcgagcattagctccaggttgagagagcgcacccactggtgctccagctgggccatcgagttctcaatggcctcctgccaggcggacacctccgacaatttgcccgatggcggcggtggcagttcgtagcgcttcatggagagcgtctccatgggcaggcggttctggatgcgctcgaactcgttggccatcagcggagtctcaaagggcgagctggcgggcagtggcagatggtcaaggtaattttttgtgggcctatagcgccggcattcctcctccaccatggcgagagcctttggaagaagaagatgccatttcaaagtcagtttcaacgtgcaacatggatatccgtatatttaccgattcccggacgcccacatcgtcatagccgtgatctatgtagggcagagcatccacaataacttcgccagccattatttattattaatttctgtgttttgagactgttttttccgcaagtaaacaaatacaattgccgcttcgcactagtgtggcacatttagctactttatagctatataaacggataacagaatgctgttaattaatagccatatatctatttagtaaatttttttgttttaacatgaacatttaagcaaaaaataagcgttgttttctcaccaataaaagttgtgtaagttagtttttaacgtatgtatgtattatgtattgtttgattatttattatgcggttaaattacaacaattgtattcttgttctttaaaaacgcattgctaatttataaatttaactaaaatacgttattgataaattcgaatttagatttgtaatattatagtttaattgcgagaatataaacaaaaacttctcttacgagagaaaaaaaaagctaaaagtgttggacagcgtccaattagccctgtaagcttgacacttgctgctgttagcaaatgcaaccatgcgccgtggaacgcgattggcagccatttccggcagctctctttctttcttcgttcttcttaataaaaagaggacggtatctgcgtttgcagaatatttagcacctttcattgggtttgaaaatcaacgaaaatggtgagaaacgaagcacaaggcactccgcaaccgcagcagaccccaaaacattggatttaacacacgaaacgatgcgaaaatagtgcaaaagtgtcgccctaacctccacgtgtttggaatgtgcggcgatggcgaaatgcgcttgttgtgttttgtgatgtgaaatgatcagtgaactaaacccgaataccatgtgcactttcagagcttaggcaacgccaggccattggtctccgtgtacacggaaaagaacgagccagccaaggacaagaacatatgcctgccggcagtgttcaaggcgcccattcgtccggatgtggtcaacgaggttcaccagctgctccgccgcaacaaccgacaggcctacgccgtcagcgagctggctggtgagta

SEQ ID NO: 10253 - DNA, 950 bp, DROSOPHILA
gaaaaaacagtctcaaaacacagaaattaataataaataatggctggcgaagttattgtggatgctctgccctacatagatcacggctatgacgatgtgggcgtccgggaatcggctctcgccatggtggaggaggaatgccggcgctataggcccacaaaaaattaccttgaccatctgccactgcccgccagctcgccctttgagactccgctgatggccaacgagttcgagcgcatccagaaccgcctgcccatggagacgctctccatgaagcgctacgaactgccaccgccgccatcgggcaaattgtcggaggtgtccgcctggcaggaggccattgagaactcgatggcccagctggagcaccagtgggtgcgctctctcaacctggagctaatgctcgactacggcacggaggcatggaagtcctacctggaggtcttcaccgccatgcaggcgaaggcgcagctccagctgcagcagctgaagaaggacattcaagatgtcaactggcagcgcaagcaggcgcaaacgcaggccggcgagcgactgcgctccctggaagcccattgggtgctgctggtctccaagaactacgagatcgagacggagtgcgtcgagctggaaaagatcgtccatgccgcccgtcagcagctgcggaagattaccccgccgcccagcgccaatgacacggctccaacgccggaatacacgaatggtttcgaccagaacgatttggccgagagcaacggcagtagctccagcaatccagatccaagccaacctggcgatgatggaacagatgccgatggtgacagcaaggaggaggacaaatccgaggcacaggaggaatcttccaatggatcaacgtagatttagtacactgagcgaaagcatgaagcaagttaaagaaaaacttacgactgtaactaaatataaaggatatt

SEQ ID NO: 10254 - protein, 278 aa, DROSOPHILA
MAGEVIVDALPYIDHGYDDVGVRESALAMVEEECRRYRPTKNYLDHLPLPASSPFETPLMANEFERIQNRLPMETLSMKRYELPPPPSGKLSEVSAWQEAIENSMAQLEHQWVRSLNLELMLDYGTEAWKSYLEVFTAMQAKAQLQLQQLKKDIQDVNWQRKQAQTQAGERLRSLEAHWVLLVSKNYEIETECVELEKIVHAARQQLRKITPPPSANDTAPTPEYTNGFDQNDLAESNGSSSSNPDPSQPGDDGTDADGDSKEEDKSEAQEESSNGST

SEQ ID NO: 10255 - DNA, 3383 bp, DROSOPHILA
tagccgtcccagccgcaggaatcaccacccgcattcgttggcaggttgtagtagccgcaaggactgcccatggaggtttgcatttgctggcgctgtaaaatctgcgcctgcaacggttgcatcatcgcgagattgttagacggcgagtgctgctgcaccatgactgggccaggacaactcacagagctctgttggcttggcttggacatgtatgagggcgcaggataccgggtctccattcgttgatatataggttgttggacaatggacttggggcagttggtatgtggcgcctgtggctgtacctgctgcatctgcatgcgctgttgcattgctgcctgatgagcacctaagggtggctgtattggctttccgtccaccaataccggataaactttcccgccaaagacgagcccgctgccataggtgaccatgccattctgtggcacttgcggtgaactgtcttgcacagttgagtttttcattgtaatggtgtctctttttttttattagaattttctaattcgaatttcagcaaccgcactcctaaaagttgatcaaaatactgacgagagatttagatagatctgacaacagaatctcagcactcgcttgaaaatccctcggcctgctaattaatgtggcttaactctgagcaaccaccctatatttgcaagaaagaaaaactcagaggattttcgaccttatcatcacgtacactccgaattgataaactttgtcagctctctaggaagcgggagtcatttttaattaagccgagagtagaacttgaagaaggcacccgagattgtcagagataaaaagaaaaacaagaaagggataaccaagattacttgaatgtaaaataacaatgtgaattcatgtggccacaccaattatgtatacacaaataacagagaaagaacctaaaacagagtgattgccttaatggaattgttcaagactagtataaactgatttttgtgtcagttcgtttgagatgccttaatcgaaaagccaatcaaaaattagaaaaaaatagtttggctttccgacacaaacacaagaaattaccacatcctggcccataccttctaaaatttaatccgaatcaggtaagtttttgtgggttctgggtgtttaagaggttaaggtcaaacacgtaggtcccacaggaaattgccaacctgtctacccaacatgtttcctgatgacttcgacgtagaacccttcaatccattcaatgtgggaccacccaatagtggagcccgatctgaattcaaaatacctacatgcgttacgtatccgccaccggtattcgtacccaagtccgaatatgtacaaccatcagaggagttggtttcccggaagagcaaccaaagtataggcaagtcgactatcggcgaggtggacatttccaaggccatcaatgaagagatggccgtggccaagaagcaggccgaagttctcaatgaaaaagatcgcattgatgcgggtggtgtttcaacaacgaagctgtccaaggtatctcaatcaaaggaagcggtttcaaaggactctttgcgcaccctaatgccaataaggtcaaaccgtcaggtcagtggtgatggtagagcaaattccaaattatccatatcacaattcagtgcggcatccaagacgagctgcacaaataagcaaagtgagggtgacgtggcctcaaagtcttcgaacataacattgaaacgatctgcaataggcaacagtatttcctcaaataccaccctcactccgaagtcaattttgaagtcgaaacatttctcagaagcagccaaagcttcctctaccacaatgaaatcaaaagtttcaaataagccatcagaaactggaacgcagcgctccttcaaattaaatcctgctgactcagactcgaaacaatctctaaaatctgcaaaaccaaagcattccgattttaaaatgcaagataagaagctgaccagttctcaagaacaagccccgtctgttgttgccacaagtaatgcaaggcaagactcttggaatgatcgtgtcccttcaaagaccaacaagtcaaatgtactacctgaatccaaggatggccccagctatattcattcggaagcagctttatcctacagacagtccttgaaccagcaggctgccgaaatggcggatcgcctaaacgccggaaatgaaaactttaggcgttacaactccgtggcacggaatcactcgatcaaagtacctcaaaaacttaccgatggggatcgtatgacattttggttcagcgatgctgtactttcctagaaacacatttccttgacaaacaaattcttagttcatatttactgagaactgctagctattaaatagaaaaatcaaatcgaaaattaaaagtttttacaatatactttactgtttggttaacgagtcagaagagagaaaactaacctgatttgcggtctatcatttttttttttactgatgttcagtgtcattaattcaaatgcgctaaaaatttgcggtcacttcgttctgaatgcattgacccataaaatatgcaaaaaaggtgagctcaattttgcaaaataaatgcggatgcaaataaagtatacataaaaaggacgcgtcaaaccaattcagtaaattacacaaatgtatacatatctgatcatatgaaaaaaaaggatatacattttaaatgatatggcataatatgatgatatatatgagaaattgtgtacttattccattattcttatttctttaaaaactttgtctagagtaagtgttaaatttatttcaaattaaagccagcccagaacagctcagctgactttttgtttgcaaaatcaaattaatgaggacaattcggtcgagcgttttgtttggggtattgtggttaattttactttatttattacagcgcagaatgctaattgcagctgccagcggaggccgacaacaatgttagtttgtagttacccagctgcccagctgcctaatcagcgtcagcattttggccaggagcggaatcggggtggtgaggcttggaatggcaagaggggtggtaacaattataataaatgcctgtggcttacatttaattgcatgtcaatttgtaagccgctggcccgagcacactcgtccgtaagtaggccacaataaatgaggcgagtgggttgggtgtgggtggtatatttatatggaaatacggcgatttttatgcttgtacttgtacaatagaggaaacaactgcaataatggcgcacggcgcataaagtaccagaaataatagcaacaaacaactttgctggagtgcaaaaaccaaaaacgacagccacgacagcaaaggcttcgcttcgaaatgaaatgaaacaaacgtt

SEQ ID NO: 10256 - DNA, 1323 bp, DROSOPHILA
atgccttaatcgaaaagccaatcaaaaattagaaaaaaatagtttggctttccgacacaaacacaagaaattaccacatcctggcccataccttctaaaatttaatccgaatcaggaaattgccaacctgtctacccaacatgtttcctgatgacttcgacgtagaacccttcaatccattcaatgtgggaccacccaatagtggagcccgatctgaattcaaaatacctacatgcgttacgtatccgccaccggtattcgtacccaagtccgaatatgtacaaccatcagaggagttggtttcccggaagagcaaccaaagtataggcaagtcgactatcggcgaggtggacatttccaaggccatcaatgaagagatggccgtggccaagaagcaggccgaagttctcaatgaaaaagatcgcattgatgcgggtggtgtttcaacaacgaagctgtccaaggtatctcaatcaaaggaagcggtttcaaaggactctttgcgcaccctaatgccaataaggtcaaaccgtcaggtcagtggtgatggtagagcaaattccaaattatccatatcacaattcagtgcggcatccaagacgagctgcacaaataagcaaagtgagggtgacgtggcctcaaagtcttcgaacataacattgaaacgatctgcaataggcaacagtatttcctcaaataccaccctcactccgaagtcaattttgaagtcgaaacatttctcagaagcagccaaagcttcctctaccacaatgaaatcaaaagtttcaaataagccatcagaaactggaacgcagcgctccttcaaattaaatcctgctgactcagactcgaaacaatctctaaaatctgcaaaaccaaagcattccgattttaaaatgcaagataagaagctgaccagttctcaagaacaagccccgtctgttgttgccacaagtaatgcaaggcaagactcttggaatgatcgtgtcccttcaaagaccaacaagtcaaatgtactacctgaatccaaggatggccccagctatattcattcggaagcagctttatcctacagacagtccttgaaccagcaggctgccgaaatggcggatcgcctaaacgccggaaatgaaaactttaggcgttacaactccgtggcacggaatcactcgatcaaagtacctcaaaaacttaccgatggggatcgtatgacattttggttcagcgatgctgtactttcctagaaacacatttccttgacaaacaaattcttagttcatatttactgagaactgctagctattaaatagaaaaatcaaatcg

SEQ ID NO: 10257 - protein, 367 aa, DROSOPHILA
MFPDDFDVEPFNPFNVGPPNSGARSEFKIPTCVTYPPPVFVPKSEYVQPSEELVSRKSNQSIGKSTIGEVDISKAINEEMAVAKKQAEVLNEKDRIDAGGVSTTKLSKVSQSKEAVSKDSLRTLMPIRSNRQVSGDGRANSKLSISQFSAASKTSCTNKQSEGDVASKSSNITLKRSAIGNSISSNTTLTPKSILKSKHFSEAAKASSTTMKSKVSNKPSETGTQRSFKLNPADSDSKQSLKSAKPKHSDFKMQDKKLTSSQEQAPSVVATSNARQDSWNDRVPSKTNKSNVLPESKDGPSYIHSEAALSYRQSLNQQAAEMADRLNAGNENFRRYNSVARNHSIKVPQKLTDGDRMTFWFSDAVLS

SEQ ID NO: 10258 - DNA, 10882 bp, DROSOPHILA
gtgatgatggttttgagtcacaaatattctgaaggacactggtgtttaacttctaaagctaattgtaaacggtgcagcggtttgtgccaagcatacaatctccaacagacattgacgcggaacagacaatgcatcgtttataaacaacttgcactttaaatttaacaattttaacgtttactttttttttttcaacttaatcacagtagttagatcacagcttatggcattagttaagtcacttgtgcataatagaagatcaatggatcggttaatgctaggacaaatttcgtttgactcaatgtgggtgtgtgtgcatgtgtttgctgtgtttgtgaatgagtagggcgatttggtaggtgttagtaggcggttggtttagtggcgcttttatcatcttatcttcgggcttaccttgatcgacagactccctggcaatttttgtatgtacatttttattgttaatttaattctctgatttgtgttatttgttggtatgacaatttgtggtctgttcgcattgctgtctttcggttatatatacatatacttaaaatttgtattgtatttgatttggtttttattctgctgcatttcgattttcattgcatttatttttggttgctggttgtggtttcagtttcgattcgattcgattcgattcggacagttttgactgcgattcagtggtttcgttttctatttacagtagatactcggcaccgatacaaaacgttgcgtaatctaaaagaaaacgtcaacaaaaacgacatgaaacgaaacgaaaagaagaaacatagaattaaattagaattagaaaactaggaatttaattgtttctttctcttttgatcagcttctttgttgctattacttttgcattgtttctcttgttcgtagctcacacactcacacatgcacatgatgatgcacttgtgcgtgtgtgtggtattggatattaatgggttcttgttatgtaccgggtttatcgggaggattttcagaggatatttcgagtgagtgtttggctttcgggggagttggtgttgtcggaggctgagggatttcgaaggatttcgaaacttaatggaaatttgcaaaatttagctttaaaatttcattttgtgttgcattttccgaaaccaaaaccaaaaataaagttatttcttgttgaatatttgctttccgtttttcattttatttaatgctttcatttttttttttcttttttttttctttcgtttgactttagcacacgcacacaaaattccaaccgaaaacgttcaagacaaaaagcgagcaacaactgagaagaagaatacgatattttggataattttgattagggggaaattgattaggtaaccaccgatgcttatttttcttctttgtttgttgctaactttatcacccaatccctctttttgataaaggtgggatatggtatactagccttaagcccagttcataacagaaaaatacacgcaagagagagacagcgacagaaaaggagagcgagatgaagcgtctgagatcgggccactcacctgtataaccctttggatagaccatggtaacctcatcgaacttgggcttctttatgccctggctccccaccgtggtgcaggctatagatattggttggaaaaaagatatgaaaatgtgatggatattagggtagaattcaattaaataccaaggcaattcacgatatacgattagtgaggagtaaataatgtacttaccatcgaacttcatggccgtggctgctgccacagcggccttgtgctgctccacagtgccaccggcttccaggactcgcatcttgttccgattggcaatcggacagcccgaagcactagtagggagtagaacacctttagcttcagttccacaaacgccgacggagaccaaggacttaccttctgtgggagaggaacttgccggtggaatggccggatccatcgcagcccgggatgggacaacgcaggggttccgaatcctggccatcgcgaggcttgctcttcggtttgttagcccttggacagccggagaggctgcggtgtgatgagtagttgcccgtcacgtgtccggagccatcgcatccgggcgtggggcacttgagctcctgcgagtgcgactgtagatggttgcggtccgagcgcgagcagcccgtcaatctggcgaaagaagaagaagaacagtcgaaggattagtgagtgacccaagcccactcccgaaacttaaaccaggccaagtggtcgccctccgataagagaactccatatgtctgcttctgttcgtgcggctaagactttggacttgaaactttcggttttaaagtttcatttaatcacggggtggctgtggggatggttttacgaccgctctgcggccacattcagtcgtaatcataaatattaaagtctctcgaccctcgtccttagtgtccacgaaggacccaaatgcccaagccaagcactgcattttttttttttggcaactattacacataaggtcgactgttttggattaaagtttttccgctgaactctgtgcctaatttctgagttttaaagcacacattctaagataatgggtaaagggttcatttatatgagctccaggtgttgcggagacacatttcttttgacaaagatggattgcgaaaatgaagcggtggtcataacatagatggatggacaattttcatccaattattacatgaatcgttagccaaactggagaatcgactatgtggtgaatgtgacgacttacccgtccttggacttgtcgtgctgcgggatgtgttgtggcggtggcatggagtagcaggtggccggactgggcgaatatccgccggaaacgggcgtgggatagccaccgggacccactgccgtggcgtacggattactgcattgataagcagccggaccgtaaccgtggtatccagcaggtggatagtccgattgcaccaccatcccatagccagggtgcggtgagtaacctggaaagagtgaaggtttaaaaaaaaagtggtatcaaacatatgcctcgaaaatcaatcgtttgggttctgggttcaatactgaccactgggatcccggtacgtttcgatatagtgtgatccgccgctgtctggcgtggattcgcgactgtaaggtcgtggaccgctaatgtgtcccaccagaccaaagcccaggggtcttggaggcccgctgaaatccactggttccatttgcggcgatcgcggtggtccaccattgcccggacccagaggtcctgtcgctccactcacaaaaccctgagcatgacccaccaccaggccatcggcaccgtactgcgggctcgtaataatgctgcggatgtataagtcaagtgattaataatacaggtctggttagggttttcacacatatgttttgaagggactacctgaaggaatgactcacctgtggggtaatcgggtgacactgaggtccaacgtctgtccctggggactgggcacctgaggactagcaatgtttggactagctcccggctgcggactaccgttgcccatacgctgggcggtatattggttgtgcgaggctggcgaattgaaaccgtgcgggctgctactcgttaccgaggtggaaccacttagatccaccgccggcacaccgcttacattgggtgcgggtgagctgctctgcttgccgtgctgctgctgttgttgctgctgttgttgttgctgctgctgctgctgctgctggtggtgttgctgctgctgctgttgctgctgctgctgttgttgctgattttgataggcggctgctgcagctgctgcctgagcagcggccatcttaaccgatagattaatggccgaaaagcccggcggcagaggacccatcgttggatcatagtgatacatcggacgcggatatagaggctgtccgccgttggccaactcctcgtgctccgccttggccagcattagttgctgctcctgcagatatttctgctgctgggcctgcatctcgtcggtggtttggggcagataatgataggcagccgccgccgcagaagcgcccgctgccgtcgccgctgttgccgcggttgccctttgaccgttgctgggacaacagacgccgctgggatcgtaacgctcgaagcccgctccactggctgccgttacagcatccaccgtaaaagctggagagctgagggaactcagcgagacgggcggatgtggatgtgggtgtccgggatgcggatgcgggtgtccaggatgcgcttcgtaggcgcttctcgccgtacccggcgatagttcgcctccattgggcgccattagttctccgcttggaccaacgctaacatgactttgggcataacgcatttgctcatattgctgctgtcgctcgtcggcctgctgctgctgctgctgttgctgttgctgttgctggtgttccgagtgataattggctgaaggatctgggacatcgttgccctctatgaagggtcctctctgctggtgcaacgtatgttgctgctgttgctgctgctgttgttgttgttgctgctgctgctgctgttgctgctgctgctgctgttgttgctggtgatgaccgtgaggattaagatgtggctgatgtggcggactctgaagacccacaaagcgactcagatgcggtgcatgcaggttgttctctccatttgcggctgttgcaccgcttgccgatccggaacgcggcgcttggacggcggacgctgatgaaggggcggcgggggcgggcgcggccgcttcccccgatagatatgagtgcatggggctcttgttatactccgatttgatgctggcaacaggactatattccgatttaataatcggcatcgttgtagagccgctcagtttggagctgttattgttgatgcagttgctgttgttattgttcaaatagtgattggacgccagcttcagtttgtccagtggatgcagctccttctcatgtttgtccagatcggctagatggtgcgagatagaacagagcaagacatggagcgatagaacagagaaagggcgttacacagatcagtttcgaatagtgtttctgtttctgtttgggagtttctttcacacactgtcacccgcattggatggtttggattgaaagctcagtgcctagagtggctagaatggctaggatggttcacctgctgctgctgctagtggagctgctcccggacggcggctggttccgcccgagcgccttaccgcccgcgggcagccggataggctgcggtgcacactgcgatgcggctgcacgtggccacgaccattgcacccgggcgttgggcatttcaggatctgctcgtgcaaagccagcactgcaagtgcatgggaattatcagtttcagatgatcagcatgatcagcggtaatggcacgactacgacaataaggcattccacagacagggacagagacagagacacagacaaagacaaagacagagaaaggtcgagaaagagcagtaagatcctctatcaggtcatgtcaaaattacattgtagccagtggagaagatctcgatgatccaatccaagtcgaaagctaatggttagctacatgcattctaacaacagaattaagtactctatcgctgtagacaaacgtgtagatctatctaagatcatgcaaagatggaatgagatggatagacgtggggaagtcttaaaagttatacaatgagtttctttaaggattgtaataggagtaataaacatattagtaaatctagaattggaaatacttcctttacacgaatttcacgaattagaatattttaaaagaaataacgcaatcaaatacgtttctacaaaaccttggcttctgcaaggcagactattaattcacttgtgacctcacaaggtgaaataacttaaaaagtgatctactacatatttcagagcacagcatgtattgaaaagttttagagaatctgaaagaagaagaggatagaccgctcatacacatcaaacattcatactcaagacttgctaagaaatacgatgacagagacagggagaaatgagcaggagacagattgacagttagagagagacaaaagagaaatacagagacagagacagagacagagatagagcgactactaggcatacacgggcatgcggaacggaagtattttctttttgtattcttgggaaaacttacattctgtggttactttatcgcgcttcggacaacccgacaaactgtcaagttcccattaatggcagatcgaatgatatatatatatatataaagaaaaagaacatttgttgtattgtctgaccgaaggacagttccatgggacatatttggatgggtacctgcgatggtgcgaatacaatccggtgacatgtccttggcccgtacaatgcggcgtggggcatttgacgccatctacaattaaccaattaacagtataacttaaattcaacgatgaagaggaacgagagcgagagggcatatatagacatgccagaatgagacaggtggattgagtgggagggtgactattttctaattaattatacagcgagagacaagttgacgtagaataccccgaaagaaaaaaaaaaaccttaaaaagcagtattgcgaaagaagcagtagcagcagcagcagcagcagcagcatcatcatcatcaacagcaggcaacacgaattcttttaccctaaataattaattaaaatttgatggaaaacagctttgcattatttactttaaaaagctcacgcacacatgacagtcagccagaggggaagtcgagagggaacgggtttcgagacagcttcaaaaatcaaacccaagccaaaccaagccagacccaagcaacttggtcgctttctaagcgcaactcctcgaagatagaatgccaagccccccgatattttctgatgtatgtatggtatacgtatggtgtgtgtgtgtgtgtgtgtgtgatatgggggggttggttaatgaaatatttttcgaaatattttactcctgtttttgtctattacgtggccgggcacaaaatgtcaaactgcagctgccggagaagcgagcgagcaaaggtaaaaggaccgactcgtctctaattagaatttaattaaaataaagccaacggtaagggagtctaaagtgtttgtgcattagaaaatttcaccgtgtgtgtgtgtgtggtagagaaaaaaaaaaaaacagaggaagaaacatggcgaaaactaatgattgagaggagtggagtctagaaaccagacgcccacaaactctaaagggttaatcctaataagccacattagcaaagaggctaaaacaataaccataaggcttgccgccgaacgctaatgacttattacatatacgcagcgagctttagaatctacggcttgcgtcaactatttaaaaagtcattcaaattatatgaataccaaggacatacatacgagtaaacgcacagcaggaaaagtagcttccagcttctggctgagcatattaatgccaaaacataatgacaaaataaatatgcaaaagtggtttttgaaggaaaacgtgctcataatgctttatatctaatcatgccacacccacttaccccgcccacccttacatacatcctcatcgtcgtcgcctgtggaaattgtactgcgaaattagtagaaggcaaagctcaaggctcaggcactcaaccaaaagatgtctgtccatgtgcctctgtgttgtgtggcataaagggtttacaagccattagttgctgtgcgctcgaaacccccaactacaccgaattgtacagcacacacccccttaccgatcccattttcataacgacaaaatcgcttaatgtctttttggctgctgaatgagctgcaaaaagggttttatttttagatatgtggggcaggagtcacgggcaggagtctgtgcaaataataatgacaacaaaaaccagcggtataataatcgtcataatgttgcctattaccgagggaaattgagtgtctctcgctagtttttcttattttctttcgttcaatgatcagacacacatcaaaagactcacacatacactctatctctctctctctctctctctctctctctctctctgtccgtctctgtctctcttaagggagtgcttggttagtgggttggttggtgggggggcggtagggacaaggggctttactcagattttgccaattgaagcggtaaactcaatgcaacaagaagtctcgcacatcaaccgatcgttcaatcgaaccggaaacggaaacccagccgaaccacaacgaatcgcaggtgaactactgtactgcatctttcaaaattattgaaaccaagtttacattgctgttaacagaactgtttgtggtcgtagtaccatttacagcactattttatgtttgaatcgtagtgctatttacagcactgctcaaatctttgttcacacaatctgtgcaaagcacttatcgcgccgaaaaacagttctgttaacaagacagtacagttgcacaggattcttttcagcagcgaggcacaccaactcatcacaatcaactgggaaattcactctctttctcttcttttttttttggttttggtttttgtttatggcttactatttttgaccacttaccgcgattttggctacccggcgaataacttggtgccggtgtcgatggagtcgatggtcctgccgctggtaccgctgccgccggactgccggccgctgttgatggtggcgttgccacgagcggaacgcccacaacgccttcacgcgatgctatgtcctgcataacagatgcagcccgactgccgatgcccgccggctggagaatcgtgtactgtttgccatcggccatcggttccttgggccgctgcttctcgcccagctgactggcaatatcgaaggcggtactcagttgctgatgctgctgttgttggtgctgctgctgctgctgttgttgttgttgactagcggcggcggcagcggcatagccatagtaagccaatccggcggcagattccgctgcagcggccgcattataggcactataatgggcatgagcggcggccacataattccgtttgatgatatcgatgggcggcttaaaggccgaggccgcttgcgtgtaaacgccttgtcccgaggcggaagatgaggtatcttccagttccggatcctgatcctcatcgggcgtctttttgccgcgcccctgtgcctccagatggacgacaccaccagcaccgctggctgcattcaggcgcgcctggtcgttctctttttgtctgtggaaacgtgagaagagtgtggaattgggatttggtgagctggcttgtgcttgtatggcatggctgggattgccaatggcctcatacttttgtttctcctcgaacagattctggaagggcggtggattctcgtcctgctcctgcagccgatacaaattcccccttgagtcgggccagctgcccgataggcttttcagcgccgcctgtgtttcgcggatgagtgtctcatcgtcctgatccgcatccgtgttgcttttggccagcggagtgggcagtgaaccgcatgtggggctctccggactgtctgcgatgtggccctggccgccttgtttgcgtttcttctgcggcaaattgttgttgttgctattgctgttgttattgttgttgttgttgttgttattattattattgttgttgttgttgatcaggctggagtcgtcgtcacgactgcaacgtttgcgccgcttgatggatgtctcgtgatcattgccattggtgtggttgccattgctttcggacaacggcgtgtcctttgtaaggggccgcttggaaagcgccattttcccggtggctattccgtgtttccggctctttggctccgctgatcaggtgaaaagtcaaacgaaacgtaagcaatattgtggttgttttctgtaggcagaagtggatgacgtttgtgtggatgcaccacctttgcaacattatcatttttcagcttcagcaaccgaaatccacacttattttactccaatatcaccagacttaacaaaatcgaaaccattttcagtaaacaagctctataataacaaaactaataccatcgccagtttgttttcaacggaaagaataaagtgttttgataaacaaatatcgttaaaccaaagtaatttttgtttacaagcccaccttttaaatcataataagcgttaagcgttttgcaactaacatctaaaatttagcaaaaactactagtattttgtcagttgcttaatgttttgttgtcgtcataaatttggtttattgctagaatcgtctgcttaattgtgctcaacttaatggtaacataaaataataatccataaactattaataatgtctttggaaaacttttatacaaaatgggctagtcttatgattttaaagaatattacaaaataatattaagccgtagaagttcgcgctgcaaacattcattattctatgtcgcctataaagcatgggaataaaatgatttttagttagtgggtgggtacgtgacataagcagcttcccatctaaatggttaggataatatcgagtcgaaactcgagatttgcgctagatcaattttcaattttgttagtcatattctcaatgtgattattcttgttgcattgaatttcttgtacttgtatactatttgtttttgttttcctgtttggttattattcatttgtttaatttctcgttctggttgttttttttctttcttttttcgtttcgaaatttatgccttcacaggggcaggggggcgggtctgggtgaggatcagcatggtatatagtgtacacaatatttatg

SEQ ID NO: 10259 - DNA, 3981 bp, DROSOPHILA
atggcgctttccaagcggccccttacaaaggacacgccgttgtccgaaagcaatggcaaccacaccaatggcaatgatcacgagacatccatcaagcggcgcaaacgttgcagtcgtgacgacgactccagcctgatcaacaacaacaacaataataataataacaacaacaacaacaacaataacaacagcaatagcaacaacaacaatttgccgcagaagaaacgcaaacaaggcggccagggccacatcgcagacagtccggagagccccacatgcggttcactgcccactccgctggccaaaagcaacacggatgcggatcaggacgatgagacactcatccgcgaaacacaggcggcgctgaaaagcctatcgggcagctggcccgactcaagggggaatttgtatcggctgcaggagcaggacgagaatccaccgcccttccagaatctgttcgaggagaaacaaaagtatgaggccattggcaatcccagccatgccatacaagcacaagccagctcaccaaatcccaattccacactcttctcacgtttccacagacaaaaagagaacgaccaggcgcgcctgaatgcagccagcggtgctggtggtgtcgtccatctggaggcacaggggcgcggcaaaaagacgcccgatgaggatcaggatccggaactggaagatacctcatcttccgcctcgggacaaggcgtttacacgcaagcggcctcggcctttaagccgcccatcgatatcatcaaacggaattatgtggccgccgctcatgcccattatagtgcctataatgcggccgctgcagcggaatctgccgccggattggcttactatggctatgccgctgccgccgccgctagtcaacaacaacaacagcagcagcagcagcaccaacaacagcagcatcagcaactgagtaccgccttcgatattgccagtcagctgggcgagaagcagcggcccaaggaaccgatggccgatggcaaacagtacacgattctccagccggcgggcatcggcagtcgggctgcatctgttatgcaggacatagcatcgcgtgaaggcgttgtgggcgttccgctcgtggcaacgccaccatcaacagcggccggcagtccggcggcagcggtaccagcggcaggaccatcgactccatcgacaccggcaccaagttattcgccgggtagccaaaatcgcggcgacgacgatgaggatgtatgtaagggtgggcgggtgctggctttgcacgagcagatcctgaaatgcccaacgcccgggtgcaatggtcgtggccacgtgcagccgcatcgcagtgtgcaccgcagcctatccggctgcccgcgggcggtaaggcgctcgggcggaaccagccgccgtccgggagcagctccactagcagcagcagcagccgatctggacaaacatgagaaggagctgcatccactggacaaactgaagctggcgtccaatcactatttgaacaataacaacagcaactgcatcaacaataacagctccaaactgagcggctctacaacgatgccgattattaaatcggaatatagtcctgttgccagcatcaaatcggagtataacaagagccccatgcactcatatctatcgggggaagcggccgcgcccgcccccgccgccccttcatcagcgtccgccgtccaagcgccgcgttccggatcggcaagcggtgcaacagccgcaaatggagagaacaacctgcatgcaccgcatctgagtcgctttgtgggtcttcagagtccgccacatcagccacatcttaatcctcacggtcatcaccagcaacaacagcagcagcagcagcaacagcagcagcagcagcaacaacaacaacagcagcagcaacagcagcaacatacgttgcaccagcagagaggacccttcatagagggcaacgatgtcccagatccttcagccaattatcactcggaacaccagcaacagcaacagcaacagcagcagcagcagcaggccgacgagcgacagcagcaatatgagcaaatgcgttatgcccaaagtcatgttagcgttggtccaagcggagaactaatggcgcccaatggaggcgaactatcgccgggtacggcgagaagcgcctacgaagcgcatcctggacacccgcatccgcatcccggacacccacatccacatccgcccgtctcgctgagttccctcagctctccagcttttacggtggatgctgtaacggcagccagtggagcgggcttcgagcgttacgatcccagcggcgtctgttgtcccagcaacggtcaaagggcaaccgcggcaacagcggcgacggcagcgggcgcttctgcggcggcggctgcctatcattatctgccccaaaccaccgacgagatgcaggcccagcagcagaaatatctgcaggagcagcaactaatgctggccaaggcggagcacgaggagttggccaacggcggacagcctctatatccgcgtccgatgtatcactatgatccaacgatgggtcctctgccgccgggcttttcggccattaatctatcggttaagatggccgctgctcaggcagcagctgcagcagccgcctatcaaaatcagcaacaacagcagcagcagcaacagcagcagcagcaacaccaccagcagcagcagcagcagcagcaacaacaacagcagcaacaacagcagcagcacggcaagcagagcagctcacccgcacccaatgtaagcggtgtgccggcggtggatctaagtggttccacctcggtaacgagtagcagcccgcacggtttcaattcgccagcctcgcacaaccaatataccgcccagcgtatgggcaacggtagtccgcagccgggagctagtccaaacattgctagtcctcaggtgcccagtccccagggacagacgttggacctcagtgtcacccgattaccccacagcattattacgagcccgcagtacggtgccgatggcctggtggtgggtcatgctcagggttttgtgagtggagcgacaggacctctgggtccgggcaatggtggaccaccgcgatcgccgcaaatggaaccagtggatttcagcgggcctccaagacccctgggctttggtctggtgggacacattagcggtccacgaccttacagtcgcgaatccacgccagacagcggcggatcacactatatcgaaacgtaccgggatcccagtggttactcaccgcaccctggctatgggatggtggtgcaatcggactatccacctgctggataccacggttacggtccggctgcttatcaatgcagtaatccgtacgccacggcagtgggtcccggtggctatcccacgcccgtttccggcggatattcgcccagtccggccacctgctactccatgccaccgccacaacacatcccgcagcacgacaagtccaaggacggattgacgggctgctcgcgctcggaccgcaaccatctacagtcgcactcgcaggagctcaagtgccccacgcccggatgcgatggctccggacacgtgacgggcaactactcatcacaccgcagcctctccggctgtccaagggctaacaaaccgaagagcaagcctcgcgatggccaggattcggaacccctgcgttgtcccatcccgggctgcgatggatccggccattccaccggcaagttcctctcccacagaagtgcttcgggctgtccgattgccaatcggaacaagatgcgagtcctggaagccggtggcactgtggagcagcacaaggccgctgtggcagcagccacggccatgaagttcgatgcctgcaccacggtggggagccagggcataaagaagcccaagttcgatgaggttaccatggtctatccaaagggttatacagcctccgacaacaccaactcccccgaaagccaaacactcactcgaaatatcctctga

SEQ ID NO: 10260 - protein, 1326 aa, DROSOPHILA
MALSKRPLTKDTPLSESNGNHTNGNDHETSIKRRKRCSRDDDSSLINNNNNNNNNNNNNNNNNSNSNNNNLPQKKRKQGGQGHIADSPESPTCGSLPTPLAKSNTDADQDDETLIRETQAALKSLSGSWPDSRGNLYRLQEQDENPPPFQNLFEEKQKYEAIGNPSHAIQAQASSPNPNSTLFSRFHRQKENDQARLNAASGAGGVVHLEAQGRGKKTPDEDQDPELEDTSSSASGQGVYTQAASAFKPPIDIIKRNYVAAAHAHYSAYNAAAAAESAAGLAYYGYAAAAAASQQQQQQQQQHQQQQHQQLSTAFDIASQLGEKQRPKEPMADGKQYTILQPAGIGSRAASVMQDIASREGVVGVPLVATPPSTAAGSPAAAVPAAGPSTPSTPAPSYSPGSQNRGDDDEDVCKGGRVLALHEQILKCPTPGCNGRGHVQPHRSVHRSLSGCPRAVRRSGGTSRRPGAAPLAAAAADLDKHEKELHPLDKLKLASNHYLNNNNSNCINNNSSKLSGSTTMPIIKSEYSPVASIKSEYNKSPMHSYLSGEAAAPAPAAPSSASAVQAPRSGSASGATAANGENNLHAPHLSRFVGLQSPPHQPHLNPHGHHQQQQQQQQQQQQQQQQQQQQQQQQQHTLHQQRGPFIEGNDVPDPSANYHSEHQQQQQQQQQQQQADERQQQYEQMRYAQSHVSVGPSGELMAPNGGELSPGTARSAYEAHPGHPHPHPGHPHPHPPVSLSSLSSPAFTVDAVTAASGAGFERYDPSGVCCPSNGQRATAATAATAAGASAAAAAYHYLPQTTDEMQAQQQKYLQEQQLMLAKAEHEELANGGQPLYPRPMYHYDPTMGPLPPGFSAINLSVKMAAAQAAAAAAAYQNQQQQQQQQQQQQQHHQQQQQQQQQQQQQQQQQHGKQSSSPAPNVSGVPAVDLSGSTSVTSSSPHGFNSPASHNQYTAQRMGNGSPQPGASPNIASPQVPSPQGQTLDLSVTRLPHSIITSPQYGADGLVVGHAQGFVSGATGPLGPGNGGPPRSPQMEPVDFSGPPRPLGFGLVGHISGPRPYSRESTPDSGGSHYIETYRDPSGYSPHPGYGMVVQSDYPPAGYHGYGPAAYQCSNPYATAVGPGGYPTPVSGGYSPSPATCYSMPPPQHIPQHDKSKDGLTGCSRSDRNHLQSHSQELKCPTPGCDGSGHVTGNYSSHRSLSGCPRANKPKSKPRDGQDSEPLRCPIPGCDGSGHSTGKFLSHRSASGCPIANRNKMRVLEAGGTVEQHKAAVAAATAMKFDACTTVGSQGIKKPKFDEVTMVYPKGYTASDNTNSPESQTLTRNIL

SEQ ID NO: 10261 - DNA, 2559 bp, DROSOPHILA
cgctgctcttttggccgtggccgccgccaagcccggtcacctggctgctgctcctctggtctacagcgctcccgccaccaccaccgtcgtccaggagcccgttctggccaaagtgggtgctgttgtgaagagcgtgcccaccgccgtgtcccaccagagcctgacccaggtgcacagcacccccgtggtggaggatgtggtggctcccgtggtcaagaccaccgctgtccactccgctcccgtgttggccgccgcacccattgtgaagactttggctcccgtcgcctactctgctcctctggcctactccgccccggtggcctactcctcgtatgccgctcctctgacctattccgcaccggtggcctactcggctcccctctcctacgccgccccagctcccctgctgcaccacgcccctctgacctacgccgctggctcctggtaatgtggtgaggatcgaaagagtttgaactgtgcctttctagttgaaaaaaaataaggaaatcgaaaaaagaataaattaaattgtgaataccaaacagatgatgtgaatttcttaatgatgtggggatatataaattaattctgaagtttacaaagaagcgttctaaaaagtgttcctacatttctgaatgttttaaaaacagaattaaattcatttgaagtacaaaacttatttaacaatggtatcgatgcacaataactaaatacttcaataacattttgaataaaccaaagcttgaattttatttgtatttatttatttgttgtcccagcaaataaacaaaaatttttttaattgaatattaaattcaggttgtctttaaaatcaacaaaatttagacttactgaaatgtgatttaagagacgcagttgcacccagccatattggtttggtatgttttttgattatgtacgtttccagaacaagaactaatgttttccaatattactatatatattccagaggctagttcactaaagctatcataggtactatgatattacctttacgtcgaacgtttttatttattgcatatttgatgtacatttaagtttgcaatacagaagaggtaatatgttacacataaccaaaaatgagattttctgtggagaagggtttctttgttcgttgttctacttcagataaatgctggggtaactggatactccccagattcccggctcgtaccatcccgcactgttgcccgcgtatccaagtggggcatacgagatcgaagtagctggagcataggctgccttcaggatgggcgtgtgatccacaatggggcgccagtagggacgcttctcgtgcaccactgtggaactctggtgtgagacggcggctggaagggcataactctcgtatcctacgacactgggagcatattccacgtgctcatagctgggcaagtagctggggcgagcctggatcaggacagcgaatactccgcacaaaaggaacacctaaggggaatagatattgctttaggtatttaccaaatattatgtgttataggggcaactcacaactttgaacatcttcgctggggaaactctgcaacaatgtttggcagtggaagaagtcactcgggttttatacaagtccgaccaagggaattggcttctttacgttagaattggcacaaacaatcgagccatcatctaaattttgtgtgtcttgttttttttttttttgtttttgccatactgatgttttttgcgtttttcctcaagccaattcccaggcccagatggctcattagtgacccatttgggcgtaactgagcgagcggctttcggccgaggcgaggctaaagccgaataggtaaataggcaaataaacaagccacccacttgtggatacctgttgcagcacccacacccattaaattggctcccaactcctggttatttcttctacttgactggcacacagatgtgggccagcgttccagccataagccattagcataaccaacagccaaactctttttttttcccctggctcactgactattttcccgactatttttgggtgccaccaacgcaaatcgtaggccaaacaccatatgtcgcatgtgtatggcctatactttcctctaactttgcttataattaaccaaacacgccaagattcccagcccatttgcggcgaccttggctctaatttaattaagaagaaaaaccaaagcagaaatatacaaacaaaaaaaaaaaatagaagcccacaatgagcgttttcagaagcgagatacataacatgacgctgacaggccccgaaacgatttaatcattggccaagttgctcttattgttggcatagcgactgcagaatgccattgttactgggattcggtccactttggtctctgtgtgcccgcagacattttggcccagccagcttggtagtgtaaatcactggttcgtttagcagtagttggcacaaatctttgactggcacttaccgccgggtgtaatatttccagctgcagaaataaaaaaccaagataaacaagaaacaaataaatatgttaaaaaaagctacataatggc

SEQ ID NO: 10262 - DNA, 496 bp, DROSOPHILA
tttccccagcgaagatgttcaaagttgtgttccttttgtgcggagtattcgctgtcctgatccaggctcgccccagctacttgcccagctatgagcacgtggaatatgctcccagtgtcgtaggatacgagagttatgcccttccagccgccgtctcacaccagagttccacagtggtgcacgagaagcgtccctactggcgccccattgtggatcacacgcccatcctgaaggcagcctatgctccagctacttcgatctcgtatgccccacttggatacgcgggcaacagtgcgggatggtacgagccgggaatctggggagtatccagttaccccagcatttatctgaagtagaacaacgaacaaagaaacccttctccacagaaaatctcatttttggttatgtgtaacatattacctcttctgtattgcaaacttaaatgtacatcaaatatgcaataaataaaaacgttcgacgtaaaggtaatatcata

SEQ ID NO: 10263 - protein, 113 aa, DROSOPHILA
MFKVVFLLCGVFAVLIQARPSYLPSYEHVEYAPSVVGYESYALPAAVSHQSSTVVHEKRPYWRPIVDHTPILKAAYAPATSISYAPLGYAGNSAGWYEPGIWGVSSYPSIYLK

SEQ ID NO: 10264 - DNA, 2624 bp, DROSOPHILA
tcgtccactgaatggcataaaacggcaaatttgctggccagcaacaacttactctcgccagattcattgggccatttttcgcattggcaagcgcttttggcccaaagacagcgagccacttgtgtgcgatacgtttgccacaaagactgaaacgaatctctgaaaggaagagagaagacagtcatatacgtaaagccatttgaaaactattacgcccaggagattcattcaagtagtgcggcatttataactcaaatgttgcccaagtaacaaaaaagcctaaaaactcgagcacaacggcaggagttcagctgtggagaaggatttccagaaagccagttagtgatgagaaacgaattaggaatatattatgtattccttcatggtagggctatataaaaataacgtacagacaattcaaaaatatcacatatatagttgtaatatgttatatctggctaaatcagtggtagttctttcttgtaaatgttgaaacactagaaaaactttgcccatctctgttgaagggtatgggaataacgaactatggcaggaatatgaagaaactctggatacattcgagccaatggcgaaaacggcaacacagaacggcattctctgtgcttgctttttattagaatgcgtccatggagacgtgggcgccagccattgtctggcagcctcctcctccatgaatccctatcgccttcagagcgagtatatattgtataatatatattgtgcctgtgcagctcgctatacatttcttagcacgtagttacctatggcagcaactggaacaacaatgccacttgaaacaacaataaaaagtttgttgaatacagatactcgtatatgtggacaactccctatgccgccatgaaaaaagaaagagaaataaaatataaactttctacacctaactggcaaaacatgaagccatagcaatctagtttgtaatgtaaagctgcttactaactacgtttatattttaaatacattttgtagcacatatttcaaacatttaatcgcactttttggtctaggttttaattgggcattatctttactattattataaaattctctatgatgaggctttttacactccttccggtttccaagtctcgacgaccgcgctaacatattgattacagttaggcggcaaggttaaaatcctggacttaactattggctcgttcttctttaaacaacgcaacatgttgtgcatatttctttcggcctttgccacgtttttaatgtcgggcgtcacaccgttagatcccaggactccacacaacagaagcaggatcaaaaagtgcgttccgtgcatctttacaacttggtgaatgctaacgattgatattctttgtagttgctttaaataacatgagatgaaatcgttaattggcataacaaattgaattggttaaaggaaaatatgttatagatattcgaaatggtttattacaataggggttatataacctagtatatgaccaaaacatatttctctactgcttcggatttatcaaccgattatcgatccaataccaggacaattatattttatatctccagtttattccaaatatactatatatttaaatccttgatcaatgctttttaatatacattaatttgagaataaaataattagcttgtacacaaattaaacgataacaaataaataaaaaacataataagttcacattttatagaatcttttattctttttctcacaacatagaatgttgtttaattaatatttattacattatgattcacattggaatcagcatctttttgggccacagcgaagccaataagcagcaaaaaataacccgcaaggaacttcatgtctatcagaagagaatagaaataaaacacagacccggtttttatatagtttataagccaagtgttgcataagccaagcgaatcgtttaattcttttaaacggtggccaattttaatatcgttaaatcatttttctttcggtcgtacgaaaatcaaatcttttgaatattacatttggtaaaattggttttgctacatttggttttggtacatttggttttggtacatttggcattggcacctttggtttcggtatcagcgctttttgaaacacttgcgtttttagcataaaatatatatattaaaatttatatttaatataattaggcaaaaacatctgatatactgtcagattgtgactagtcgtaaaagccatgaccattaataagttttggccaaacaaagcttcgaacaaaaggtttatgaaaaaatatatatggtatattcttgtatactaaaatagatttaatatttcaacttaaaataaaataaataggccattgctattacatgcaaacaattaagtaaatgttttattgaattctgtgcctgcaattatcaaaagctcatttactttgcggcgctgggactattgatgtggatcacattcttgttttcgttggtgttcggatccgcagattgggcgaaagccacaccggcaaagagcagaacaagtgcagaggtgatcttcatgtcggccagttggaattggaagtaatgacaagctaggggagtgctcttcttataaggcctgggttgcgtaa

SEQ ID NO: 10265 - DNA, 624 bp, DROSOPHILA
agcattgatcaaggatttaaatatatagtatatttggaataaactggagatataaaatataattgtcctggtattggatcgataatcggttgataaatccgaagcagtagagaaatatgttttggtcatatactaggttatataacccctattgtaataaaccatttcgaatatctataacatattttcctttaaccaattcaatttgttatgccaattaacgatttcatctcatgttatttaaagcaactacaaagaatatcaatcgttagcattcaccaagttgtaaagatgcacggaacgcactttttgatcctgcttctgttgtgtggagtcctgggatctaacggtgtgacgcccgacattaaaaacgtggcaaaggccgaaagaaatatgcacaacatgttgcgttgtttaaagaagaacgagccaatagttaagtccaggattttaaccttgccgcctaactgtaatcaatatgttagcgcggtcgtcgagacttggaaaccggaaggagtgtaaaaagcctcatcatagagaattttataataatagtaaagataatgcccaattaaaacctagaccaaaaagtgcgattaaatgtttgaaatatgtgctacaaaa

SEQ ID NO: 10266 - protein, 103 aa, DROSOPHILA
MPINDFISCYLKQLQRISIVSIHQVVKMHGTHFLILLLLCGVLGSNGVTPDIKNVAKAERNMHNMLRCLKKNEPIVKSRILTLPPNCNQYVSAVVETWKPEGV

SEQ ID NO: 10267 - DNA, 5812 bp, DROSOPHILA
gaaaagtgttcgtttctcgtggaactcctcctggtccagcagctcctggaactcacgcgttgtccagtggcggtccttaaagaaacgagtctcatttcgcttgtagaatatatcccagttcctctgggcatcgatttccaacttgttcgctttgtattcgggcacgagaccacgcttgttttgctcgtccaacttttgtcgctccaccgccgacagttcctttgcttgggtggtaataacgtccggttctaggggttcctaagaagttttggaattaccaactatttgccatgattcggaaactgttttcttttatataccatgttttattgaagcaagtttcttgtttgattccaatgggtaaatctttccacgtgtatgtttattatcttttttatctgttgtctattaagatgttctttatgtctttatatattttacattttcttaataatagtttaatcctgatatttaggataaaacgtcttttttattatttttatgttttggtttccaaacgaattagaaatgtgtttgcaatatggtcacactgccttccatgggcacaaaaaaagatttgagaaggggtcaccctttttttatttttaattgtattaagaaattatatagaatgaagtgttttcatattaatcttgtagatttacaataatttggtgttaatgaaatgtattaagtattttattccaatggtcatatgtcgagcaaggccaacttcgatagccctaatcgaatattaaaaaagaaatcccgcgctgttatcggttttaaattggatcgatcgttactgactgaaaacaattcctttattgcattgagattcttaaagttataaagcgaacattttaaatacagccattatgaaaacaacaaataacaaaagtgaaatgataagcaatggcggatagttagccaattgctttggtctttggtcgcagtatgggcattaggtaataccatcaaaaagatatccggttaccagttatctgcccatgatggtcggctcgtcggccatggccacctcgtcgttgggcgccttggcacccttcttcttgccagaataccagaggaacataacaccgcacaggatattgtccacgaacgtgaaccaggccaaataaacgccgtagccataactgaaaacggaaataaaaacctttgaatatagtatacattatctgattgctgacatacgttagttgcgccccttcaggatacgcatagaacagatgctctttggtgtagtcaatcgaggagaagagcacctggagaaccaccagcgccgtggaggcagccaccaagtggatgccacccgccagacgcttgaacatgtagcgcggattcatgaacgtgtagaaggagaagacggcacccaagctcatcacgaacagtgttatgcaggcaaaggacgcctgcgtccggatatagtctgaaagggagtaccaagcgactgccaattaggagccgtcgtatgtgaaactcgaccagtggtacctacccaatagttcgtcatcgaaaccgggctcatttcgcagagcattggagttggggaacatgtcgatgtacttacagcgctctggggagaaagattagttaagcaatcaaatggcttctttgggttttcccactcacggttcggtatatagctgtagtaggcgggctgacccttcttgggcggcagcggtggcactaggataagtatcacccgttcatcgttaagcacgtaggccgggatgctgatatcccggatgtaggtgcccagcagtcgtaccaccagggggtaatccgtccagttcctgaagatggctaactgcgccacctccgggatcacgtagtaggaccaagtgttgttgtacttaactcgctgcagcgccgaaccaaaagtatttctctcaatgattccctgcacatccagcggattgatgggtatgggcttaatggccgtggcattaaactgccgctgattctcctcggtgttcatcaccagggtgcgaaaggcatggcgcagcgtctgaaactccatatcctcgccccgtacccaatgggcaaacatgtggcgacgcgccgattccgtaaagttgtccgacgtttccagcttctcgtgcgcgaactccttgatgaagtccatttgcgagagatttcgcttcgcctcgttgatgttcgtctgcgatgtgtacgacatggagctaaagttgcgcaccacctgggcattgctcatggcattgggcactatcgtgttccggcaatggcgccacaatcccgagtgcgaggacatgaagaagcgtcgagattcgggtataaaaatgcctttagaaaacggaagtgatgttgtagtttgtgagtaattggttgtacttcagttaattacattaccaaatggttaacttaccctttccgccggatatgatgatccagtgatcggtcgagatggccactatccagattagcagcgaaaccaccatgagcagactgcagccgagcagcacacgccgctggaacatgtaggcctccatcagcggacgtcgggcctcatcccggccgatggtcgacgtggacacgtcgcgcttcatcctgattgtgtcgtcgctgtttccggatcacgctccactcctatggctctctggacgttggcaaggggcaatccacacgcacatggaacagcgcacgttcctgggggaggaagttaacccacttattgtagtcgctcccccggcaatgaagtcatgcggacacatcgcacacatgtgggacattgccgggcgccgccgttttcatcattcggcaggtgtttcaccgggcctacagccccaacgtccctcatccgatcccagacctctctaatttaaacaatattttatttttatactaagcaaacagcggcaggcagagcagcagtgttgagatttcaaaaaaaaaaaaactggcaattaaatatgttttaagggaacgacggaaagaccaacgattttagaaaaatattgagaattattttggaaatattgaaatggaactcataaatgtgatttattagataatggagctaagggaaactgtagtctactgtttatgtactttgcgtttattacttgttattttaaaataaacgtttttaatacgttttcgaaataaatgtgatttctaatatttcacatcacagtagtgtactactactgtagtttagtttagttttatagtttttaagataccctaagctgtaagttcgcctcacgcaaatccgcgaaaacgtgcccattaattatgttgttttggagaatccgtgctattttcttttattttatttatgtgtttgcatacaagttgccaagacaaccagaaattcccatactttcgtcgttcgtcgctggtctttgacagaaattaagcaaattagtggacacattcaggcgaaaaaaaaaaaaaatagatgacaaaaatgcgaattccttttcaaaaatgatttcgcctctttgcggaatatttgcgagaattaggtgcgcctccgccgagtgggtgctcggatggatgggtagatggtcgggcagttggcgtggcaggtggggattaggcggcggatcgctgtgcgtgcacaagtgtcatatacatggttagtactgcctgccatgtggatgccgtcgaaatgttcctcctttgttgcgctaccattatttggctaccaaaaatgccatcatatacatttcgtttagttgtgggggaaaacccataaagaaaaactcaaagagtcgccagtttattattctccacttccgcgatctattccgggaatagatcttgcagcttgcatcgcggagttgcaggcacttgcgtcactgaagtgcgtcattgagctccaacgcatgtgccactttgcttcgaatgcgattttctcgaatttcttttctagttttctagtttttttagccacgcacaaattacagccatcagtttgccttatttttagaacgacccaccgcaggcttagctgattcctggctgacaaagtggaggaggcatcgtcgcatcattaattcacaactcattgtcatctcattttgggcgcgaatatattgacacttttgacaggcagaaattttagatattttttttttgttttttgaaaaacttaaagcacagcgaaataaatctcgaaacgaccgtccgtccgtctatttatttattttgtgtttcagcctttgttttacttgctgtcggccattgtatttttggtctgtgccgtattattcagacgtcgcagcacacgttgaattccgccccggcgtaaaagaagcgaattttgagaaatgtgtatttaattaatgccccgcataaataatgccaatgccagcggatttggatcaccaccgcctcccatctcataaactgtcaggcgttgttaacgtccgtcaggtatcctgatttatcgttatataagaggagcagaccacatataccctcgatgtttaccattaaagctgcaccgatgcaacggagatctctggctggctggctgactggctgactggctagctggttggctggttggctggcactggctctggccccagtctaattgtttatgaacgatatgtttggtttttatgagctgcccggcccggctcgtctaaaataaaatttttggttaaactaccgactaaaaatcgaggcgaacaagcgataacaaccgaaataaatggctatattgcccgtgaagcgagccacaaaattcgaaataaaagagcgcgatctttgggctaacgatcggatcgcggcgatacggctccgtctgctgctggccagggcagagcacagactgactggctactagccaccagtggttgtcgctcgccagccttttccttcgcctttctttttcggggagcgcgacgagccaacaaaaagaaaaacaatggcagccattgttagccagcataaacataaaatcgttctgcatacatatgtacgccacttgggagcggattcggacgtgggatttgggcagggcggagctgccacctgcagcaaaccgacgaaggaattactcgagcagacgtcatcgttgcttaattacgccataaacatgaactcaactccgccgatgaatccgccgctgctgcggcagtgtgcgcacaaatttagaatttagatggatttaggcatctcttttttaatggtacacagagcatggtacatgggcagctatttttatatcttcgctagccacgccagccgaccgccacaattccgccccgttttaccattaaacgttgacatcgcttttatgaatgcctttggctatctgttggcatgccattagcgcatcgtaaagcccgaaaaggggggcaacgactgcgaggagcatgacgtggtgtgaataacatctaaccacttgttggccagccagtggtcatggctcgtttgccaatttctcatgggtagacgtatgctgtatgctaggtcatcgaaactattactgcctgtcagagatgcgtagcgctcccatgtccaggttgagttcggtgaggatgtcgttgggcgcggagccctgcatagtcaggccagcgatcacctgttgcgcctccggacagttgatgcaggcgtttcggatggccaagatgctccactcccgcatcactgagggataaaaagtaaaatgttaagctatgctttagcttgtttcaaatatgtttcttacatgggtttcgagcatccatcgttgtgcattcaagaagcgtgggcagcagctgtgtgtccaggcagtatcccttgttggccttgttgtcatacagaagattggcgg

SEQ ID NO: 10268 - DNA, 1756 bp, DROSOPHILA
ctggccagcagcagacggagccgtatcgccgcgatccgatcgttagcccaaagatcgcgctcttttatttcgaattttgtggctcgcttcacgggcaatatagccatttatttcggttgttatcgcttgttcgcctcgatttttagtcggtagtttaaccaaaaattttattttagacgagccgggccgggcagctcataaaaaccaaacatatcgttcataaacaattagactggggccagagccagtgccagccaaccagccaaccagctagccagtcagccagtcagccagccagccagagatctccgttgcatcggtgcagctttaatggaacgtgcgctgttccatgtgcgtgtggattgccccttgccaacgtccagagagccataggagtggagcgtgatccggaaacagcgacgacacaatcaggatgaagcgcgacgtgtccacgtcgaccatcggccgggatgaggcccgacgtccgctgatggaggcctacatgttccagcggcgtgtgctgctcggctgcagtctgctcatggtggtttcgctgctaatctggatagtggccatctcgaccgatcactggatcatcatatccggcggaaagggcatttttatacccgaatctcgacgcttcttcatgtcctcgcactcgggattgtggcgccattgccggaacacgatagtgcccaatgccatgagcaatgcccaggtggtgcgcaactttagctccatgtcgtacacatcgcagacgaacatcaacgaggcgaagcgaaatctctcgcaaatggacttcatcaaggagttcgcgcacgagaagctggaaacgtcggacaactttacggaatcggcgcgtcgccacatgtttgcccattgggtacggggcgaggatatggagtttcagacgctgcgccatgcctttcgcaccctggtgatgaacaccgaggagaatcagcggcagtttaatgccacggccattaagcccatacccatcaatccgctggatgtgcagggaatcattgagagaaatacttttggttcggcgctgcagcgagttaagtacaacaacacttggtcctactacgtgatcccggaggtggcgcagttagccatcttcaggaactggacggattaccccctggtggtacgactgctgggcacctacatccgggatatcagcatcccggcctacgtgcttaacgatgaacgggtgatacttatcctagtgccaccgctgccgcccaagaagggtcagcccgcctactacagctatataccgaaccagcgctgtaagtacatcgacatgttccccaactccaatgctctgcgaaatgagcccggtttcgatgacgaactattggactatatccggacgcaggcgtcctttgcctgcataacactgttcgtgatgagcttgggtgccgtcttctccttctacacgttcatgaatccgcgctacatgttcaagcgtctggcgggtggcatccacttggtggctgcctccacggcgctggtggttctccaggtgctcttctcctcgattgactacaccaaagagcatctgttctatgcgtatcctgaaggggcgcaactaacttatggctacggcgtttatttggcctggttcacgttcgtggacaatatcctgtgcggtgttatgttcctctggtattctggcaagaagaagggtgccaaggcgcccaacgacgaggtggccatggccgacgagccgaccatcatgggcagataa

SEQ ID NO: 10269 - protein, 440 aa, DROSOPHILA
MKRDVSTSTIGRDEARRPLMEAYMFQRRVLLGCSLLMVVSLLIWIVAISTDHWIIISGGKGIFIPESRRFFMSSHSGLWRHCRNTIVPNAMSNAQVVRNFSSMSYTSQTNINEAKRNLSQMDFIKEFAHEKLETSDNFTESARRHMFAHWVRGEDMEFQTLRHAFRTLVMNTEENQRQFNATAIKPIPINPLDVQGIIERNTFGSALQRVKYNNTWSYYVIPEVAQLAIFRNWTDYPLVVRLLGTYIRDISIPAYVLNDERVILILVPPLPPKKGQPAYYSYIPNQRCKYIDMFPNSNALRNEPGFDDELLDYIRTQASFACITLFVMSLGAVFSFYTFMNPRYMFKRLAGGIHLVAASTALVVLQVLFSSIDYTKEHLFYAYPEGAQLTYGYGVYLAWFTFVDNILCGVMFLWYSGKKKGAKAPNDEVAMADEPTIMGR

SEQ ID NO: 10270 - DNA, 3332 bp, DROSOPHILA
attaaaacagtaggggaacaacactgattgttagaaaagctgacaactcttgcccagacaactctgtcaaacaatcgataaatcagtcacttggctcggctgtcattacgtaaaaaaccatatagttttttttctgtgctgcttgtgaagaaattgtgttccactaactcttcgccttacgctaaaaatggctgaccccaatttgcacgacaatcaagtaataaaaggtttgtagtctatagaatattaataaaaattgaattattatctacgcttttactttagatggtgaatcttccgaaagctggcctgcattcaataggaggttggtttaggtacatatattctgcagaacttagtaatcccatatggcttttccaggagcccgaatccctctttctccagcgttgatcaacaaggaaataaaactaaggcacgaaggcagcaccaaagccgttcacattcttttcactcaacagcaaatagtgttcctgaatcgcagggacctcttgaatctcgatctgatctgaacgccaagacatcatcgaaaagcgaacgaccatatatttccacatccaattcaagctggacctctgaatccagctccggaagtccaccagattcaggagaatcgtcttcgttttcgacttcatcttcgctttcatcatcattattatgtgctccagaaccgaaatctattaactggagcaacccgaaatcttcttcaaatatctcaaatgaaaccacaacttctgcgggacaggttggcggcattccgagcttttcagaaagtgatgaccagggaagtgtcgactctgaaacagtctctaacatcagaaaatcaacttccctcatagaacttaaagacaatttcaatacaatcattgacgaagataataatcaacagctctctaacgagggcaacatattgtcccctgggacagtttctatttccaattttccaagctcgaatgaagtagcaaatggattgattgatgagatggaacaagacctactctcgaagcaacattctacatcgaccccaataaataaaagtaatacaatggaaaaagaattgctcccattgcaatgttcttcatttccaccgacatcatccgaaggtaatattttaaaacccagggtcaatcctgtgccattaggtcccagctcaaatacagagtatgaatcaaatggaaaaaattacaacattgaaaaaaggttgtcccaattgcgatatagttcagatgaaaaggaatccgatgtcttgtcgtatgcctcttctgatagtctcgatttaaatttcgattacggtgataatgcaaagaatcaaaatggaaatggaatgaatggagaggtaaatggtgataaggagtcgcaagttcttgatatagaagaacaacgcaaaccttttgaaaaagatgtagcagttaagttccagaccaccataacaacccaaaattgtggacttctaaaaggtccatcgcagtttctgaagatgccttatttcatacccgtggaatccaaggcatacgtgcctgaaacctttcaggatcgcatgactaagaatgatttgaaggacgaacagtcacgcgaggatttcataaatcgtctaaaggcaactgttaggtggcgcgagaacgaaaacaaaaccaaggagtccaatgcgaaaattgttcgttggtccgatggcagcgaaacctttcatgtgggcaacgaggttttcgatatgatgcatcacccggtgaccgttaaccagaaccatttgtatgttcgcctgggcagcttctaccagcctcagggtttgatccagaataagttgactgtgcgtcccatgctggactccaatttcggacagagtcatgtccaggccttgcgtaatcgagccacgaataagccacagtctgggtgcgttaaggtgataacgaacatgggctccaatcccgagcacgatcatgatcggcgcatgaaggaggaattgtccaagcttcgccaggagggtcgtgaaaagaatcgcgcgcttatgaagaatcatcctccgaaacgtgacaggcactatcaaggctccgatcacaatgtggccaaaaacgcaggggcattcgaagaggacgacggtgagggtgcagattgcgagacaagctctgcattggaggttacgaatgaaccaatgcgcagcgaggaagataccgaagatcatatggacgatgatgcttcttggagctcacccaattcccaggaggaaggaaagcaatcgagttccgaagacgatctcccgatcggaggtgctatccgcaagcccacgcgtttggtctattccggatcagattccgactaaatattaaatagccgctagatacgaaatctcaataaacatgtcattagccagcacgcaacaaagcgtagagccaggagtagctgcaactgatatttaattaacaatttctcgcgcccacagtgggtgtacggccattgccttaattagggggcgtggcagctgaggcaggcagacattggtagtcggcgcagaaattgctaaaggtcacaatggggtcgtgattgcagcgcggagcactctaacccaaatgccattgtccgactgccaaactggccggcataccaacgcccaaagcaattaatggtaggtgcattggattgctgcctggtgtttttgggagattggactcgtgactcggtgggtcgtatgtgggttttgggggcggcaagtgggtggctttctggtcagcggctcagtcggactttgctctttgattccagctttatatttgtcaccgccatctcaggtagccgaaataagatacatacatacttagcttgttaaaaatttgaaattaataagtactttatttgttagcaaaaggcgttatcctgaaaatagttatacatttggttgttaactatgattattttgtctcattaagtttttgttctacttgtttccgtgaatatcgctattgttttaattgaaaagtattttactgtatcttaaacacaagtatataacagaataacagattcaggcgcttgtattcttgttcaggaaccactagccgtttaaatctagctatgtccgtctgtccatatgctctataagattgtcacgcacaagctccatataataaaagttctctgcaatagattttaaattcattttcctccaagcctctaggcaaaactttccttttcagttaacaacaatcccaatgagaaacttgagctttgatgccgattaattaacagtggacccagcattattgattttcgagatgcattcagtcataatgtgaatggtgagagttgtatttgctcatttaact

SEQ ID NO: 10271 - DNA, 1332 bp, DROSOPHILA
atggaacaagacctactctcgaagcaacattctacatcgaccccaataaataaaagtaatacaatggaaaaagaattgctcccattgcaatgttcttcatttccaccgacatcatccgaaggtaatattttaaaacccagggtcaatcctgtgccattaggtcccagctcaaatacagagtatgaatcaaatggaaaaaattacaacattgaaaaaaggttgtcccaattgcgatatagttcagatgaaaaggaatccgatgtcttgtcgtatgcctcttctgatagtctcgatttaaatttcgattacggtgataatgcaaagaatcaaaatggaaatggaatgaatggagaggtaaatggtgataaggagtcgcaagttcttgatatagaagaacaacgcaaaccttttgaaaaagatgtagcagttaagttccagaccaccataacaacccaaaattgtggacttctaaaaggtccatcgcagtttctgaagatgccttatttcatacccgtggaatccaaggcatacgtgcctgaaacctttcaggatcgcatgactaagaatgatttgaaggacgaacagtcacgcgaggatttcataaatcgtctaaaggcaactgttaggtggcgcgagaacgaaaacaaaaccaaggagtccaatgcgaaaattgttcgttggtccgatggcagcgaaacctttcatgtgggcaacgaggttttcgatatgatgcatcacccggtgaccgttaaccagaaccatttgtatgttcgcctgggcagcttctaccagcctcagggtttgatccagaataagttgactgtgcgtcccatgctggactccaatttcggacagagtcatgtccaggccttgcgtaatcgagccacgaataagccacagtctgggtgcgttaaggtgataacgaacatgggctccaatcccgagcacgatcatgatcggcgcatgaaggaggaattgtccaagcttcgccaggagggtcgtgaaaagaatcgcgcgcttatgaagaatcatcctccgaaacgtgacaggcactatcaaggctccgatcacaatgtggccaaaaacgcaggggcattcgaagaggacgacggtgagggtgcagattgcgagacaagctctgcattggaggttacgaatgaaccaatgcgcagcgaggaagataccgaagatcatatggacgatgatgcttcttggagctcacccaattcccaggaggaaggaaagcaatcgagttccgaagacgatctcccgatcggaggtgctatccgcaagcccacgcgtttggtctattccggatcagattccgactaa

SEQ ID NO: 10272 - protein, 443 aa, DROSOPHILA
MEQDLLSKQHSTSTPINKSNTMEKELLPLQCSSFPPTSSEGNILKPRVNPVPLGPSSNTEYESNGKNYNIEKRLSQLRYSSDEKESDVLSYASSDSLDLNFDYGDNAKNQNGNGMNGEVNGDKESQVLDIEEQRKPFEKDVAVKFQTTITTQNCGLLKGPSQFLKMPYFIPVESKAYVPETFQDRMTKNDLKDEQSREDFINRLKATVRWRENENKTKESNAKIVRWSDGSETFHVGNEVFDMMHHPVTVNQNHLYVRLGSFYQPQGLIQNKLTVRPMLDSNFGQSHVQALRNRATNKPQSGCVKVITNMGSNPEHDHDRRMKEELSKLRQEGREKNRALMKNHPPKRDRHYQGSDHNVAKNAGAFEEDDGEGADCETSSALEVTNEPMRSEEDTEDHMDDDASWSSPNSQEEGKQSSSEDDLPIGGAIRKPTRLVYSGSDSD

SEQ ID NO: 10273 - DNA, 21509 bp, DROSOPHILA
aaataccaaaatatagaggaaaaggcagggaataagaaaagagatacaatttatattcgatgaatttaacacaaagtgtgagcgagattttttatgtttaccttgtttatttttgatataaacttcaagcttagattaaattttcgatctccagttccggtttcgaatacttaatcgcattaaatgattgatgagtacaagggacgaccgattccgaatgacaagttacaaaacgcttattttcatcacattctgctgaaactccagaacaattccaatcttagctacaataattttcacctacaaatatcaagaaagtcgcataagatgaatatagcatattgaatatgccgcaacagccgctctgtgaggtcatcaggacaagtattccaataggataatgcaggcatctacagctctataagtaatccactattaacgaacaactacaatatacacacctatacatatatatttatatattccaagtagattagtcctagaatgcgtgtgaattttaaataagaaaatctaattttatttgcagtatgtggttatttgatcgatgatcaaccataaaatgtatgtacttaagcgtttgtactattaaaaagaacgctactaaattatgaaatagcggaaatggatccgcatattttgccaaatgagaacgaaactattttcttgggttccaatttatacaataactacgaaatatcatttacacggttgtttccaggctacacaactaagtaaatcattttagctccacgtatatataaatatatttaaaagtttttcataaataaatgatagcaaagtgctagcacaaaaatgagttttacttgattcaaaactggcgcctttcatattggagcttttaagctcttgttaacatactgttaactgtactgtttgtgtgtcgctgttattaagatgcgcaaacttccaaaaccggaaatgaccatattttccatacacataaaccattaaaatttcatttactttttctttattttaattactttttcgttcacgttcataaatgtacatctttaaatggggatttttcctcgcgttcttgggaggttttttatcgtttttgtgtgtgttttagtttcatgctttcgatttacggctttttcattgcgcgatttccaaaaagtacattaagtaaactacagacatacgtgtatataatatgcattaataatagttatatatgtatatatagaattcaaaaatgtacaacattcatttttaacaaaagagccgggaacacgaagttgcgcgccccggcgtatgtagttaaaaactcgaagatagccatagaaaaaacaactaaagttacaacttaaggttagagacttattaactaatacacatactagtacaatgtcaatgccatttcatttcttatcattttcaatcgatatttgtatatatgcatgcttgtaatttaatgggcgttatgctctatgcttctttaaaagtcatctttcaaaattgatctcacgatttcgctcaatctcaaaaatgtgtgttgtcattcgtcttaacttatgtgatttctgtgatgtttttgagtggttttcgaatgccttgcatgattgcataacaaaatcgtaatagactaagaaaaatagttacaatattacgcatattgtagtttactacttaacaactaaaaaactgctatcaaaacagatttacaaataaatattccaagtgtgagtttcattcgtaaaaaccttcgcgatccatccgacccattcgtttgctggcaaaacattgagcaacatttcttgtaagatattcttgaatattatcggtaaatggattatgctggctatgatcttagcttattgttagattagagctgtattaaactgttttgtgttctcgtgtctgtcccgttccatgcggcaaatgcatttgaatatatttcatgtttccattgagcacgtcgcggtgttcggtagggcgttgtattttttgggggagttctaggagggatcgtcgctcttcactgtcctgctgttttggctcgttcctacgtctactttgctaactctgaaaactgtcacaacatccgctgtcctcgtcatctccgatttacagacgcatatcgttgtatttggcaaaggccttgcacagagcaaaggccagaataatgaggaccaggtgcacaatgcccaccgcaatggccacgatgaccagttcacgttgccgaatcagccactcggtaaacacctcatagcagccctaaaacgatagacaacattaattacgaattcgtatctatgtagctatcttatagcataccttcttgtagaaactgttgctgtcgctggggttggttgtacagtcctcgtcgcgtggcaccaacttggccacatccttaaggatacagcaggcatcgggaatggtgcggttacccttgccgttcacccacgctggagaggcatcaaaatcgtgatagtcattgatgccacagcacccaaagttgcccatcagttggttccacatcagtgaggtagcatccacattctcgcccagcgaataactggtaatggtcgtctgcaagaagtttttgctctcggcacgaactttgtccttgaagaaggcacccaatccgccggcaacgatctcggcaatcagcagcaggatcaaaaaggttccatactgtgaagagagagcgattttcatttaatgaatatttaaaaaaattgtatttaaattgtatctgcagctttatctattaagccacattttctagtggctctttatgatcacaaaaattatcttcaatttgcacgcattaataaaaacttcacgcttaaatataaatgcgttcattattgcataatacatttattcaatgatttcttgttacggttgcctggtttatttataactctcgcacgcggttgacccaatttgatgggcactttgtgagccgtgcagaaaaatctagccgttttgaccctgagccaaatgtgcagcatttgtcggctgccgctggtggtgagttaggcccaagtacacatttagccgcaaaagtccacgtatagatacagatacagatacatattcggttcaaaaggggcgagtgggcgaagggatggttgggcggatgttggggaagcgcgcagcatgcagcacaaatgctgaaggtcatttcttaatgttttcttacatgtttcgaaaatctcttgtggcttttcattcttctactctagctaggtagcgcacataaagaaataaaatatacaacaacatttcaaattatcctatacctaagagcagtttcattatgtatatttcttcactgcaaaggaaaaaattcagcttattgcagagcatctttcataatctgagaccaattaagaagtcttttttctgagtgcctccgtaatgttgtcgccctcgtggttgtcgttgtggttgttgccctgatacgctgctctgatatgctcggttttagctggttgtgttgcggctgttacgcctggcagcatttcattttagccatcgtgggcgttggtagccgcctgcctgccagtgtatctgtcagatacacatgcaagctcaccgaatttgcggcctatggagagcagcttcactttgtttgcatgccaagtgtagcgatttgaaaccgtttaggtacgcgagtggctgcagttttttttttgctaaataataaattgccgtcttataaaaaatcaatgctaagacatgttagccatgccaagagctgagccggccttcagatgcgttaaccaaacgaccttggctaatttaagtgcaaaacccaagagggtcgcatgcaggtcgcgtgttcggcaccgttgcgcatgcgcaaagcccttcccctcgactgattttccccttctcgataaggtaaattaaattcacctgttttgtcgctgcaattaagctgaccaagcccagaaatgtgggcgcgtccggggtaagtaatgcaggtaaatgtgataaaacggtttattaattaccacaatcgccccgagtgagccctctcgaccatagaaagtctgtcctctgtccgtccctctaggccacttgtggtgcaaatgtaaattattttccagaccaaagaaattacaattccactcacaggcgcagaccacagagacatggccaagtgaagggcttgtcgccgcttaaccaatcgttcaaacatgccctggcttcacgatatggttgtatctatatgcacgataattcacctatagatacaccccgctatgtacaactttctctcgagtgccgtcaatagtttttccagccaagagtcaaagtcaaatggaaatcctcttcaactctttaaagttattcggtggaaaatgcaaacaaacgctagtggcaatccaccagctccactccccggagccgtgaatcttcggtggctgtctgtcatccattacaatgtacccgatgatgcaagctcgtacaactctgattggattcaatgattgggcggggaaaatgtaaatgtgtgacaatgcttctcggcactgtatggtagtcactcgctaatgaaaagcaaatttgtttcctcctcaagaaatcgggtttatttccaatatattcctagttaaatttaaattttgtgtttggttttcagttcaaatttgaataggtggaaggaaacatttaatcaactcttatttagttccatcatttagtatctttatgttgaagttaagatactcataacacaaaaacgtgacatttaatgaagatagatacaatagtatttaacaataaatttaaattgcacagtaggcaactttgccataaaaatcttaaagacctgcaaatgactttcagttttgaaacggactgtctgtgtgtccgggtccaaacctccaacacagattccattcgatcacttaccgtcgacagcagacagcgggactcgcgcatggctcccagatagcccaagaagctcatgaagaacatgacggctccgatgacgaggagcacataggccagctgctctatggcctgtggctgtgtaaattgctgtaatggaaacgaaaaagagcagagcagaaacacgaatcagaaatgtgtgggtaaattcagatggggtccacgctacgtatacgtaattaaactttgaactggccaaaaattgtctccatcctcattcgtataattgaattatgtgcacattttacccaattgccgtaggcaaattgtcagatctgagatatgtatgtcttttaaagctagagtgcaagttcattgaccaaacgcaacccgtgaaacatttccgtgtaaaggttctcaattagccttagcatgtttatcttaggtgaccccacaattagtaaccgtatggacatgcacttttcatttgttttgccaaagcgaaaaaccctttacgcccagtcagatagcaaagggaattttcactacaaactttagttaacactgaacatgcaaactttgatggaaattgtcatagttgaaaaagtttatctgtgtgaattgagtaaaggaccccagagggtggctttaaacaacgatttgtacatttctaaaagtttagtcgaatgttgtgtagtttatattaaatgtagatgtgtagacacaacaacagaatgtgtctatatgcacttaacccatgaaaaatacattttgtcatccattacaaataaggttaagaaaaatttactttgaatatgcttgatgtgtataattatagattgatattagttaaaaaaccgaaatgtaaaagtagtggaaaagttcttcctgtcgctctatttaaattttagattccactactttcagttccattgtatttctgctgtcttatatacaatttcgacccaattaaagtggcatttatagccatcccctattgtttgttagtgtgtcagcacagtgcattgtgcactttgattagcgttttcgtgcctcacattttgaccatttccacccggaccgcatgtttacaatataattatatttttctaataatcatagtaccagtgccagctattattgaagcacctgcacgtgaggttgatctatatttcggggttgattcactacgatttcgatatgtgaattacacacttcgatgggttgcgtataaattgcgttgtaactgggtggaatgcagtgctttcttggggccttttcgacataaaaaaagggggtgtttctgcggcaacactttcacccggagttgggcgggattttggggaaacccccgtcttcacttggtcttacctcaatgcgctcgctctcgaccaacttgaggagagcaatcagcgagtgcttgtccacggccagccatagtccgactccgaatataattgtgcctagcacctgcaatataaatatatatataaaaaaaaaacattaaacaatatatatgtatatgtgtgtagtggtagtggtcatttatgtgtgtacactgaaacataaagcattaaacacaacatagttccccccgctggacatgcaaacgcagtttgatgattgttgttattattatgacgttgcctgcccatcttgattgcatttgaaaatgccgatgatgacgtttggcaatcaacatgatggtaatgatgattatgatgatgatgacgatgttggctgaaagtcaatgaaccgccaccgccaagttgaaaatgcgggaaaatgcaaaaagcaccagcgcatgcgcagagatttgcttgattgagttgcaatggaatttggatggatgggcgatgtggcatgggataccatcggatgacatgaacgcacctctatgcgttacccatatgcattacctggtgcatatagcataataaacccccttcccacattacttcatctgtacttacgaaaaatataaaattgaatatgcaaagcaaatactttgcacaccagactccgcagtcgaagaccattttcgttgttttcgaaatcttggggctgttttcctccacggagctaccttcaactgcaatgacaaagagaaattccacatttagcactctgggttgcgaggtttctaattgaattaaaatatttttacttaatttacttaatttcatgttaagtgccgcacactcggttgggcacagcacacacacacacacacgaaaaaaaaacatacagaaaagaaagtgtcaaaggaaataaacaacgaacaaacaacataataacgtaaataccaagaagcgtatataaacaagaaaagtgtttctagccaggttgcatttcttatcggccatgtttgtatgtacgtgccccgtgcctaacaaattaacatgtaaagttggcccttcaaaattagtgaacgacttcagcagaaaatgttcgaaacgaaagaaagttcaatttgtaatacctcaaatatgtagaattgtaatgaaatggtgtatggctatagaaagattaaaaccattttttttattattatgtattacatttgtatacatttatagagaaatttaaaggtattcccattaaagagctttaaacaataaacatatatctataaatatgtattttaaacaagtttctaaacaatttcgaaatgcaatttaactccaaattagttaaggttttagtgtgtactaagcacaccgcctgtcgtcatcagataacgagctacgttaattccaagagcagctaaaaaattgttcaagtaaattacaagctttcgttcattcattaattcattgagtcggcgggaatctcaatttccagcatcttgttccacgttaactttcttattagcagtagaacaacttccccgctttctcctccccctatttcttcaccatttctccctcgcgcttagcacttttcttttcagatgatgctgttgttgttgccgttgccatctggtttgagccaagttctcagctgtagctgtacatgtgtgcctagttatttgggtaaatatatatacatatgtacgtatgtatgcatgcatacacatacacaaacaatgtcacgagctattgaagttggaaaagtagagcactcggcagcggagctaagccctctcagactctgggtttttcagtttcgatgctgctcggtgttctgttcacttctgttttgtactgtactgttgccaagtcgcggctacgggcaaaacattttccttgccaacatttttgttctcattcttttgcctgggtccctttgagcccggtaaaagctgggatccacgtcccgctgcccctcttgcagtcgtaatgatgttttggccgaaatgtaattgtgttcgcacacccacacagttgcggtcaaagaaatagcactttaaatgtcaatttattttcgaaaccaagaggcaaaagcaaagcaacatcttaagcatttatttgacataaattcgatttctttgagtttttaatttttttgttaaataacgtttatggtgcaaatattaaattctattattatgactttagcttttaacccagagaggcactgagtgcataaagtacttgagtgcaaaacgctttccagacctacatatgtgtacatattcacataagccgagtttctgtgggcgccacattccccactttagcccgcataccgccccctgttttttagcccacccaaaaacccttcaacacaacaaaagtttatcacagaatttttaattgcttttccattgtttcagacatccggcgttctggctttaaattagtttaaattttcttgtgataagacatgcaaatgactgccaaacggatgtgcatataagcgcttaatggttgtgacattgaatttataatatggacttggccaaaaacaaggtattgtttacgaatattgacgcttaagtcatttgtttgcgggaggttttaagtcaaaaagaagaatttgtatttgcattctaatttgaattttataccagggattttagtatttgcataaaaccggcttacttgataacaactcaagttgaaggctctaaaaaatgttataaatatgaagtattgtgttctgctaattctcagtttaaagcttcaaatttatttatatatctgcagtttcgtttctaattctatctcgaaatgtttccaacctttgcccttatatattaaataatgctacagtttgactctgagctttaattaattccttggctgagtggaaaatcggaaaagcttcgagcagccacccactaagttgccactgctggtttctcgtttctggcttccgatgccacatgagccccatacaaattcaaaagcttgccattagctatcacacacactcttgcaacgcaacgtggctaacacacacactcactggtacgtgagggggcgaatcttgtaattaactttcaagtggcccatgcaaaatattggcaaaaattcagcaagctcagcatcagcttttcatctaactcaaatattaagtctggatatctacttaagatacatgtgtgcgcagcaaactcaaatagctgtttgaaaaacataaaattttcataaaacaaatatgaattaactttacatatttcaaggggaagctataggtaaattcaatgaatttgtatcaaatataagagacaagtatgtgtctgtgtttttatatggttatataataaactgcaaatattcaaatcaaaagctaacccacacatgtgttatacaggtaatacgaatattttcattggttaccgatatcaatttacatctatttacatctatatgcatttagcttaatgggcatccacaaataataataaaaaaaaaacgccaaaagccgcaaataaattgcaaatttatggctctcgccactgacttgcatttggattttgactctggctttgtttattatttgcgtaattaaatgcttgcacatgctcgtgcagcattttttagccgtagaaagttttgttttaccggctgctggggaagtggaagttgagagctctcgaaacaatgcacatttttttttttttggcatctcgacggtgattaaagtattttctattgcagaaaggaaattcgagcgggtctcaattgtgggactggaagtcattttcttgtactcgcagccgctcttttcgacaccaaaatgggttaaagaaagtcgtaactcgtattaattaaaaaaacagacttaaggcaaagggaagctgcgctcgctcgaacttcgaaaggctagtcgaaacctttggccataacttctcgaccagagttgcttcatataagccaagacaatttcccagttgcactctcacattcattcgtattgatgtgtgtttcacacttgtcacgttcgttggcttgccaagaatttagaaattttatttattgccaatgctttctgctttccctccctgctccgctggccgttaaacatttttcttggctctttgcttttgatttgattggccgggtggtggccgagactcactggagctgggaaattggaaatggcaatcgaggaaaaacccatcatgttgcaaaccaaaactgccgccgcagaaccacagagccacttttccatctgtcaaagcgtgggaaaattctgtgcactccgttctttgggtctttagctgcggttactcggcaccgaaactcccaagatgggtaattaaattatagggtaataagcctcaattgggtcaccgcactctccaaacagtacttaaatgcaggtgggtggctcagccgcccgtttgctcgagatcttaagtatgcatatgagagtggatgtgtgtgggaaatgctcggcttttaaacggctaaagtaaatggaatgttaatggctaaatctgttggctagcacagtaaagaacataaaagcacaaaactcataaaagctttgcttattttctaaatctgtattctaataattaaaaatgtttctaataatccgattattgacgcttactcttggattatttggattttggagtatttgtttattcgtttcattcattgtactacccaacatgctgttcatactaaaatgttaatactttacaaaaataaatcttattttggttgacatagcagagggcttaaatttaattaacaattattttaatatgtccatttaaaaccctttttttaattaatccgaattaattctttttgtgtgtcatatcatatttttgtcatcaaaacaaaatacattttatttaaaccttacccaactgatgtcccttgaaaaagtttacccaacaatttgcgttttttctttgtcgccccagcttgcgaaatttgtgtctccaataaaaaaggctttaaacccgaactggaataaaaatccattaatcgagcaaaatatagcgcaatattgacgctcttgtttttactttagatgtttttttttcatcttttttcgcagccgcacgagccacacaatcaatttatttataaatttcgcttaattaatgcaaatgtaaggcgaaacgagaaaagccgggcgcataacttcgttagcgtttggagcggcaaatttcaaaatctacacaaaggcaaagcgccagaattttacaacaggacgctgccaaaattataccttaaaagtggtctaattaaatgaatcttacgagccgacagtacctcacattcaaagggctaacagagtgtcgttcaaattcagttttgttaatatcattattcactttgcgaagtcattcaactcgctggctgttagtttttgttagtttgcttatataatcatatgaagtgcgttaatttgacataattagtgggctccggcacgagacgaagtcgaaacccctggcccaaacccaaacccaagcccaacagtcccaaaaggtcttcgagttgaagagtaagcccctttgtctgactccgctcttctattttttttttttttttaggtcaatggtcttcgcttcggcgatgtttgttgccatgtttgctgccatttgatggcttgccaatttaacacctgacagcttcgtttgggccatgtgcattggaccaagccgtgtgccataagcgagcgcagatgccaacgccccggtctcaattcccctcgaccacgcccacaacaggctagtgttacgagagcaataccactgtgcactgaaaccaaacagcgctatagtcctgaatacatttggataaaaataaagctattctaaatgtgaactatcttcagtatcttggcatcaaatgagaaaccccttaaaagtaataatacgtaatacataatatttttcgaatttcttgcttagtttttctcacagtgcagtaccccaatctggtagccaggccggtgggttgtcaccagcaaacaagtcaactactatagcccaaccggccacgagagacccagacacgtctggccatttagcagagttatgcgatacatttttgcgaatatatttctagttcgttgaggaaattttccaaagttaaactctagatttgattactaaagagctgtgggtggagttgatatgcaaatgtctacgaaaactttctggtgacataggtaaaatgtcaaaacttcaatttgctgaaagattttaatcagagattgtcaaaattttgatgaactttgcgagcacataatttagttatgcaaagactattgatagaacgcatgctggctaaaatgcattttttacgtttctgtagattaaacgatctttgaaagtgaaattccattcatttatctatgcatacgtgaattttttcactaatatttgatagcataagataatagcaattgcgaactttataccaaacccaataattaaagtacttcttttactcgaaacattatttatttgacccacccaaatattttcgcttatgcatcaaatttttgtcaagaacgcgagaagtcgaataacatttcagacactgacctactttaaggtaaatatcaaagtgagaggggctggagaaaaatgaaactatttggggccaattaccatcgttgtggacagcgaaaagaaactttgcatatacatacatatatttttacttaattgagtatattcccccgccctcggtcaacccactccagttctttattaattttttttttttcttctttttaattattcagttgtgtgccttgtctttctatgaaaagtgaaatgctccgaaccagaattttgttcaatgtctctggctttttggtttattgctccagttaagctgcaagacgggtaatgtactatgtctgtaaatgtatctgtatctgtagatgtagatgtatctatatctgtggctgtctgtttgaattacagagcttgagcgaggttgacacacttacatttatttagctcataatgagctggcaaatgatttgcctttgtctgaatgtttgtctgctgctcgcaggtttattgttactggttttttcacttttcatcaataaaataaactgatgaaatgccttaaacagcctctgtttgtttgctcaacataatgaggcgttttgacaaagataaacaaaagaagaaagatgctgcaaagtcaaatcaaagttgaggtagaatacaaaaagtttggaataaaaatggaagtcaagttatataacctatgcatataaataagttgacaagaacgaccgacttcagttggttcttatgcaagtttttctttttatgttgaaattgtgcgtatatttaaattaaataaataatattctaccctcagataaacaaataacacattacagacataagcccttttaaatataataaactactatgatgtaatgcccaaatattccattctagctttaaataaaacattcccacttcacttgtgccatttaaggggtagtccctatttatttttattaatctgtacttttttgtttccaattgagagtacataagctattgttatagcgagattacacatacgccatgtgtgctgtgtggagcgacaatttcctgcctttgagagacaaaacataaccgagtggagcataaccaacgcccgctgtcacttcaattcataacagatgcaaataaatttccattaaagttggtggggtctccgcacattacccttttttgggcgaccattttcagtgcgctgtgtgggcggacgacaggctaaacagatgcttagttcggaaataaagcagagattcatggggcccggcgaggcattaaggtataaaggtgccccccctagatttagataatgaccatttcgagtcacggggcgcaaattgcgggcttaaacgagcggcggctgcagtcgcagcagctcgactctcacacgttacttttcatatgtttaaatgaaataagtatctggcagatacatatttgcagtgacagttgcatccacacacgcgagctcaagtgcgaaaaacggaggattgtgttggcactgggatcttcgctgattacttaacatattcaactttcttttggacccccaaggggccaagttcaatgcgcttaacttgcggctaatacgcctctcctttcggccaagctcaactttcacattcacaacctttggcacttcctcctcttcctgccacatgcaaagataatttttcccgtaactttgtgttggccaagccgattcacattttgcaatttggcaataatgctggctgtgcagtgcaatcaatgcttctcattcgatatttagcaagctcactcattcgactgtggggcaagtttttcatttcatttctgttcgcttcacttgggttcggttcatttcagactggcgaaaaagtgtagatacacatgctactcccaacgcatgggagtacaaaaaaaaaaaaaaaaaaatgtggaaaaaagtgtttgccaccgcctatgcaactatgaaatatcgcatcgctcggcgagagtacgcgcatatatcccacccagagctggaataaatttatgtgggaagtttttgatgacgttcgtaatttcagaccctaacacacacaccccccccccgcacacaccccacagactatgcaacttatctaataacggagacagacttacaacttcctgtaagcctgccgggaatgtgagaacgcagagagtcatcgcgaaaagggttgcatttatgcctgctgatataatctgcacttaagatttatgcctcgaattgaatattctacatattttctgcgagataaggtaataagttcgggaatttctcatatttaatgaagagaagtttaagaatcaactagataaagtgtctttcgtcacgaaattcaaacagacacaaattgattcaagaagataaaataatatttgatgcacagttggttttatgaatagaatctttaaattcttttcataataaacacgatgacgcctttaacatcatataaagtgtattctacatagtgcaactttcgggccttaaaacaaacttatgcaatcgcttgactagaccaaattgatggcaaataaaactaaaccaaataggcaaactgaaccactgctctacactccaaaataaaacccccagcaaactggcccagccacctgctgtgcttttatatcccaaaacttgtccgtttctgcgtaatagaccaattgcatcagtgtttgaaaaaaatccaaaagtaaaggcagcaactaaagtaaacctttgcctacttctgctttgagccaagcatgcgcatttggccaagagggtgggctaaaattggtcaaacaattgccaacgcgctctttggcgtatatcactttgcatatgcgaagcaaagaaaactccaaaattcagccagaggcgtgccatcacaaaactaaaaacaaaaaccaaaaattaatatgcattgttgcagcagcacgtcgccttgcatatttggactttcacttttgttttctttacgaaaactgacaaaaaaaaaatagtcaaacgaaaagctaaacaagatttcaaaatgaacttaagacgcacactcgatccacgtcgacatatcaatcaattacaaatggttaacacaaatgaaaacattatgtatcttttaattgggggcttccgagttcggtgggcgagcagcgattaaagtgggtaactgcgttaattgctgatactccttactttccctagcctccgcaattaagtccagaaatcaaagttacgcatttccaattgcgtaatcgtcacaattttttttttatttggctgtctgtctgtagattttcatggcttgcgaaagtaaacatttttacaatccgctttattttttatttttggcttcccgaacaatgcgtgcagttattactagttttggttcattaatcatgtgacggggaaacacttatgtgcacctgctgggcataagaaatgagaaaatgggacacacagataccgatgggaaaattgccaagggctccgaaaggtgattatgaataaaccacatgattaaagggcaaaatttatcgtgacataagaggattttctctttgtgtttacctatgaaaatttagtttagatctgatgggctaacaatcttcagctttgtggtttgctcaagttagaagttaatttactttcacaaatgtaagacttgaaaatcaatcagtcggtttcccttctgttttcaaagggtaaaatgctaagctatgttacatgttgattccattaatgatgctgcatatcagttgaaagcttatttcagcctaaaaaaaaacacacaaaatgtaacttaacaatttcaatttcccccgtataagcctatttaagctgtataacttgattagttttccccctttttgttcagctccaattggctgggttaaagtttttaattaacttaaatcaatgacagtttacattgccaatagaaacgtttgcgaaatggccagctagggatttcagttggtttcgtattgaacattgttgcattgagacaatgacaaagtaactagcctccaatcgatcgatcggagtggaaagccgcagatatggccagggcgattaagtatcccaggcccaaggcggatggtcggtcagccagatggacagctggacagttggacagctggacaattgccgcaaatcacagtgggacagccattcgaaatatgtgtactgttcgcctgccgtatttccgctgaaagtgcaggcaatttaagccaaagaggcggagatctaatggtggaatgaagtgttgccgggtgaagaatggctggcttgattttaattgccactgaccaccgactagaagcaatgaacttgccaccaggcggacgtaattcgagccacaaacagaaagcccctgtaatacaagatggttgtgggaaattccattccagcggaccagtgaagaacttcactcgcgagggtggtggatgtgtgtgaaagtccatggcggcgagtggatcaagttcgaattaccataaaatatgcagagacaacgcatgcgcaacacgtaacccgatgcagatacgttttagtgaacttgcagatacaaatacagattcagatacagatacactgtccagttcgaccctgttcagggtggctcgttcaccttggaacggcgcttaaaaaagtcgtttaacatcgagttttggtagctaaataagtccaataagtcgctggtctaaataagcaggggtaaaactgatatatgaaagggcctggcctatatccattggccttttggccaatttcatgctcgctgaggcgtcatttcgacaacctactgttttgtacagtgctcttgttccactaattgagttatgttgcacatttcggcaagtcagcttcatggttctccgactgctgcggatatttgccaattgagttattgccttttggttgtgcattagcgtgcgctcacctgcgatttcgcaatggaaagtttggccaactctttagaccaagttctgtgtgtgtgcgctggcacatcggccaaaaaccgggttggcttggcaaacacggttaacagttttcggagtgctgagaatcgttttgtcacgccttcgattctggacagaagcaaaaaaaaatccctacttaaatatttatacaagtttctggcacccagttgcaggtccagattgcagctgcaaagtacgtacataagtttgtacctcatcacccgcttaagctagtttcagtgatttgttacccttttggatttccatttatccagtagatagaaagccagggaagccactctttagccaatcccccttattgacaggtgcattatcgaaccctcaagccttagagatcagagtgaaaccatgggttgcaaaatgcttttccgtatgaaatattttgacccaataaaatgcatatttcctcttgccttattaagttttatgaggaacttcatcaatattaaatacagtaagaacaaaatatttatatttgttgtcccatagctcattgcaaatttaaattacaatttgtattttgttgtacatacgtttgtaaatccctctgacgttctatagttcaacaagctgtaaatgtttaattagcttgaattttaaagccagttttacgtatatttgaataaatatgtcaacaatgctggcgggcttttctttccgagtttttgtaaaatattggttgttaaatttattcagttttgtagttcttatggggatttaatttataaactatgagagctattaattttgcactctcaattccaggttcttatttaattgagtttattttttttttttttaaatgggatctatttttaccccttttttatttttattaatgcagactgttgtcagacagattaaaagataaatatcaaacctgaattaatagtcacgtaacgtttatataattttccacatttccgtgctgagataaactttttcgaataatttaattggtaatttggccagtaaataaactaacgaaataaaagtgagtctgcagttctgcaaagtaatcataatcagcctcgtagccccattccctcatttagtgcgatatcaaatacgagatttgtgcgattttgttctactgctctggctctatctctctctgccagtgcctccgtctcgcttcttgctcatttccaataggcaattctacttgctttattggttttccggacaaacttgttcggaaccctcgtggagcggacaggttgctccaaaggggagagaactcggagtcagcatgttttcaagatcaaaaagcgaatggcggcggagccgaagaaattgcagaaaaaatttacacactctacaacaaaagcaaaacgagagagagagagagaggttgagctacaaagagagggaactgcaaaagggaacctttcactgcaggtacactttaaaaaattctaaaatgatacgcctattgtagggatatgcaaacctagctaacaaaaatcactttagtggttactgcgaaagaagtaatttaaatatttttcaatgttacgcattgataagaatcgacacgatggtttccaaagcaaactgtagaaataaaaaaaaactataaatgttttcacgactttcctttcttaacgttcgaggattagaaaattactttcacacatgctgtactatagtttctaatgttataagtatgtcaaaaatcaatcctttatagaactgattataccagatacatcattttctttgcgtgtcccgtttggacgggcaaggtagaattagtgataaacttaaagaaaggccgcgcaattgaaaagtggcacagatgccagggcagcggccccaaaaggcaacggtaccgtagcgcaggagcgccaaagggagttcaggagcggagtgggggcagcatcagcaatcatgaaaaaggggacggctgagtggaggtggcaatggagcaggagcacgagcaggagcgacgcaaaaaaatgtgtgtgcgtatcaacaaaagcggatggtcgagggctgggccaggataaagatgtgatgcccagggcgtgggtgttgggtggtttttgggtggattggtggcttttctctgggaacagtagcactcgatgtgctgatgtttttttgtttgtgggggtttccagaaatatgcgcactcccagaaactaaggcaaaaacttacctgtaaaatatgagcacgctgcgtagcgagctgttaaataatttacggttcgtcgaagatttacgacccactggatgtatcaaactgcaatgattccggaatatttgattattcgagaactttggtagagcggacagaagagcacagcactttttatttatatttatagtattcttttttttttagtcgttgagttattgttgatgctggtaagtaaacgggtagtacgcagcactgttttgattgagcgcgcgcaaaaaattatacacaaaatcacgcacacagcgaaatccggatagagacgcaccgatggcttaaaactgggacccaagaagagagcgtagggtgtgttttggatgcctctgctcccaggcaccaaacactgcgttaaatgctgcgctcgtcactcgactcaactcgactcgaatcgtggcttaaatctcactcgtcactcactcggctgccaatcggaatgtgcgaccgtctgcttggaagcgtgctttcgaactgaagtcgttttttgcttctgagctgctcgttgctgccacagcaaccccaccaatacgtgcgcgggaagcaggttgctccagctgaaagctcggctccccagcaaacatccaacatcaaaagtctaactgggagctttacagtgctgccagataggtggatatagttggtggatatagaattttacacgactaacaaaatagaaacttaaaagaataacgggtataaaacaagtggtttgcatattttatacatgaaatataatattttaaatatatcttaataaaaagtatttatattttataatgctgtttacctaatattgtataccttagaaagaatttatctggaactgaacgaaccaagccatgagcctttgctcattcgaaacactgaaaagccgttgcacttgctttccattcaaatttcgaggcgattttgaaaatgactattcccgtgacccatttcctagtcgagttggtcagataatgagttacatggacgactgtttcgcaggtgctccgcaggagtttctcatctgcatcacggtgcacaaggctgcccaagtgggagtgaccaccggcgagctgtacgtgcggattagcttggacaaaatgacgaagagcaccaaatcctttcctaatacagaaaatcccttcttcaatgaggtgtgtgttttgatgggaattgtgcatataaaactaaatttttttaatgatattccatttacgccttctcagtacttcgtttttgagttccattgtacgttaaccgaactcctgcgcttaacgatcctttttgagctaaagaaacacatgacgtataagaaaaatgtggtagtgggtgaactactggttgatctacatagtgtgtggaaccagtccaatcatggctacttcaagaagtggggtcgcctggaagctcctattggagaaaaccagaccctagagaatgccgttgcaccgcacggctatttgcaactggatctgg

SEQ ID NO: 10274 - DNA, 2246 bp, DROSOPHILA
cgcttccaagcagacggtcgcacattccgattggcagccgagtgagtgacgagtgagatttaagccacgattcgagtcgagttgagtcgagtgacgagcgcagcatttaacgcagtgtttggtgcctgggagcagaggcatccaaaacacaccctacgctctcttcttgggtcccagttttaagccatcgtttgatacatccagtgggtcgtaaatcttcgacgaaccgtaaattatttaacagctcgctacgcagcgtgctcatattttacagttgaaggtagctccgtggaggaaaacagccccaagatttcgaaaacaacgaaaatggtcttcgactgcggagtctggtgtgcaaagtatttgctttgcatattcaattttatatttttcgtgctaggcacaattatattcggagtcggactatggctggccgtggacaagcactcgctgattgctctcctcaagttggtcgagagcgagcgcattgagcaatttacacagccacaggccatagagcagctggcctatgtgctcctcgtcatcggagccgtcatgttcttcatgagcttcttgggctatctgggagccatgcgcgagtcccgctgtctgctgtcgacgtatggaacctttttgatcctgctgctgattgccgagatcgttgccggcggattgggtgccttcttcaaggacaaagttcgtgccgagagcaaaaacttcttgcagacgaccattaccagttattcgctgggcgagaatgtggatgctacctcactgatgtggaaccaactgatgggcaactttgggtgctgtggcatcaatgactatcacgattttgatgcctctccagcgtgggtgaacggcaagggtaaccgcaccattcccgatgcctgctgtatccttaaggatgtggccaagttggtgccacgcgacgaggactgtacaaccaaccccagcgacagcaacagtttctacaagaagggctgctatgaggtgtttaccgagtggctgattcggcaacgtgaactggtcatcgtggccattgcggtgggcattgtgcacctggtcctcattattctggcctttgctctgtgcaaggcctttgccaaatacaacgatatgcgtctgtaaatcggagatgacgaggacagcggatgttgtgacagttttcagagttagcaaagtagacgtaggaacgagccaaaacagcaggacagtgaagagcgacgatccctcctagaactcccccaaaaaatacaacgccctaccgaacaccgcgacgtgctcaatggaaacatgaaatatattcaaatgcatttgccgcatggaacgggacagacacgagaacacaaaacagtttaatacagctctaatctaacaataagctaagatcatagccagcataatccatttaccgataatattcaagaatatcttacaagaaatgttgctcaatgttttgccagcaaacgaatgggtcggatggatcgcgaaggtttttacgaatgaaactcacacttggaatatttatttgtaaatctgttttgatagcagttttttagttgttaagtagtaaactacaatatgcgtaatattgtaactatttttcttagtctattacgattttgttatgcaatcatgcaaggcattcgaaaaccactcaaaaacatcacagaaatcacataagttaagacgaatgacaacacacatttttgagattgagcgaaatcgtgagatcaattttgaaagatgacttttaaagaagcatagagcataacgcccattaaattacaagcatgcatatatacaaatatcgattgaaaatgataagaaatgaaatggcattgacattgtactagtatgtgtattagttaataagtctctaaccttaagttgtaactttagttgttttttctatggctatcttcgagtttttaactacatacgccggggcgcgcaacttcgtgttcccggctcttttgttaaaaatgaatgttgtacatttttgaattctatatatacatatataactattattaatgcatattatatacacgtatgtctgtagtttacttaatgtactttttggaaatcgcgcaatgaaaaagccgtaaatcgaaagcatgaaactaaaacacacacaaaaacgataaaaaacctcccaagaacgcgaggaaaaatccccatttaaagatgtacatttatgaacgtgaacgaaaaagtaattaaaataaagaaaaagtaaa

SEQ ID NO: 10275 - protein, 267 aa, DROSOPHILA
MVFDCGVWCAKYLLCIFNFIFFVLGTIIFGVGLWLAVDKHSLIALLKLVESERIEQFTQPQAIEQLAYVLLVIGAVMFFMSFLGYLGAMRESRCLLSTYGTFLILLLIAEIVAGGLGAFFKDKVRAESKNFLQTTITSYSLGENVDATSLMWNQLMGNFGCCGINDYHDFDASPAWVNGKGNRTIPDACCILKDVAKLVPRDEDCTTNPSDSNSFYKKGCYEVFTEWLIRQRELVIVAIAVGIVHLVLIILAFALCKAFAKYNDMRL

SEQ ID NO: 10276 - DNA, 3217 bp, DROSOPHILA
acttgcggctgatgtcctgccgcgtattcgaaatttacatacaacagactacaaagagaatttgaaaccgaaaacaaaaccaccgctgatggctgtcaaaaataaagaagcgaacgtttgctaaattaaggaggaaaccaaattcctgcaccgcgttgtcccggaatccactggcaagttgcaacttgcaacgtcgcctttgtgcgttaatgtcggcgacttctacttcatttcctggccgcaggaccacccagagcaagaccaagatccaatttgcaaggagcggtcgcatctgcttcgtaggcgtatacataatattgtgggataggcaagacggcaatgcacaagccgaaaaatgtggcaacaagaatgtgccactccacaaccgcaatcacagagtttttcgggtggagccagcaattttagccaagaaattgtctagctgtctcttccttcccggccacttaatgacttccgcaaataaaacgctttgttctgggacaagtttaaagcattagcacattgctacgaaaacccagaagcttctgcagttgtttgtacatatttatcagactgtttttgtactgcaatctgctaatgcatttggatgtgcgtctaatgaatattaatgacaccaacgaccgtcgagggccggggccaaatggcaataaaaatatttcaattagagctcagctgccaacacacgcggcaagatcaacgacttcgttaatgccacaacaagctgaagatgcaactgaaaccgcagacaaaccacacaaatggcacacaaaaagataaaccgatgccagcacgttggcatgcataaatgatggccaactggggagaatcgggtaatgccggggcaatacccactttaaaaagtccaggacaacacttgctgtaaagtaggacatttttcctaaataatatgtatatactttttaatagattttaaatcaaaataacctggcattttctatcaatttttaatgaggtgaaaggaatcacacctgaggttacgaaaatgtctatcaccgtagaggagagaaacttcggactggccacgaacccacttaccgaagcccggcagatggttcactcctacaccctaaagaacaccaagggcatgtccgtgacggttattcagcttggggccaccatccagagcatcaactttccggatggctccaagaaagtagaggatgtgtgcctcgggttcgacgacatcgctggctatgtgaccaacaaggcggcctatatgggtggtaccctggggcgagtggccaaccgagtggccagcggtgggtttacattggatgagactacagtaaacctgactaggaacgttgaggtaattaattagattttagttttatgtgtttagcttaaataatggttataataatttcatagtaatacaaaacccgattcctttagggccagtttcatctgcacggtggattcttgggattcgacagcgtcatttgggaagtggtgcagaagacaccacagggtgttgtatttcgccatgaatcccaacatggtcacgagggctatccaggcattctaacgtgccttatcacctatcggctggacaatgaggaccgtttgtccattagtttcgaggccaccactgaccgccagacaattgtcaatctctcgaaccatgcctattttaatctagctggccataatgcaggacccaaaggtcttgcagagcatacggtggagatagcatccagtgagattgtagaaacggatgaccggcagattccaacaggggagttaacccttgttgacaacacggcttatgatctcaggtcacctgtggtcctgggagatcgcctcaagcagtttgagaactgtccgatccagggtttcgacaactgctatgtggtcaatggaggtcagctgttgagatctaccgtcaaggtggccaagatagtgcatccgccaagtggtcgggcactcgaggtgtggacaaatcagccaggcattcagttctataccgcgaataatataaccaagataactggcaagaagggattattttatgtgaaacacggcgccctttgcgttcaaacggtgaagttcccggacgccataaatcaccagaatttcccgtcaatcaatctaaaccctaatgaaacataccggcacgaagttgtgtactggtttaaggtcgaaaagacctgcaggtgctgttataaaaagtaaccactagcctcgtaaataaagattccttacaccttagattgattacaggtttttatagaacattattcgtattattttcaccattaaataatttaatgaaaataataaaggaaatgaaatttatagttcaagtgctcaactccacaagtttcgttaaaaattttcaattttggttacgaaacagctgcaggggctgcgcgatatccatgctataaattcaccacaaacaatatgcagttaaccaaattttgttgcaccaatattccacctacctgtgcgaaagctctctagtccgtatgtccgtatgtccgtatatatgtctgtatgttagtcggtatttgcggcaaaccctttggggttatcagctaacatggggccaccttgtcaaaataaaccattcaattagtgttggaaaattgaattttccatgcagcctgttgatgcggtagctgtgataagctgcgggccatcgacaccctccgcatttcttggccacatcatggcacaagaaatttcattagcctaacgagttgtttgctcggcaggccgaggtaaaaactttgtcatctctcggacgactgaagttgtgttcctaaagctaaagaccttgtctgcacttcaagttcttatgaaaaaaaagcctgaataagtgatttttgtggagaaaccgagcgagaaaaatgcattaccagagaataaaaatttatggaaataagtttgtctctatcaagattgcacgaaatcaatcaaaatttaaatatgtaatctaatctagaagaaaatagcaggcaccctagcatgtctatcaattaccccaccagaaagctttcatggcacccttacttttctgaaacctcaagaatactcttagatgtactaatgatgacaattcccacaaacgacattaatctgtattcagacagtatgctctggtcacattatgggcccgcacaaataatgttaacaagcccataattaaatatttgcacaatatttttcg

SEQ ID NO: 10277 - DNA, 1131 bp, DROSOPHILA
ggaatcacacctgaggttacgaaaatgtctatcaccgtagaggagagaaacttcggactggccacgaacccacttaccgaagcccggcagatggttcactcctacaccctaaagaacaccaagggcatgtccgtgacggttattcagcttggggccaccatccagagcatcaactttccggatggctccaagaaagtagaggatgtgtgcctcgggttcgacgacatcgctggctatgtgaccaacaaggcggcctatatgggtggtaccctggggcgagtggccaaccgagtggccagcggtgggtttacattggatgagactacagtaaacctgactaggaacgttgagggccagtttcatctgcacggtggattcttgggattcgacagcgtcatttgggaagtggtgcagaagacaccacagggtgttgtatttcgccatgaatcccaacatggtcacgagggctatccaggcattctaacgtgccttatcacctatcggctggacaatgaggaccgtttgtccattagtttcgaggccaccactgaccgccagacaattgtcaatctctcgaaccatgcctattttaatctagctggccataatgcaggacccaaaggtcttgcagagcatacggtggagatagcatccagtgagattgtagaaacggatgaccggcagattccaacaggggagttaacccttgttgacaacacggcttatgatctcaggtcacctgtggtcctgggagatcgcctcaagcagtttgagaactgtccgatccagggtttcgacaactgctatgtggtcaatggaggtcagctgttgagatctaccgtcaaggtggccaagatagtgcatccgccaagtggtcgggcactcgaggtgtggacaaatcagccaggcattcagttctataccgcgaataatataaccaagataactggcaagaagggattattttatgtgaaacacggcgccctttgcgttcaaacggtgaagttcccggacgccataaatcaccagaatttcccgtcaatcaatctaaaccctaatgaaacataccggcacgaagttgtgtactggtttaaggtcgaaaagacctgcaggtgctgttataaaaagtaa

SEQ ID NO: 10278 - protein, 368 aa, DROSOPHILA
MSITVEERNFGLATNPLTEARQMVHSYTLKNTKGMSVTVIQLGATIQSINFPDGSKKVEDVCLGFDDIAGYVTNKAAYMGGTLGRVANRVASGGFTLDETTVNLTRNVEGQFHLHGGFLGFDSVIWEVVQKTPQGVVFRHESQHGHEGYPGILTCLITYRLDNEDRLSISFEATTDRQTIVNLSNHAYFNLAGHNAGPKGLAEHTVEIASSEIVETDDRQIPTGELTLVDNTAYDLRSPVVLGDRLKQFENCPIQGFDNCYVVNGGQLLRSTVKVAKIVHPPSGRALEVWTNQPGIQFYTANNITKITGKKGLFYVKHGALCVQTVKFPDAINHQNFPSINLNPNETYRHEVVYWFKVEKTCRCCYKK

SEQ ID NO: 10279 - DNA, 3080 bp, DROSOPHILA
gcgacggcattgaatgcccgcatccttagtgcccgcattctctgtttgaatggcgcgctctctgcgcggcaccatagcctcgttcgcaaacattccagtgacctcgttgagtctcttctgctgtacggatttcttgggagactctgtagcgcctccattggtgatcggggcatgcagttctttcactggaatgccattctctatcgcgtacttgcgtgtcacccacttggtctccacgcacacgtattccggcagctcgaagacgggcaaagggatagacttcatctgaacagggctgtggcgtggtggttttccggcggatatcggttgaccggccaacgccacctttgccggttgcgccgggtacatttcgttggttcggggttctcaaatggcactaaatcgatacgtatccgaaaaatgaattcacattttacttggaacttattttatttttgttattaattacgcttgctttttataaaaagacgcgaattttactggcgcaaaaaattcaatgttgctattggtgctggcgggctagcttttttcccgccatatccgacttcttttgactattatgacagttggaatattaaaaaattaaaataaaatataaatctaacagttcttttttcatggcaatcaatacgaagtgctgaataactgcatgttctctgattatactgtgtttataaactaaaatttctaccaaatttgtttagcaacaagttctcttaacagtgccattttaaataattaggggtattcttatgagaagtatgacattttctaatgaattcaaaattgtattaagcaaacataaatttgttatatattttatatttcattcaatgcctattataatagtttaattaaactgattgtaaatctggtggaaaaatcaaataaaaattgtagttatttttcgtttgttttgatgtattaaatcaatcattattatattgtacaattattcgggcagaaactgccctaagcactactttttactcttatccttgtccttgatggtgtacttgtcgtaggacttggtgggatcgtagggctcccatcggctggctgggaagatgtgcttgttgcgctcgtaccaggagcggaggagtacctttccggcatgggactcctccttctccacggaggcgtcgcttatcatgcgcacatcgtcgtggacgtcgaactggaagagcgggccggatttgccgcgtgccttggtcacgataaagtcgtagaaggaatagtggtgcggcaggatcagatcctccttgacgtacatcagctggtcggccattacggtcttcagttcgatgaactccttgcgcagcagctccaggcacttctgcagaaactggtagatggagttgcccttcttcatcagcacgttccgccgatggccggagccatcccagtagctgaacgtgatggagatgtcctcgtccttcagctccgcctgctgcattacccattcttgacgcagctgctcgcgcagtctgttctcctgctcctcgcgctcgcgatctggcagaaaggaagtgtccacgtcaggattcttgcatatcttcttcttctttatgggcaaaatgtcttccttgatctccgtccacttgggcttgggctgatcctcctgcttaatcttcagctgtttcttatcgtgatcctcgtcgtcctcctcctcctcctcctcgtcgtcgtccaggttgaaggacagcgcctggatctgccgcttctgcttgttcttctccgcctgaatggcctccagggcgcgctgcttctcccgatccttttcgtccttcttctgggcgagcttcttctcccgttcccgcactatatcctcctgcttggccttcatctcgtcgagggtgaccagaccaatggtcgaggacttgagctgctgctccacggcatcgtagtgggtggcaaacttgttctcaatcttgtccagcttgagctcctcctcgatcttcttcttgcgaaactcgatctcctgctgctggatctcccgcttcttcatcagctgggctgcacggcccgcctcgctggcggcacctttgtagtgggccatccttagttgtttctgtatttatttatatttttttttatttaattcgtaaacgaaatttgtaaacatccaattggtgtgaccgtagcagaaacattgaaaaatgccattcttcgtataaaaaatttacagcacaaaacactaccttaccaatttgaaataataaaatatttaatcttgaaattatttaaaatttactagctgtccattcccctgatataagagcaaaaagaagaggatcactatttctctgcaacgattttgaaaaataaagataaatcttagatttttagctgttttttttaatatcctttatatttagttacagtcgtaagtttttctttaacttgcttcatgctttcgctcagtgtactaaatctacgttgatccattggaagattcctcctgtgcctcggatttgtcctcctccttgctgtcaccatcggcatctgttccatcatcgccaggttggcttggatctggattgctggagctactgccgttgctctcggccaaatcgttctggtcgaaaccattcgtgtattccggcgttggagccgtgtcattggcgctgggcggcggggtaatcttccgcagctgctgacgggcggcatggacgatcttttccagctcgacgcactccgtctcgatctcgtagttcttggagaccagcagcacccaatgggcttccagggagcgcagtcgctcgccggcctgcgtttgcgcctgcttgcgctgccagttgacatcttgaatgtccttcttcagctgctgcagctggagctgcgccttcgcctgcatggcggtgaagacctccaggtaggacttccatgcctccgtgccgtagtcgagcattagctccaggttgagagagcgcacccactggtgctccagctgggccatcgagttctcaatggcctcctgccaggcggacacctccgacaatttgcccgatggcggcggtggcagttcgtagcgcttcatggagagcgtctccatgggc

SEQ ID NO: 10280 - DNA, 1080 bp, DROSOPHILA
atggcccactacaaaggtgccgccagcgaggcgggccgtgcagcccagctgatgaagaagcgggagatccagcagcaggagatcgagtttcgcaagaagaagatcgaggaggagctcaagctggacaagattgagaacaagtttgccacccactacgatgccgtggagcagcagctcaagtcctcgaccattggtctggtcaccctcgacgagatgaaggccaagcaggaggatatagtgcgggaacgggagaagaagctcgcccagaagaaggacgaaaaggatcgggagaagcagcgcgccctggaggccattcaggcggagaagaacaagcagaagcggcagatccaggcgctgtccttcaacctggacgacgacgaggaggaggaggaggaggacgacgaggatcacgataagaaacagctgaagattaagcaggaggatcagcccaagcccaagtggacggagatcaaggaagacattttgcccataaagaagaagaagatatgcaagaatcctgacgtggacacttcctttctgccagatcgcgagcgcgaggagcaggagaacagactgcgcgagcagctgcgtcaagaatgggtaatgcagcaggcggagctgaaggacgaggacatctccatcacgttcagctactgggatggctccggccatcggcggaacgtgctgatgaagaagggcaactccatctaccagtttctgcagaagtgcctggagctgctgcgcaaggagttcatcgaactgaagaccgtaatggccgaccagctgatgtacgtcaaggaggatctgatcctgccgcaccactattccttctacgactttatcgtgaccaaggcacgcggcaaatccggcccgctcttccagttcgacgtccacgacgatgtgcgcatgataagcgacgcctccgtggagaaggaggagtcccatgccggaaaggtactcctccgctcctggtacgagcgcaacaagcacatcttcccagccagccgatgggagccctacgatcccaccaagtcctacgacaagtacaccatcaaggacaaggataagagtaaaaagtag

SEQ ID NO: 10281 - protein, 359 aa, DROSOPHILA
MAHYKGAASEAGRAAQLMKKREIQQQEIEFRKKKIEEELKLDKIENKFATHYDAVEQQLKSSTIGLVTLDEMKAKQEDIVREREKKLAQKKDEKDREKQRALEAIQAEKNKQKRQIQALSFNLDDDEEEEEEDDEDHDKKQLKIKQEDQPKPKWTEIKEDILPIKKKKICKNPDVDTSFLPDREREEQENRLREQLRQEWVMQQAELKDEDISITFSYWDGSGHRRNVLMKKGNSIYQFLQKCLELLRKEFIELKTVMADQLMYVKEDLILPHHYSFYDFIVTKARGKSGPLFQFDVHDDVRMISDASVEKEESHAGKVLLRSWYERNKHIFPASRWEPYDPTKSYDKYTIKDKDKSKK

SEQ ID NO: 10282 - DNA, 2883 bp, DROSOPHILA
actggcgccgatagggcacagcagcagcaatggcggcaagttggccgagcacggcttggcggagtagtgcaatcaatcgtctcgttccaaaggcgattagccaaatccaagtatcaagtatataaatttacaactacaactggggtgagtgggttttgtatgaatgcaataatagatgtaggcattgtgcaggcatttttttttttgtaatacaaggataattctagggcatttcgtttgcaattttgatcaagttataccaatatatataatttatcattattaccagtttgtcaatatataaagtaatgtttctggttagatgcaattatagcccctgcattttggtcggaccctatattgtgaatacttagaattatccaaagatttcatgccgacacaatggcatcatgaccgcgagattcactcaccctaaattatgtgtacattcgccacctaccgctgtgtattagccgaatagaaccgtggctcgaaatttgaatttatggcataagcatcgtttgagtttgttgactttgatgggttttcttagttgttcgtatgtattatcgtattccaaatccaattgttggttagattaagtgttgctaggacgtcacaagaattatatatacaaaatgtatacacacacggaaccctcggtagagatcgtttgcaaatgcttcagtcagagggagactatgttccattttcggggaacagaacgtacccatcccggtgcatttcacttgttttaggtaagcagcatgatgctcacacattcgatatctactcgacgacattcagtgagagttgggtccaggcaatttcaactgaattctacaggaaaccttttagttctgtcacttattagcatatacatgtgtaaactaatatatacatacaaatatttattgaacgttgacttgaaccatgttattgatttaaaataaatacaaaaactaaatacgtaacaatggtcatgattattaacctctggtcacaggtttttcctcctaaacttgccttgcagaaaaatgcgcggcacatccacgccttccttaagatttagagttcgacgatggacataggcattggtaatgacctcaaagccgttctcctgaaacagcttggatacttcctcctctgaaaagaagtagctacgggtgccatcctgtcttacatagaggttctctgctatcttgttgcccggcttaaagcgcaactgtgccatgtcgtagagaccgtaatccctaaacagaagcagtcctcctggctttagtagctttcccaggttctgcaccacatctttgaacttctgtggatgtatggcggagagcacaaagatcagcgtgcaaatgtccacgctgctgggagggatgtggtcatgcacctgttgcgttgtgatatcacactgaaaggcagatatctggctgggatcgtacagaggattggagcgcacgaattccactgctcgcggtgagaaatcgcacgcgtagaagaagaatctgctattgctgaaacatccctcttcgctggtttgttcttccagcagcgggaataccaggttgcccacaccgcatcccacttcgaaaagtgttcgtttctcgtggaactcctcctggtccagcagctcctggaactcacgcgttgtccagtggcggtccttaaagaaacgagtctcatttcgcttgtagaatatatcccagttcctctgggcatcgatttccaacttgttcgctttgtattcgggcacgagaccacgcttgttttgctcgtccaacttttgtcgctccaccgccgacagttcctttgcttgggtggtaataacgtccggttctaggggttcctaagaagttttggaattaccaactatttgccatgattcggaaactgttttcttttatataccatgttttattgaagcaagtttcttgtttgattccaatgggtaaatctttccacgtgtatgtttattatcttttttatctgttgtctattaagatgttctttatgtctttatatattttacattttcttaataatagtttaatcctgatatttaggataaaacgtcttttttattatttttatgttttggtttccaaacgaattagaaatgtgtttgcaatatggtcacactgccttccatgggcacaaaaaaagatttgagaaggggtcaccctttttttatttttaattgtattaagaaattatatagaatgaagtgttttcatattaatcttgtagatttacaataatttggtgttaatgaaatgtattaagtattttattccaatggtcatatgtcgagcaaggccaacttcgatagccctaatcgaatattaaaaaagaaatcccgcgctgttatcggttttaaattggatcgatcgttactgactgaaaacaattcctttattgcattgagattcttaaagttataaagcgaacattttaaatacagccattatgaaaacaacaaataacaaaagtgaaatgataagcaatggcggatagttagccaattgctttggtctttggtcgcagtatgggcattaggtaataccatcaaaaagatatccggttaccagttatctgcccatgatggtcggctcgtcggccatggccacctcgtcgttgggcgccttggcacccttcttcttgccagaataccagaggaacataacaccgcacaggatattgtccacgaacgtgaaccaggccaaataaacgccgtagccataactgaaaacggaaataaaaacctttgaatatagtatacattatctgattgctgacatacgttagttgcgccccttcaggatacgcatagaacagatgctctttggtgtagtcaatcgaggagaagagcacctggagaac

SEQ ID NO: 10283 - DNA, 825 bp, DROSOPHILA
atggcaaatacaaaggaactgtcggcggtggagcgacaaaagttggacgagcaaaacaagcgtggtctcgtgcccgaatacaaagcgaacaagttggaaatcgatgcccagaggaactgggatatattctacaagcgaaatgagactcgtttctttaaggaccgccactggacaacgcgtgagttccaggagctgctggaccaggaggagttccacgagaaacgaacacttttcgaagtgggatgcggtgtgggcaacctggtattcccgctgctggaagaacaaaccagcgaagagggatgtttcagcaatagcagattcttcttctacgcgtgcgatttctcaccgcgagcagtggaattcgtgcgctccaatcctctgtacgatcccagccagatatctgcctttcagtgtgatatcacaacgcaacaggtgcatgaccacatccctcccagcagcgtggacatttgcacgctgatctttgtgctctccgccatacatccacagaagttcaaagatgtggtgcagaacctgggaaagctactaaagccaggaggactgcttctgtttagggattacggtctctacgacatggcacagttgcgctttaagccgggcaacaagatagcagagaacctctatgtaagacaggatggcacccgtagctacttcttttcagaggaggaagtatccaagctgtttcaggagaacggctttgaggtcattaccaatgcctatgtccatcgtcgaactctaaatcttaaggaaggcgtggatgtgccgcgcatttttctgcaaggcaagtttaggaggaaaaacctgtga

SEQ ID NO: 10284 - protein, 274 aa, DROSOPHILA
MANTKELSAVERQKLDEQNKRGLVPEYKANKLEIDAQRNWDIFYKRNETRFFKDRHWTTREFQELLDQEEFHEKRTLFEVGCGVGNLVFPLLEEQTSEEGCFSNSRFFFYACDFSPRAVEFVRSNPLYDPSQISAFQCDITTQQVHDHIPPSSVDICTLIFVLSAIHPQKFKDVVQNLGKLLKPGGLLLFRDYGLYDMAQLRFKPGNKIAENLYVRQDGTRSYFFSEEEVSKLFQENGFEVITNAYVHRRTLNLKEGVDVPRIFLQGKFRRKNL

SEQ ID NO: 10285 - DNA, 3268 bp, DROSOPHILA
cttggacaaggtgtatcggaagcgcacggtgccggacaacagcagcgaaacgaagttcatgagcaacgagcagctggacaacgagttccagaacttggtggtgcgggctcagcaaattctgcaaatgccacccattgtgcagatcaaaaaagatgtggagcgggtgatagccaaggatacggcgctgaaggacttcgccaactccaagttcgtattcacggacatcaccttcggccgacggcagtcggaacgcaaggtaatcgtccgggatatggacggaaccttggcctacgccactcttgataccacgaagcgcatgaaccagttgtatttcccgctggagggtcgccagtcatatactccacgaatgttcgcgctggaggagctgctggccaagtgcttggcggagcacaagtacgagttcatcctggatcgactcttggtgcagtacgagccacatgagccggagttccacaacatttcagcgcgtgtgttcgagcatctcaacgagtccaaggagttcgatcttctgcgctccacccgccactttggacccatggccttcttctacgcttggcaccgctgcatcgacgacctgctgtatgacatgatccgtcgggattatctgcacaatgccgtggagctgattgctctgagctacaagctacacaacatcccagtggagtatcaggcaacgctgaccgaactgggcaaactgcatgccacgccggcggaaagtgccctggcggagctaagaagcgtcttccgacgacatgacaataagcagaacattgagcaggagatccatacggccattggcaagacggagcacgatttcgccgccgatgagatcagcctgaagttcattgagcagtacatcgccagcgaacatgcgctgaagaaggtgcaactggagctggcggtgcagacgcttaaggaagttaaccgggagaaactgatgctgttccagggactgaaaaaggctcacggcgtccaggcttcgtaggatctattcgctttattgttatcgatttctatgtactaataaataccagctaggtcaagatttctatacgctgttcatagctccttcttgaggaccctggacagccgtctaaaatggccaaggatgcactgtctccggtgccgcaggcatacccgctcgctgctgaaacgcttcaagcaaactgagcaacgtctgggatcacctcttccattgggcaacccgttgtgttcgcgaaataggacgaccactttcgccttggcacaactctgttctttttttcggtgtaccaaaagagaggtggtggtcttgaagtaacgtttgcactgaagacatctgtagcacttcctgccgctatggtttctcaggtgcctgagcaactgcatctctgagtggctcatggcgttgcagagtagatgtgggcatttaaagagcatcgatgacttcctgggcgctagagcgggacagctcagactgtgttgcttcaattgtttctggtggtccagacgctgaccacagcgaaagcacagagcaccaggtccatagtgcgcggtcatgtggctctggtgctccagcaaggttttggccacatcgccgcacaccgcgcactccatcatgccgttgggaaatatgaatgtgttctcgctcacgtaggtgagaaatttgtcggaattggaggcctcagaaccggtatcctttggccgttcctctggtaaataccactcctccgaatcgcgacggcattgaatgcccgcatccttagtgcccgcattctctgtttgaatggcgcgctctctgcgcggcaccatagcctcgttcgcaaacattccagtgacctcgttgagtctcttctgctgtacggatttcttgggagactctgtagcgcctccattggtgatcggggcatgcagttctttcactggaatgccattctctatcgcgtacttgcgtgtcacccacttggtctccacgcacacgtattccggcagctcgaagacgggcaaagggatagacttcatctgaacagggctgtggcgtggtggttttccggcggatatcggttgaccggccaacgccacctttgccggttgcgccgggtacatttcgttggttcggggttctcaaatggcactaaatcgatacgtatccgaaaaatgaattcacattttacttggaacttattttatttttgttattaattacgcttgctttttataaaaagacgcgaattttactggcgcaaaaaattcaatgttgctattggtgctggcgggctagcttttttcccgccatatccgacttcttttgactattatgacagttggaatattaaaaaattaaaataaaatataaatctaacagttcttttttcatggcaatcaatacgaagtgctgaataactgcatgttctctgattatactgtgtttataaactaaaatttctaccaaatttgtttagcaacaagttctcttaacagtgccattttaaataattaggggtattcttatgagaagtatgacattttctaatgaattcaaaattgtattaagcaaacataaatttgttatatattttatatttcattcaatgcctattataatagtttaattaaactgattgtaaatctggtggaaaaatcaaataaaaattgtagttatttttcgtttgttttgatgtattaaatcaatcattattatattgtacaattattcgggcagaaactgccctaagcactactttttactcttatccttgtccttgatggtgtacttgtcgtaggacttggtgggatcgtagggctcccatcggctggctgggaagatgtgcttgttgcgctcgtaccaggagcggaggagtacctttccggcatgggactcctccttctccacggaggcgtcgcttatcatgcgcacatcgtcgtggacgtcgaactggaagagcgggccggatttgccgcgtgccttggtcacgataaagtcgtagaaggaatagtggtgcggcaggatcagatcctccttgacgtacatcagctggtcggccattacggtcttcagttcgatgaactccttgcgcagcagctccaggcacttctgcagaaactggtagatggagttgcccttcttcatcagcacgttccgccgatggccggagccatcccagtagctgaacgtgatggagatgtcctcgtccttcagctccgcctgctgcattacccattcttgacgcagctgctcgcgcagtctgttctcctgctcctcgcgctc

SEQ ID NO: 10286 - DNA, 1268 bp, DROSOPHILA
accaatagcaacattgaattttttgcgccagtaaaattcgcgtctttttataaaaagcaagcgtaattaataacaaaaataaaataagttccaagtaaaatgtgaattcatttttcggatacgtatcgatttagtgccatttgagaaccccgaaccaacgaaatgtacccggcgcaaccggcaaaggtggcgttggccggtcaaccgatatccgccggaaaaccaccacgccacagccctgttcagatgaagtctatccctttgcccgtcttcgagctgccggaatacgtgtgcgtggagaccaagtgggtgacacgcaagtacgcgatagagaatggcattccagtgaaagaactgcatgccccgatcaccaatggaggcgctacagagtctcccaagaaatccgtacagcagaagagactcaacgaggtcactggaatgtttgcgaacgaggctatggtgccgcgcagagagcgcgccattcaaacagagaatgcgggcactaaggatgcgggcattcaatgccgtcgcgattcggaggagtggtatttaccagaggaacggccaaaggataccggttctgaggcctccaattccgacaaatttctcacctacgtgagcgagaacacattcatatttcccaacggcatgatggagtgcgcggtgtgcggcgatgtggccaaaaccttgctggagcaccagagccacatgaccgcgcactatggacctggtgctctgtgctttcgctgtggtcagcgtctggaccaccagaaacaattgaagcaacacagtctgagctgtcccgctctagcgcccaggaagtcatcgatgctctttaaatgcccacatctactctgcaacgccatgagccactcagagatgcagttgctcaggcacctgagaaaccatagcggcaggaagtgctacagatgtcttcagtgcaaacgttacttcaagaccaccacctctcttttggtacaccgaaaaaaagaacagagttgtgccaaggcgaaagtggtcgtcctatttcgcgaacacaacgggttgcccaatggaagaggtgatcccagacgttgctcagtttgcttgaagcgtttcagcagcgagcgggtatgcctgcggcaccggagacagtgcatccttggccattttagacggctgtccagggtcctcaagaaggagctatgaacagcgtatagaaatcttgacctagctggtatttattagtacatagaaatcgataacaataaagcgaatagatcctacga

SEQ ID NO: 10287 - protein, 341 aa, DROSOPHILA
MYPAQPAKVALAGQPISAGKPPRHSPVQMKSIPLPVFELPEYVCVETKWVTRKYAIENGIPVKELHAPITNGGATESPKKSVQQKRLNEVTGMFANEAMVPRRERAIQTENAGTKDAGIQCRRDSEEWYLPEERPKDTGSEASNSDKFLTYVSENTFIFPNGMMECAVCGDVAKTLLEHQSHMTAHYGPGALCFRCGQRLDHQKQLKQHSLSCPALAPRKSSMLFKCPHLLCNAMSHSEMQLLRHLRNHSGRKCYRCLQCKRYFKTTTSLLVHRKKEQSCAKAKVVVLFREHNGLPNGRGDPRRCSVCLKRFSSERVCLRHRRQCILGHFRRLSRVLKKEL

SEQ ID NO: 10288 - DNA, 7532 bp, DROSOPHILA
aaatccaaaataaaaagatatctataaatactatagtacttatagtacttaaaaaaagattgataataatagttaaggcgaaattatcacaatcgttgctgtgtattggtattaaagggtttagaaacaaacattttatcaaggtaaaaatattataagcatatttttaccaatgcatactacaattgctgattctccatactttttgaaaacattttttagaccagtttccatatgtgcggattttaaaaccctttgataacgaactaacttattgtacattagtagtttccccacccaagtaccattatgaatgacacaatttttatataaattattttttttttatttaaatacataattatttattacaaatacataaataaataagttatgacaaacactattttacaagacaaaatcggaactcggtgtacaagattcgcgttacaattaatatcaaagaagtgacaaggtgacgcgacgccagtgcgtcttcaattgagcaacaactgtgagtagctaatgagtgggtcaacaagtgaagtgaagggaagtgaatcatatatataacaaaatataacaggtattcaaggagacatccgtaataactaagagtgataaatacgatgacgaatgccactatcgaaacgattcggtcggtagttggaatgcgagagtgttgaaagatggcttcggtcagaagtggaaaacgaactcatcggaggaggtgtcaaccggaacggatccggtgatattcgcatggtagccagtcacctcctccttgtcagtctgctgatccgttaatcattgatagctctgggtgatctgttggatccagggcaggtaggcggagaccttaacgtagacgccgggaacgttcacctgaccacatccaatgccccaggacaccactccgaccacgtgcatggctccattccggtcgcacaccaatgggccaccgccatcacccttgcaggcatccttgccctcctctccgccggcgcacacaaatccgggattcagtttgtagctatagcccagacgcgtgttcctcagctgggactcgcactgttggtgcgataggattggcacatccacctccttcagaatgttctggtactttccgtgctcgccgaaggcatccttgccccatccagttgtccagcaacgagctccagtgaaatcggaatacttgtcgggcagacaggcgggactaatgtgcggattcttggtgaagtcaacgggttgatccagtttcagaacggccagatcattgtccagagtgccggcatagtactcgggatggatgtgcacggaaaccacatcgcgttcaatgtaggggaagaactccacatcgtggttgacatcccattcgcccagacgcacacgaagatcgaagccattttgactggatagaaagaagcaattggttaatgctctggtgaaatatacttttatgactctagaacttacgatttaatgcaatgggcagcggaaatgatgtgctgggcatcgatgagcgtgccaccgcaggcgtagatcgactccttgggatccttcttcagaatggccacatgccagggatactcgccgaactcactgtctccatcaacgtagacgggattcttgatgcgaccggtgattccagcggcgttcctcactccacaacgaccaaattgctggggaggagcctggggacgcagtggacgacggcagcagacttcgttgatgcggcaggtcttttccacgggtcggtttccataataggcacgctggaaaatatcaaggaaggcaatcgcaattagataaatgttggaggaatgggtacaatcttatctggatttgaaatgtactttgaatgccatataacttttcctaattaccatcaatgatttaatcaataaacaattaagaatatttataaaatgtggggttctttgactcttaaaaagttttacaaaatagttacataatttgggactgaacttctcatgaaatttttcaattttgtagttatggactttagtactctattgacgctttcgaatgaactttaatgctttagccacacatggttacctgctccttaggagctgctcccgcccacacaccatcctcaacgctcctgcgcctgcgatcccgtgggaaagtgatccgatcactgccagctgcctcaccaggagccggagtgggaatgttgtagaggggtcccaggttcaactgtttgccacgacgaccggaattcgatggcctgtctgtatcaccaccgctcacattggcacttcgctccacatgctgtgagtactcgccatagcccccgaaatcgggactggatccgggatatatagagttgaaggagctctcgtagggagacgattcgtggtggtgatgatactgaacagaaggcccactgtgatactcaaatatgggagtacttgggaccatttccacactgaaatggagacccggtccagttcctccatagaaatgcggatacgagtggtggtcatggtgatcgtggtggtcatggtgatcgtaatcgtggtgctcatagccactataatgatcgtgatggtggtaatgtgtactatacgcttcggtgggcttccgcttaaagaagtctcccactttctgaatgagattcgcattgggagtgacatgcagattgaccagtggcttcaccaccttctcgccatattctgttttggccacctgcaccgataccagaggattcacattcaccagacccagattcagaccatttggacccaccgaaccgaagtacgggttttgagcgggcacatgatcacccagaatattcgagggataacctccatacccgccagtgggatagggcaaaccaaagctgacaccgtaggtgggcagcactttgcgttggatcagctcgatggcctggagagcgggcaatgccaatggagatcctccgagcggggactgtctctatttgttggtaaggggaaaacataagaacgctagaggtggagttccatttctgattgccggttgcaggttgcatgtttcgggttgcaggcgtgcgatcacaaaggtcgtgcttggttagctggtttagttctgggattagtgactggtctaatcggaaccgatttgcactctggtattttagttgagcttggagcgttgaacgatgggtgcagttgtcagattggtttgatttgttgattgactgattgatttgttgtttgatttgaatgtgtgtgtgtgtgggagggaggagcttggctaaaactcgattagtggtccatgtgaaccatgtgtgatttggcattagttgggcactacttaaactaatagacttctatggacttaccccttgagcatcgagtgagagatcgcttgcttcgtcatccttttgatcagcctggcggcgggtgcgcttcttgtcatccttgtccgccttctcctcgtccttcttagcctcagcagtagtggtagcattgctggatagagcatcgtcactcagagcctcaatgtccttgcccaggttgcggggatcaataggcagaatgagatcctccttgcgtccaatgcgatcggcagcgggacactgggagatgggcacacactggcagtcgacgatctgctggcgcgaggtgtcatatccactctggtactgaccctgaccctggtaaccaccagagatgccattgtactgattggatgctccaccttgcagctccttcttgtagtagtcgggattctggctgtgataactggagctgggcgatccactgaatcctccagaggaactgctgccaaagtttcctagtcctgagttgggcttgtagagatctccagagtttggtttgtacagatctccagtgggtttctgggagattccaaaaccgttctgcgaaagaagtccaccctgagaagcaccattaaagccagcattgaaggcattggactgggagtaactggatccggaagaagtctgaatggagggagtgtatgtggcagatgattgggccagggcactgaagtcggtgttaatggtctggccagctccgatgggaattggcacactgggaacctttgctccctcgccaccttcaacatggtgataatgatgatgcacatgttgctgcagaccatcgagcggtgctccaaccaccactttggtgctggaggatgtggccgaggcggaagaagctgaagactgctgcgagtagaaaccattgggagcagagcttgcaccctggatgccaccctcggggttctcgtagttgtatggaggaactccattcgaagcaccagtaaaaacgggtccagctcccagagaaggacctccggtgtagatgggtcctggtggcttgctgtcatagatcagggctccgggtggtggcttcgtgtaggtgataccgtcggatgaaccgtcaatggcggatggtggaggatgctccaggtagccaccgggtccagatggcctgtaaggtccagacattggcttgtatggtccctcgtatcccaccttccttggcggtccaaaggagttcacggagctgggcggaggtccaaaggagttcagggagcttggcggaggtccgtaagatccaggaggtccacccattggtggacgaccactgaagtagcttggtgggggcatgggcttagccggaccatagggaccaccgctgaaaccagatggtggtgggggaccctgggcatagatggtcgagtagaagggacgcttctcctccacatcgcagctcatcagtcccaatccacacagcttatcccggataagattgcgggcctgcatatcgtttccctgctgcagagcctgatcgatattgccatcagcatagacggcatcgtattcccccagattacgaccctcacggcgggagttgatcagctgctcgatgacctcgtcaatctgggtggtgctgttgctctggatggactcgtggacgaggtaacgtccctgaatgtcagcttgttcggcgggcttggtatcgacagatcggcgactgggcatggcatcctccatgggcgcccactcatttccccagttggattcctcggccaaggaggcggtggccagcagtacaactgccaaaaggctagttcttattctcattgtgaagcctgtgaaatgattagatagaaaaactttaggataccaattctctaatatctacggatatattaatcaagtgattgattgaccatctttgtcgccttttcttttgagtggaaaataaattaagaggtttagtcatgattggttatgacataagtggcgagcttgacaccattaccccaagtcattgtgccagtttacatttctccacctagccaccgatccctcataccatctttggcttaaccaatccgtaacaaaaccgaatccgaagcccaaaccggttagcatcacgaaatcttcaccgtgactcagactctcgtataagacttttactttcattggaggtcgcagaccgtagcacttaattgcctgattttgtacgttacttttgctcgaaatgcgagtcgggatggcgaggggatcgctggcttcaggtccccgtaatttatgaggtaattttcctacagatttagcaagcctacgactgcaatcccaccgaagaccatcgctcaacttgatctctcgccctgacagccgctttccgcttcgtgtctcttttatttggtaaaattcacttttcttttcagcctttatttttatggtcgtttgcattgcagttatgtcaccggctcacagcgagggcggattttgtaaaagatcggctacacttaacaaaaaaatcaattatgaatgtaatattggtttaaggagtaactaataggatagccagaattataattttgccactcggaattatatgcttaagtaagaagatatatttatattttaaatgattatgtaaacagatctgattcatctagagcggcattacacactacaatttcgagttatattttattttttatgatttttttcaagtatatattttccagttatgtaaatgtatctttggatttctttaggcctgctttttcggccggaagttgtgcgcagcgttgcattgcaaattgccggcaactttttcgcttggattttctttggcgagaagtgctcgtaagcgatgctaactgccgtttggttgggtttgggaaatttttttaggtttttcctttgtgttcgcagtgaaagtttcgcttgttcgattggcttaatgacgcggaggctcttggccaagagtttttattaagtgtatgtatgtaggcatatttgcaacaaccataatttcatgtgctgcagactcataattcacatctaatagccattcatttaaattagttcgctttcggttcacttgagttcactttgctaatttcgctcacttcactcaccttttttgtgtcaagtttattaatccaattggttagttatcactgttgtccggataatccttatgcaatttactgagtctcttatcctttcacttcattcactttctgcaccgattgtgctcttcgatgctctgcagatcgttcactgatttcgctttcgttggccgcgcacattttatacaaaagctgtgcatgcgcgccgtcgacgtcaagctccaacgtttcgctgtctctgtctgcattgattccgtcttcttctagctttcataccgccttagtttgcgaatcggtagcccaaaacaaaagatacaaaagcggcgacggcgacaatgtttggcaacccctctttttcgctgttagtgttgatttttcgtctgggttttttcctcaaatccccaattctgcccaactactggaggtcagtaaacgaggcggaaataggcggaaatatcactatgatagcttcattatcagtaagaaacccagaaactatcatcacattcaacacatctcttaaacataactgactgtcttaaacatccaaatggggctttgtttttttttttatgattttaccaaattttaaataaccaaatttagcttcccggaaaggcgttgcttgagaaaccgggattatgcaattctgcaattatgaattgggtcagagagtagcaaccgctgaataataaaaacatcgtgaaaaagggtaaaattgggcattgcctcaaaccggatcttttggcatacattcatctttccccattttttttttacttcatacatctgcctctctttttggttgcagttcagttcaaatcgcctggtttttaacccatggtcaatgcaaacgtcatcgctcggtcactcgtttcattttcgtttattttaacgttttttttatttaacctagctcactgtgagtaaaaagcgcttggcggaattacccgaagttcataaaaattagagacattccccccaaacttattcacgatgatcacgttcgcgtgccactaccttaaatcccaatcattatcaggtttgcgtttgtgttgtgtatggtcagtgctgcccggccggagtgagtctcattgtgattcagtggctccagtggc

SEQ ID NO: 10289 - DNA, 3670 bp, DROSOPHILA
ggtgcagaaagtgaatgaagtgaaaggataagagactcagtaaattgcataaggattatccggacaacagtgataactaaccaattggattaataaacttgacacaaaaaagatgagaataagaactagccttttggcagttgtactgctggccaccgcctccttggccgaggaatccaactggggaaatgagtgggcgcccatggaggatgccatgcccagtcgccgatctgtcgataccaagcccgccgaacaagctgacattcagggacgttacctcgtccacgagtccatccagagcaacagcaccacccagattgacgaggtcatcgagcagctgatcaactcccgccgtgagggtcgtaatctgggggaatacgatgccgtctatgctgatggcaatatcgatcaggctctgcagcagggaaacgatatgcaggcccgcaatcttatccgggataagctgtgtggattgggactgatgagctgcgatgtggaggagaagcgtcccttctactcgaccatctatgcccagggtcccccaccaccatctggtttcagcggtggtccctatggtccggctaagcccatgcccccaccaagctacttcagtggtcgtccaccaatgggtggacctcctggatcttacggacctccgccaagctccctgaactcctttggacctccgcccagctccgtgaactcctttggaccgccaaggaaggtgggatacgagggaccatacaagccaatgtctggaccttacaggccatctggacccggtggctacctggagcatcctccaccatccgccattgacggttcatccgacggtatcacctacacgaagccaccacccggagccctgatctatgacagcaagccaccaggacccatctacaccggaggtccttctctgggagctggacccgtttttactggtgcttcgaatggagttcctccatacaactacgagaaccccgagggtggcatccagggtgcaagctctgctcccaatggtttctactcgcagcagtcttcagcttcttccgcctcggccacatcctccagcaccaaagtggtggttggagcaccgctcgatggtctgcagcaacatgtgcatcatcattatcaccatgttgaaggtggcgagggagcaaaggttcccagtgtgccaattcccatcggagctggccagaccattaacaccgacttcagtgccctggcccaatcatctgccacatacactccctccattcagacttcttccggatccagttactcccagtccaatgccttcaatgctggctttaatggtgcttctcagggtggacttctttcgcagaacggttttggaatctcccagaaacccactggagatctgtacaaaccaaactctggagatctctacaagcccaactcaggactaggaaactttggcagcagttcctctggaggattcagtggatcgcccagctccagttatcacagccagaatcccgactactacaagaaggagctgcaaggtggagcatccaatcagtacaatggcatctctggtggttaccagggtcagggtcagtaccagagtggatatgacacctcgcgccagcagatcgtcgactgccagtgtgtgcccatctcccagtgtcccgctgccgatcgcattggacgcaaggaggatctcattctgcctattgatccccgcaacctgggcaaggacattgaggctctgagtgacgatgctctatccagcaatgctaccactactgctgaggctaagaaggacgaggagaaggcggacaaggatgacaagaagcgcacccgccgccaggctgatcaaaaggatgacgaagcaagcgatctctcactcgatgctcaagggagacagtccccgctcggaggatctccattggcattgcccgctctccaggccatcgagctgatccaacgcaaagtgctgcccacctacggtgtcagctttggtttgccctatcccactggcgggtatggaggttatccctcgaatattctgggtgatcatgtgcccgctcaaaacccgtacttcggttcggtgggtccaaatggtctgaatctgggtctggtgaatgtgaatcctctggtatcggtgcaggtggccaaaacagaatatggcgagaaggtggtgaagccactggtcaatctgcatgtcactcccaatgcgaatctcattcagaaagtgggagacttctttaagcggaagcccaccgaagcgtatagtacacattaccaccatcacgatcattatagtggctatgagcaccacgattacgatcaccatgaccaccacgatcaccatgaccaccactcgtatccgcatttctatggaggaactggaccgggtctccatttcagtgtggaaatggtcccaagtactcccatatttgagtatcacagtgggccttctgttcagtatcatcaccaccacgaatcgtctccctacgagagctccttcaactctatatatcccggatccagtcccgatttcgggggctatggcgagtactcacagcatgtggagcgaagtgccaatgtgagcggtggtgatacagacaggccatcgaattccggtcgtcgtggcaaacagttgaacctgggacccctctacaacattcccactccggctcctggtgaggcagctggcagtgatcggatcactttcccacgggatcgcaggcgcaggagcgttgaggatggtgtgtgggcgggagcagctcctaaggagcagcgtgcctattatggaaaccgacccgtggaaaagacctgccgcatcaacgaagtctgctgccgtcgtccactgcgtccccaggctcctccccagcaatttggtcgttgtggagtgaggaacgccgctggaatcaccggtcgcatcaagaatcccgtctacgttgatggagacagtgagttcggcgagtatccctggcatgtggccattctgaagaaggatcccaaggagtcgatctacgcctgcggtggcacgctcatcgatgcccagcacatcatttccgctgcccattgcattaaatctcaaaatggcttcgatcttcgtgtgcgtctgggcgaatgggatgtcaaccacgatgtggagttcttcccctacattgaacgcgatgtggtttccgtgcacatccatcccgagtactatgccggcactctggacaatgatctggccgttctgaaactggatcaacccgttgacttcaccaagaatccgcacattagtcccgcctgtctgcccgacaagtattccgatttcactggagctcgttgctggacaactggatggggcaaggatgccttcggcgagcacggaaagtaccagaacattctgaaggaggtggatgtgccaatcctatcgcaccaacagtgcgagtcccagctgaggaacacgcgtctgggctatagctacaaactgaatcccggatttgtgtgcgccggcggagaggagggcaaggatgcctgcaagggtgatggcggtggcccattggtgtgcgaccggaatggagccatgcacgtggtcggagtggtgtcctggggcattggatgtggtcaggtgaacgttcccggcgtctacgttaaggtctccgcctacctgccctggatccaacagatcacccagagctatcaatga

SEQ ID NO: 10290 - protein, 1185 aa, DROSOPHILA
MRIRTSLLAVVLLATASLAEESNWGNEWAPMEDAMPSRRSVDTKPAEQADIQGRYLVHESIQSNSTTQIDEVIEQLINSRREGRNLGEYDAVYADGNIDQALQQGNDMQARNLIRDKLCGLGLMSCDVEEKRPFYSTIYAQGPPPPSGFSGGPYGPAKPMPPPSYFSGRPPMGGPPGSYGPPPSSLNSFGPPPSSVNSFGPPRKVGYEGPYKPMSGPYRPSGPGGYLEHPPPSAIDGSSDGITYTKPPPGALIYDSKPPGPIYTGGPSLGAGPVFTGASNGVPPYNYENPEGGIQGASSAPNGFYSQQSSASSASATSSSTKVVVGAPLDGLQQHVHHHYHHVEGGEGAKVPSVPIPIGAGQTINTDFSALAQSSATYTPSIQTSSGSSYSQSNAFNAGFNGASQGGLLSQNGFGISQKPTGDLYKPNSGDLYKPNSGLGNFGSSSSGGFSGSPSSSYHSQNPDYYKKELQGGASNQYNGISGGYQGQGQYQSGYDTSRQQIVDCQCVPISQCPAADRIGRKEDLILPIDPRNLGKDIEALSDDALSSNATTTAEAKKDEEKADKDDKKRTRRQADQKDDEASDLSLDAQGRQSPLGGSPLALPALQAIELIQRKVLPTYGVSFGLPYPTGGYGGYPSNILGDHVPAQNPYFGSVGPNGLNLGLVNVNPLVSVQVAKTEYGEKVVKPLVNLHVTPNANLIQKVGDFFKRKPTEAYSTHYHHHDHYSGYEHHDYDHHDHHDHHDHHSYPHFYGGTGPGLHFSVEMVPSTPIFEYHSGPSVQYHHHHESSPYESSFNSIYPGSSPDFGGYGEYSQHVERSANVSGGDTDRPSNSGRRGKQLNLGPLYNIPTPAPGEAAGSDRITFPRDRRRRSVEDGVWAGAAPKEQRAYYGNRPVEKTCRINEVCCRRPLRPQAPPQQFGRCGVRNAAGITGRIKNPVYVDGDSEFGEYPWHVAILKKDPKESIYACGGTLIDAQHIISAAHCIKSQNGFDLRVRLGEWDVNHDVEFFPYIERDVVSVHIHPEYYAGTLDNDLAVLKLDQPVDFTKNPHISPACLPDKYSDFTGARCWTTGWGKDAFGEHGKYQNILKEVDVPILSHQQCESQLRNTRLGYSYKLNPGFVCAGGEEGKDACKGDGGGPLVCDRNGAMHVVGVVSWGIGCGQVNVPGVYVKVSAYLPWIQQITQSYQ

SEQ ID NO: 10291 - DNA, 3876 bp, DROSOPHILA
tgctgcttgtttgaaatatttctttaatctgcttgcaatttttgagtttgaatgtatgtagtcattaatgtaaaactttgtagttctatagttctataatacatatatatatttaattatatgtatagatatatatatatatctttgaatcacacatacacgcatggaactcatgcatatatgtgagaggctgattggtattgtagtgtcaaataagcaaggtgtttagcatataaaaaagaaggttctaatataaataaatgtattttttactattgaaaattaaaactcaaataagtgttcagatatatgccttcacccattgatagcgaaaagtggacgaagtgaaaagaagataaaaaacaaaatataaataatgcaaatttttgagggctgagcttcaaactaatatgcgattaagtacattttacagttttagaatatagatgttaagtttaatccttttgcgtgcaccgttttcttttacttagatcccgatgactttgcttattaatgtgctgtgattgctgttgtttacattttacatttaaacatgttgtttatttttcaactacttcgacaagccctctacaaccatttaatggggtattcgggccgttcataattaaatatatgcgtataagtctgtttatatatgctgtaggtacaaaattaaattgttttttttttagctcgctatggggtggctgaatcgaattgtaaaataacaataaattacattaattaatacatacaaattttacacaactgttgccaatacatttcaatgtgagatttgaggtttagtaataactggggctgtaactcaatttctccttccatatttttgggctctctgtggttagttcaattttacggattgctgcctatcaattcatatttgtgtatgcgcttttctatccgcttgcattttttttttttgtttttgaaaaaatgaacactttttgtctggtgggaatatacatatggtgttggaaatctattgcacagaacatgaattcttatgaccatttttgtgctttagtctcgcctttggcttgtatttttccaaaaaggacagctgcttggcattaatggctccgcgtcgtttactaaaacaaattgcatgtttaattaatttttttcatcttgtcggcttgttatcatcaaacacttactctctaatcatttccactgctgcctcatattttaagcccaattcaatcagtgccaaggcaacaaggacaggagctcgtcccagaccagccacacaatgaacggcaacgcaagcctccggattttgttgatatctgtaaagtacaacaaaaaagttattaagtttattacaaaataaatacaaaggcttactttaattattcaattgctttaattttggtctaagcctataactctaggtctacacgcttaccgacaagtttcattatcaagaaatgcagtattattataaattgctgatgctgcctcgccagtatcattgagattatctgtgcctgttaggggaattgtatctgtgtcccgacctgatgctgcggataaactggctctggttgctgaagttcttattgcagttgcagttgctgttgttggtggaactgtttttggtatgtgtctgagcgagaatcgcttatgtttgtagtaggatagtgtggcgcttgtggactttctaaaactagggcacagcagcagcggtatcataaaatagcacacgaaacgaatcatataggaaggtaaggtaagttctcgttgatcaagtttggtagcttacaggtagtacaagttgttgatggagtgcggaattcgaaatttacaaaacgaaaacgttgagagagaattatgaaggaaggatggtgcagaagattttagttaaccaaattctatacagcaacttataactgatgaaatcatactaagctagcagctaaggcgatagcggggactacaagcggggttctgtacaacttcgaaatgttcttttttttttaatttgtgctgaatttttaaacagctcattggatatgtggctagcgcagcttttagatatttgtctttggtttttttattctttatttagtaatatttgattatctttggattgagtggcacaaagcaacaaataatactgaataaattgataaaaatcacttgaggttttttattttgtagacgcgtttagttcgattgtggtttatgatatctcggaaattatgttaagtaaaataatacatttaatacatatgtcttaaataagaactatttgatatggtggtagctgtaaatttatcaatctaattcgcttatgaaataaatgataatatctttacagtgtagctataataatgttgttactatttatattcaatgttaaaactaataatgactaaatttattagatctccagtttttgaatgtgaaacaaagtaaaataatacgctcagtgtcttaaatgacataattattaaaataacaattaactacgcgaatgcaagagctctgttattgtactcacttatcctttaagacctcaaaccactcgtcaacgacttgctgaggcgggaaggtgccgtcctcaaaggccaggtccttgacggtaatgccttgtgtctcgagctcgtcggtattatagctaggttcgcacacgcgcaccacagtgttgacattgttcttctttagctcctacaagaatgttatggaaattaatgggtggcggttaaggcttacacgattatgggacttaccataatgtagtgattaatggttatgtctgatggtcgatcggtgattaggaacttcatgcccttgtactcaattagagcgggcgctgggcgcagatctttttgacgcatggtgatgctcataaacaattacaaaagctgttctgaaggacttaatctggctcgtgtgcacttaagtctgttttcttacaatcttgaggtgtggtttttgtttcgttttcacaaagatttgattggtttcttttaacggaagtagtttgatttctagattaaaaattcagcgtgttagaggcttacaattgaatcttgtttaggctagagttatgtataaaaaataaatataaatataaatataattaactcttttcgtatcgtatcttaaatgttttacaccaaaacacaaacttagtttaagtatcgtttaagtaaaattagttctttttcttttcaattaagtacaattatggattttttctgctatcacaaagaaaatcaatcaattttctttgactgaaaaaagggttccctgttaagtgtcacacgtattttttaagctaacaaaaatgatttgggctcagttcccgttttgttttcgaaaatattacaactttttcaaggtttcgttgttaaaaatttaaatatatccttgctgtgatatgatctgtgatcaccgcgatgctttgaatttagtattcttctttctctcccatagatcgacagtctttggctaattgatgccgctgctgtcgccgctatttcagctgatccgttgacggtattattctgatggtatccacaccacttatctatcgatggcgacttccgaagtggtgactgtgtttactcaggctatctccgcctttttgtaggattgcttacctgcaaagagtgagactagaatgagttcaatattccagacaaatctggcgcaagtcggtttgagcttctttctcgcgactcccattgttcatttaattgaaaacaattcgtgggaaactaaaaaacaatttagctcaattacacgcaatgaaataattgagactttcgccattttcgtctcgcacgacactctctttttatccgcgatgttcttcggggcgggtcaagccgtcaattgtccaga

SEQ ID NO: 10292 - DNA, 537 bp, DROSOPHILA
atgagcatcaccatgcgtcaaaaagatctgcgcccagcgcccgctctaattgagtacaagggcatgaagttcctaatcaccgatcgaccatcagacataaccattaatcactacattatggagctaaagaagaacaatgtcaacactgtggtgcgcgtgtgcgaacctagctataataccgacgagctcgagacacaaggcattaccgtcaaggacctggcctttgaggacggcaccttcccgcctcagcaagtcgttgacgagtggtttgagttttttgttgtactttacagatatcaacaaaatccggaggcttgcgttgccgttcattgtgtggctggtctgggacgagctcctgtccttgttgccttggcactgattgaattgggcttaaaatatgaggcagcagtggaaatgattagagataaacgacgcggagccattaatgccaagcagctgtcctttttggaaaaatacaagccaaaggcgagactaaagcacaaaaatggtcataagaattcatgttctgtgcaatag

SEQ ID NO: 10293 - protein, 178 aa, DROSOPHILA
MSITMRQKDLRPAPALIEYKGMKFLITDRPSDITINHYIMELKKNNVNTVVRVCEPSYNTDELETQGITVKDLAFEDGTFPPQQVVDEWFEFFVVLYRYQQNPEACVAVHCVAGLGRAPVLVALALIELGLKYEAAVEMIRDKRRGAINAKQLSFLEKYKPKARLKHKNGHKNSCSVQ

SEQ ID NO: 10294 - DNA, 5498 bp, DROSOPHILA
tgatatatagacaatcttcttctgactcggaaaatccattagcgaactcgtaaagttttcgagtaacgccaggtccttttgcagctcatgtccaggcaggcaagctacgtgtagcggccgagaaaacatccgaatgtttataaaagtctcgctatctgaaaggacaaccactggaatggtttgattctcaaagatatcctttgcccagttgtacggacaataatcaatacgaatcattattactgagagcgagtgctccgctgctgctctaaagatgaagtccacagcggatcccgcaaccaggacgggtgcccataaaactattcctgttatcactgtccacatgtcctttcaattatgttgcccatcagacttagctgctttatttatattgtgcgggaactgctccaagttgaagggaaatgccttgtcaagcttttcacgccctcgatgataagacacaattcgcattgtttgtaatatgcatatctcaaaatatgtattctttgttattttgttacagttgctaaatagttaatggtgtgtgatcgtgggaggcgcgcaaatcaaatcgatacgctgccccttacatttaagttgttttacaattatttgtctgtttcctgctgcaaataaatattacaaataaataggtatcttaattatacgtgttttgtgtgtacatatatatatatatatgtctgttttctctaggtacttaagtcatggtgaatggtaaaccaattgccaattatcaattagaaagattataggatagattgcacttaaggagggtttgggagattctaaatttgaaacgaagtacttcatggagatcgcctgtataactaaggtagaatcattagccttaaacacaatgttaatttgaactaaacggaatgttaattacacgtaaagaatgtcatgagattgatctactaacaaagttagtttggggttataacaaaataaatacaattaaataatcgttcgggggagctcagataacgctgcttaaatttgagccggctacggatccgtggttgttcttctgcggtgttgttgtcggcgtcgttgacattgctattccattttgtattccagcgtcaagcaactgtagcaacctttgtcgcgtgcgtttatcgctgacacaaatacaatgaataaggttgttcaattgcttgagagagtattcatcgcccgtacgctgctgttcaatccattgctcgaactgttcgggcgcaaaatagtaggtcttgatgaacacatccacataggagcgatgctgtgggtacttttggttcgatatgagctctaggaacgacataaagttcgcaaaatccagttgcataagcgctcgtcctccggcagagcatttcttcacattggagaacctataacataataaacaataactatgtaaaatcagatccttctgagaaatagaaaataagaacgtacccctccaccagcagatgcgtggccacatgggccattgaattccacacttgcttgctgggcactggaacctccttggcaatttcctccagacacatggcgaagctttgtatgttctgcatataaatgtggttagtttgtgtagtgtattaagcattatttagcatttcccaccctatttagaacatcactgtagttgctgtgctggtgtatcacatgattaacatcccatttgaccttggccatctgagccagaatggatgacaaatcgatgacgcgcgacgtgacgcatgtgtaaacgagtttagccaagtccgcaatataatcgctatagtccaggtaactggccaggattggacgctctgcaaggggcagcaagtggttcagatagtgctgaaggacgttgaactgctgaagcatgctgcgacccgcttccacggccacgatgcgttgtgacagtccgtataaggtatccggattagctagctcattatttgcctgcaaaaggatgatttaattaattaaagctctaggaaaataacatataatattaccagagaggagaaattaaggggccatagcttgatttgtggcagaacgttaacctcgaccgagcgtaaacgttgctccagtctaggagagtgcatattatccgttgctaccggctgcaaatatcaacaattaatatatcttcaaaagtgattgttataaaaatatttaccgcatcttttccgaagatttcgtgcactgcgtagacataaaagtcaatgagctccaggatgcaagccacaatcttgggagagatgcagtgcaataacttgcacatctgcagatatcttccaatgacgcgcatcacatttagcgcagtgttgtttaccagcagctggctaaaataaatttacatttattatgatttcgcggtataataaccaagataatattacttgctggcgtcatcgaactccttgctttgcaagcttttctgctcgtcatcgctctcctcgctgaaataacaggaggcctcgtccacaatgccggataagatgtcctcctccaacattgctgcatccaagccaccatcaaatggcgaacttttttcggagaatctgagaaaatatccgtaggaaccgtaaatggagctgccaccatcctgggagtgcacggaaaccagctcatcgcagttattattgctgatcggggagttgttggatgaggccagcaaagcagttgtcggagacttgtggcgccgaagagtgtgccgaaccgatcggaattcctacagagaattacatgtagataacttaaccagtcgctttaatggccaatttaaaattacttacaggcaattgcaggatatgcgcaaatgagtcgacttgcgtccaggactcgttatccaagaataaacagatttcctcaatgcagcagatatggtaacgccggaagaactcctcgctctgctgctgcatcgtctcgatcaacttctccgactgctcgccgcagaactccagacccaccttcttaagtctttgtaccacggacagcacttggatgaactgatcgtatttaagagccgtcaactttgccgactgcaggaacaagcacactttggtcagaatgtcattccaaacgcgtgactgtcccttcttcagtttctgctgaatgtaaatatctggtgaatcctcctcctcctgtccatacaacttgtagttattgtgccacataacaacctgatagtaggaggccagaatggtccagaaggttttgcacaaactaatcagacagggcagcagcttatccacgctaagctgttcgcacagctgctcatagagcggcttggcctgatcgtcctggccaggatcgctgtaaccgcgaagcactgcattcacagaagagtgaatggccgaaatatagttgatgtgcagctggtccatggccatcagtgacttgtttgccaatttgtaggcctcctgcagtttggcgtattttcgcccatcaaaacctagcaccatttcattaagcacagtatccagctgaaattccataagcagcatggtttcctgcagctttttagagagcgattgtacacagttgaactgcatgtaggcctcggcggagctcttgcactgcaggagcagagctatggcggcgctgtagttgtgatccgctagcagcttctgtacctccacgtcagtagtgcgctgtaagatattgtatgttattcaaattgcccacagaatcatcaattcatttctgaccagtctcttgatggccaccagggtgtccaacacctccttgagcacctctcgtttgcggtagctggccaagatctccaggctagtggttgttaggttcgtgcgagcaaagtttaaataggatctcgccttttggcatgtccacagcgattcctccaacttcttctgcgtgtcattgatagcggcaaactcactgctgcaggcattccgctgctccaggatgttctggagcacctgtttggtaagaaccttctgctgagtgcgcaattgtgcaatggtgacctcgatgagctcgttgtctatgccatcgttgagaactttctacggaagatcgtggtgggtaattaaagccacagcttactggtctacctggtttaccttgagttcgtacagctgtggattgctgtcggggttgtagtagcactgttcgatgctctccaggatctcctggtccgacttttgtgcatttgactcgctggaagaagtggctgccgcgtctgtggcatcagtttcttgactggcggaggcgtctgtggtcaccgtttgaatgaaataatccgaaaaacccatggcaggaattttcatttgacggttcgtctttgtgtgcgtgagcagtattttgtttggtgggcggaatgcatagcaacggggttagttttggggattatttaaatgttcgatgatctgctacctgtttgtgcaatatgtccaagaatttgctcttgaattcgtccattttggccttggaattctgcatgatttagccatgaagaaaccagccaaaacacaaaaacgtctgcagccgagtgtgaccagcatccgcaagcattgctaaagctacttgcagtgttaaaaaatatataaagttatagtacctagaaaataggtacatcattgtctacagacctatttttaggaaaaacttttgccttgttgagaagaaaaagctttaagcacttttatacatattcgtggcacattaatttaatgttatattcaaatcgaaattgggccccagtaccgattagcattttcttcacctttcaacactactacatcgaccactctttggccattgtgcacactgttgttttttgcttgccgatttttgtttaacatattgtatttatttgtttatatgtggtatgtcaaattactggaagccgcagaacccaaagagtgaaaaatgcgcatctgcatggtgtcggacttcttctatccgagcatcggaggggtcgaggagcacgtctacaacctttcgcaaatgttgctcagcttgggtcacaaggtgactattgtcaattgggcggaccacgaatgataacgattatttgaactgactatctttgcccattagatcgtcgtgctgacccacgcctacggagactgcagtggcattcgctatgtgactggctacctgaaggtctactatctgcccattaaggtgtgctacaaccagtgcatactgcccaccgctgtttgcaatgtgccgatgttgcgagcggtgctacttcgtgagcgggtggaagtggtccatggccactctgccttcagtgctctggcgcacgaggcactgatggtgggctccctcctggggctaaaggtaggcataatcttcaatacgaaacgtatagtttaaatcgctaatgaatcatctttttgtttggcagactgtctttaccgatcacagcctctttggctttgcggacttgtcagccgctctaaccaacaatctgctggaggtcaacttgggcatggtcaatcacgccatctgtgtatctcacatag

SEQ ID NO: 10295 - DNA, 2932 bp, DROSOPHILA
gtgttttggctggtttcttcatggctaaatcatgcagaattccaaggccaaaatggacgaattcaagagcaaattcttggacatattgcacaaacagacgaaccgtcaaatgaaaattcctgccatgggtttttcggattatttcattcaaacggtgaccacagacgcctccgccagtcaagaaactgatgccacagacgcggcagccacttcttccagcgagtcaaatgcacaaaagtcggaccaggagatcctggagagcatcgaacagtgctactacaaccccgacagcaatccacagctgtacgaactcaagaaagttctcaacgatggcatagacaacgagctcatcgaggtcaccattgcacaattgcgcactcagcagaaggttcttaccaaacaggtgctccagaacatcctggagcagcggaatgcctgcagcagtgagtttgccgctatcaatgacacgcagaagaagttggaggaatcgctgtggacatgccaaaaggcgagatcctatttaaactttgctcgcacgaacctaacaaccactagcctggagatcttggccagctaccgcaaacgagaggtgctcaaggaggtgttggacaccctggtggccatcaagagactgcgcactactgacgtggaggtacagaagctgctagcggatcacaactacagcgccgccatagctctgctcctgcagtgcaagagctccgccgaggcctacatgcagttcaactgtgtacaatcgctctctaaaaagctgcaggaaaccatgctgcttatggaatttcagctggatactgtgcttaatgaaatggtgctaggttttgatgggcgaaaatacgccaaactgcaggaggcctacaaattggcaaacaagtcactgatggccatggaccagctgcacatcaactatatttcggccattcactcttctgtgaatgcagtgcttcgcggttacagcgatcctggccaggacgatcaggccaagccgctctatgagcagctgtgcgaacagcttagcgtggataagctgctgccctgtctgattagtttgtgcaaaaccttctggaccattctggcctcctactatcaggttgttatgtggcacaataactacaagttgtatggacaggaggaggaggattcaccagatatttacattcagcagaaactgaagaagggacagtcacgcgtttggaatgacattctgaccaaagtgtgcttgttcctgcagtcggcaaagttgacggctcttaaatacgatcagttcatccaagtgctgtccgtggtacaaagacttaagaaggtgggtctggagttctgcggcgagcagtcggagaagttgatcgagacgatgcagcagcagagcgaggagttcttccggcgttaccatatctgctgcattgaggaaatctgtttattcttggataacgagtcctggacgcaagtcgactcatttgcgcatatcctgcaattgcctgaattccgatcggttcggcacactcttcggcgccacaagtctccgacaactgctttgctggcctcatccaacaactccccgatcagcaataataactgcgatgagctggtttccgtgcactcccaggatggtggcagctccatttacggttcctacggatattttctcagattctccgaaaaaagttcgccatttgatggtggcttggatgcagcaatgttggaggaggacatcttatccggcattgtggacgaggcctcctgttatttcagcgaggagagcgatgacgagcagaaaagcttgcaaagcaaggagttcgatgacgccagcaaccagctgctggtaaacaacactgcgctaaatgtgatgcgcgtcattggaagatatctgcagatgtgcaagttattgcactgcatctctcccaagattgtggcttgcatcctggagctcattgacttttatgtctacgcagtgcacgaaatcttcggaaaagatgcgccggtagcaacggataatatgcactctcctagactggagcaacgtttacgctcggtcgaggttaacgttctgccacaaatcaagctatggccccttaatttctcctctctggcaaataatgagctagctaatccggataccttatacggactgtcacaacgcatcgtggccgtggaagcgggtcgcagcatgcttcagcagttcaacgtccttcagcactatctgaaccacttgctgccccttgcagagcgtccaatcctggccagttacctggactatagcgattatattgcggacttggctaaactcgtttacacatgcgtcacgtcgcgcgtcatcgatttgtcatccattctggctcagatggccaaggtcaaatgggatgttaatcatgtgatacaccagcacagcaactacagtgatgttctaaataggaacatacaaagcttcgccatgtgtctggaggaaattgccaaggaggttccagtgcccagcaagcaagtgtggaattcaatggcccatgtggccacgcatctgctggtggaggggttctccaatgtgaagaaatgctctgccggaggacgagcgcttatgcaactggattttgcgaactttatgtcgttcctagagctcatatcgaaccaaaagtacccacagcatcgctcctatgtggatgtgttcatcaagacctactattttgcgcccgaacagttcgagcaatggattgaacagcagcgtacgggcgatgaatactctctcaagcaattgaacaaccttattcattgtatttgtgtcagcgataaacgcacgcgacaaaggttgctacagttgcttgacgctggaatacaaaatggaatagcaatgtcaacgacgccgacaacaacaccgcagaagaacaaccacggatccgtagccggctcaaatttaagcagcgttatctga

SEQ ID NO: 10296 - protein, 966 aa, DROSOPHILA
MQNSKAKMDEFKSKFLDILHKQTNRQMKIPAMGFSDYFIQTVTTDASASQETDATDAAATSSSESNAQKSDQEILESIEQCYYNPDSNPQLYELKKVLNDGIDNELIEVTIAQLRTQQKVLTKQVLQNILEQRNACSSEFAAINDTQKKLEESLWTCQKARSYLNFARTNLTTTSLEILASYRKREVLKEVLDTLVAIKRLRTTDVEVQKLLADHNYSAAIALLLQCKSSAEAYMQFNCVQSLSKKLQETMLLMEFQLDTVLNEMVLGFDGRKYAKLQEAYKLANKSLMAMDQLHINYISAIHSSVNAVLRGYSDPGQDDQAKPLYEQLCEQLSVDKLLPCLISLCKTFWTILASYYQVVMWHNNYKLYGQEEEDSPDIYIQQKLKKGQSRVWNDILTKVCLFLQSAKLTALKYDQFIQVLSVVQRLKKVGLEFCGEQSEKLIETMQQQSEEFFRRYHICCIEEICLFLDNESWTQVDSFAHILQLPEFRSVRHTLRRHKSPTTALLASSNNSPISNNNCDELVSVHSQDGGSSIYGSYGYFLRFSEKSSPFDGGLDAAMLEEDILSGIVDEASCYFSEESDDEQKSLQSKEFDDASNQLLVNNTALNVMRVIGRYLQMCKLLHCISPKIVACILELIDFYVYAVHEIFGKDAPVATDNMHSPRLEQRLRSVEVNVLPQIKLWPLNFSSLANNELANPDTLYGLSQRIVAVEAGRSMLQQFNVLQHYLNHLLPLAERPILASYLDYSDYIADLAKLVYTCVTSRVIDLSSILAQMAKVKWDVNHVIHQHSNYSDVLNRNIQSFAMCLEEIAKEVPVPSKQVWNSMAHVATHLLVEGFSNVKKCSAGGRALMQLDFANFMSFLELISNQKYPQHRSYVDVFIKTYYFAPEQFEQWIEQQRTGDEYSLKQLNNLIHCICVSDKRTRQRLLQLLDAGIQNGIAMSTTPTTTPQKNNHGSVAGSNLSSVI

SEQ ID NO: 10297 - DNA, 4488 bp, DROSOPHILA
cacttttcaataggcattccacatagatcggacatataaaaacattggcgttatataaagaattttctcattctcgccacggcttttgctttttgtatccatttacagtttaaccattgggtacacggtacacacgggtacacatacataggtacacctttcggtacaatgtagataaaaatatacacaggtatgcccgatgagtaggggattggtaaatgtattcccgatgacctcaaatgctccgagtgccgagcttttcgcgatactcacccaccgagttgtactttaagactaaacgaacttgctgaactttgtatagagcgatagagatagagagctttgcaacaatgcgagggcttttcaaaagttatagtacacggtcgacaacaacaaatgcagtatagcgaacgaatgtgacgattctattatgatcgtttatgttcggttataaggcgtggaaaagtgtcatccattcccagacatctagacagccaaacttaagatcatatggctgcgttctagacattctgaagaaagccaaaaacaaaagcatgtattcagcaaaagtcgacaagacatgagtaactccaatcgaaatatttgggctataaacccaaaaactgggtgtattcacttgtgtactattacctcatgtctttttattctttttcagatactctacgcgttaatacaccttctgtacacattgcttaagttggaaaatgtatgtttatggagcctaatataataattccattgttgttgttaaataacgattacatatttaattatgtgcagcaagataaataaattattcatcacaccatttgtcaccgtcacaatatcttaaggtttttgtaattcatataaatggtaataccatcaataaaatacgtatcacgaaaaagttattttcgaaaaatgatttcgactatattatctgtgtaaatattaaagataagccaagtttctcgaaacaaagtgggcttgtctaaagtaacacagttttgaaatgcaaacattattgtggacaaaattatttattttttctacgataatatgggaagaaatttacatttcatacactcatggtaagtattgacaatatgattataaatgtaaccactgcttactttcggattgaaatcactgcgtgattaagatctgaaattcacaatattttgatattattttattttaagtttctattttttagcataagaaacactggcagtctatggtggcttaaatctatgttgatttagtgtactatgtaaaatcttcaagatgtatccaataacgtttatatatcgtgtcaacaatgataaggtaactaaaagtagtatttgttttaaattttagatttgaaagttatctcgctcttactcgaatatgttgctcttatcctgtgcgaattccgggctttttcttaataccataccatagttgtttattaacaacaagtttatacactgttattaagttcccaaagtcgttgatgccccacggaatcacatttctaagaggtcacattaatgacattttatttttaatctcttaacacaaagattgagtcgcgacaaatgcgaaaatgtccaagctgagttttattacataatatagaattaatattgattacatacaaaattttgaatgactggactatgggaatacccaaaaactaacttgaaatcaaacgattggttgataagtcattaaaaattgcagttataatgaaactaaaacttaaaaacttttcaaattaacaaattccaaactgaataccctactcccagaaatgaaataatacgactaaattctataatgtgaggtactctttagtcgctagatgagcttacacctttgctttaaattgtatgttttgaattaaaatattaaaagcgcgttatcagttattctaacctccgccaatgaaaatatcatcgcgacaactgaaaaatttgtttgaaacacacgcgacaaattatttcagcgcatagtagtgagtattattcccaaattcattggagcacattgttaaaaattagcatttagtgtaataaaaagttatactaaatattagttaaaacatatatggatttgttgttaagaaaccacgagtataactccacctgttgaattgataagaacttaattttttttaggatccctaccggaagagaggttcagagatcggcgacattcaactaaaggccacctctgaaactttttctccaaaaatggttgtggatttcgtagccggactcctgggcggtaagtttacctccccaactatacaaaaaaaaagcaccttatcaaatagatacctatttgaaacccaggagctgctggtgttcttgtcggccatcccttcgataccgtgaaggtccacctgcaaaccgatgatcctcgcaatcccaagtacaaaggcacattccactgcttccggacgatagtgcaaagagacaaattcataggattatatcgtggtatcagcagtcccatgggaggaatcggattggtgaacgccatcgttttcggggtctacggaaacgtgcaacgcttgtccaatgaccccaattcgctgacgtcacacttcttcgctggctccatcgctggtgtcgcccagggtttcgtgtgtgcgcccatggagttggccaaaacgcgactccaattgtccacgcaggttgatagcggcatcaagttcactggacccattcactgcctcaagtacatagtaaaaacggagggtatcagaggtgccttcaagggattaacagccaccattctaagggatattccaggtgagtacgatgtacatcgatgatgataacgacatttaggctaacattccatttcgtttgcttgaccaggctttgccagctactttgtgtccttcgagtaccttatgcgtcaagtggagacacccggcgttgcgtacactctaatggccggcggatgtgctggcatgtcgtcctggttggcgtgctaccccatcgacgtggtgaagacccacatgcaggccgatgccctgggcgcgaatgccaaatacaatggcttcatcgactgtgccatgaagggctttaggaacgagggaccgcagtacttctttcgcggtctaaactccaccttgatccgggcttttccgatgaacgccgcctgcttctttgtggtgtcctgggtactggacatctgcaatgccaagggcggcatggattccgtaatgcattccgatcagccactgactctcgtcaacctagacaacaagagccaagcggacttggaggcgacggcgccaacggttgaggaagtggtgcgcaaaataatcacggacaatgccatgtcccatcagtatgtgtccacgccaaaggatgtcgttcacagccattacacgagtagcacaatcaacattcccaaagaatctaaagcacgtttagcatccgattgtaatttaaaataaagtataaattgtttagtacctttataaatgcgcttgttgaaggtaacagctatttgaattattcataatttaagtttatttcaacgtagtgatattacaattaaatacaatatattagtctatgtgaatgcttttaagaaccgcaggacatgcaggcgtccttattttcgagcgaacaaaccatatcggccattttccgttccctatcctcttcgtacttttgggggcttccctcggcggtgccattctggccattcatgctcactgcaccctgcttcttgttcacggtgaactgaatggcattcgcagctggcttggtgcgcagatagtacattccggttttgagaccagctttccaggaataaaaatgtatggaggtcagctttccatagtttggctcggccacatgtatgttgaacgactgactctgatctatgaacgcaccacgatcggcggccattttaatcgtggacttgaccgagatttcccacaccgtcttgtacagatcgcgcaccttcgggggtatggtctcaatgttttggatcgatcctctgctggatatgatctggttcttcatgtcgtcgtcccacaagtccagctcggttaggtcgcgcaacaaatgatggttgaccacctggaattcgccggacagaactcgccgggtgtatatgtttgtggtgtagggctcgaaggattcattattgcccattatctgagctgtagatgccgtgggcatgggagcaacaagcagagagttccggacaccgtgcatcctaatggactccttcaatttctgccagtcccacaggttcgttggcaccttgtcccacatgtcgtattgcaaaattcccttgcttaccgggctgccctcgtaggtttcgtatggaccttcggtctgggccagttcgcagctggcttccaaggcgccatagtaaatcgtttcgaatatctgctgattcaagagaccggcttcttcgctttcgtacgggaaacgcatgagaatcaaagcatcagcgaatccctga

SEQ ID NO: 10298 - DNA, 1390 bp, DROSOPHILA
taacacagttttgaaatgcaaacattattgtggacaaaattatttattttttctacgataatatgggaagaaatttacatttcatacactcatgcataagaaacactggcagtctatggtggcttaaatctatgttgatttagtgtactatgtaaaatcttcaagatgtatccaataacgtttatatatcgtgtcaacaatgataaggatccctaccggaagagaggttcagagatcggcgacattcaactaaaggccacctctgaaactttttctccaaaaatggttgtggatttcgtagccggactcctgggcggagctgctggtgttcttgtcggccatcccttcgataccgtgaaggtccacctgcaaaccgatgatcctcgcaatcccaagtacaaaggcacattccactgcttccggacgatagtgcaaagagacaaattcataggattatatcgtggtatcagcagtcccatgggaggaatcggattggtgaacgccatcgttttcggggtctacggaaacgtgcaacgcttgtccaatgaccccaattcgctgacgtcacacttcttcgctggctccatcgctggtgtcgcccagggtttcgtgtgtgcgcccatggagttggccaaaacgcgactccaattgtccacgcaggttgatagcggcatcaagttcactggacccattcactgcctcaagtacatagtaaaaacggagggtatcagaggtgccttcaagggattaacagccaccattctaagggatattccaggctttgccagctactttgtgtccttcgagtaccttatgcgtcaagtggagacacccggcgttgcgtacactctaatggccggcggatgtgctggcatgtcgtcctggttggcgtgctaccccatcgacgtggtgaagacccacatgcaggccgatgccctgggcgcgaatgccaaatacaatggcttcatcgactgtgccatgaagggctttaggaacgagggaccgcagtacttctttcgcggtctaaactccaccttgatccgggcttttccgatgaacgccgcctgcttctttgtggtgtcctgggtactggacatctgcaatgccaagggcggcatggattccgtaatgcattccgatcagccactgactctcgtcaacctagacaacaagagccaagcggacttggaggcgacggcgccaacggttgaggaagtggtgcgcaaaataatcacggacaatgccatgtcccatcagtatgtgtccacgccaaaggatgtcgttcacagccattacacgagtagcacaatcaacattcccaaagaatctaaagcacgtttagcatccgattgtaatttaaaataaagtataaattgtttagtacctttat

SEQ ID NO: 10299 - protein, 399 aa, DROSOPHILA
MYPITFIYRVNNDKDPYRKRGSEIGDIQLKATSETFSPKMVVDFVAGLLGGAAGVLVGHPFDTVKVHLQTDDPRNPKYKGTFHCFRTIVQRDKFIGLYRGISSPMGGIGLVNAIVFGVYGNVQRLSNDPNSLTSHFFAGSIAGVAQGFVCAPMELAKTRLQLSTQVDSGIKFTGPIHCLKYIVKTEGIRGAFKGLTATILRDIPGFASYFVSFEYLMRQVETPGVAYTLMAGGCAGMSSWLACYPIDVVKTHMQADALGANAKYNGFIDCAMKGFRNEGPQYFFRGLNSTLIRAFPMNAACFFVVSWVLDICNAKGGMDSVMHSDQPLTLVNLDNKSQADLEATAPTVEEVVRKIITDNAMSHQYVSTPKDVVHSHYTSSTINIPKESKARLASDCNLK

SEQ ID NO: 10300 - DNA, 7006 bp, DROSOPHILA
ttcagacctattgagtattgtaatatttaattggaaattataattatttgccttaaggccttaaattaaatcattttttttttttgattattttgcttttttgaaatgtatgtatatatattgaccattaaaatgtccacaaaatggtcataaaaaccgtttggtttatagctaatggagcatatattcatagttttatgacacgttctccggaaaatgtgtaacacaaaatagtcatggctaacacggggcacttatatattttagcgaaatattactcaccaaattaccggccggctttatgaaaactgaacatataaaaactgatcgtaaatcaaaacaaagcaagtcccaaaatgacaaattaaattaaaaaaccgtgaagactatatggcaaagaaatatcttttggcaacgattcaaaagattgaatcacctagtttttatgggattccccttaaaggcaaagattctaggataatacaatcgggcttttttttttaaacatatttgggtgattgtgaacagctgtttgtggtatggagcgaacaataaaatgttttattgcctttaagttctggtgagaaatcttttagtgcactaaataattttggatgcataacacggaaaaccgtttatgtttatgttatgggcatgttcattttttttgatctgcatacaactttattgttataaaatcgcacaatcttttagaactaatgtctccaatccctggaatttctattaaataggcctataaatttcaacaggtttcttttatgctaattttctggttatatcttaaaaattaatgtatttctatttccatttagcttctccaagctccgagcgaaaaaggaaaaatgtcatgaatattccagaggatcctaaagtttctgactccttggctgcttctttggacatgagctgctcgtcggccaaaatccttccgccggagattaatcatggtagggtgtccgttttcgatcgccgccggaggggaaagaaggtcttcctagtggcctttttcgtatgcgatgataactacgactttgaaaacggaatctcagaaatgttttgctcgaaccagaaatgggtggatgaaatacccacctgcattccccaattgaattttgaagaacacgacgagaaagtaggttacgatttggaagattattccgacgaaactgtgcccaacgattacgtcgagaacagtgatattgatgaggatgatgatgaagaggttagtgaaagggaaccaccaccgccaccaccaccaccggtagtggatggagccgattccaagcctgaaccacaaatagttatcgaaattaatgatgatcatgcaaatgaagtcgttgaatcagaacctgctttagcggagactgaaactgaaaatgaggtccttgaaaacgaaactcccctgaaagcggaagtccaaactgatgtactcaactccagcaatgcatctgttaaggtcaccaatgatccttatgagccaacattcttggataacaattgtggcgaagacaatggaggctgtgcgcacatttgcaagcgattgctttatccagatgaaaaccagcccatcaataagtgcgattgtcgagagggttataccctggatcctaacgattatgctagctgcctcggtgggtgtattatatataattaaattgaaagaatttgctagacaatattattctttttgaagatatcgacgaatgcctggaatcgaatggtggttgttcggaaatttgcgaaaaccttccaggagaatataaatgtagctgccaagagggttattacttagacgagtcaggaaagagttgtgttggtatgttttaataaatgatatttaaaaagaaaaaaaattcacattaaatggtatatacttgttttcagacattaatgaatgtgcgaatcccgagctgtcatcgaattgccagggtgcttgcgagaatctgccaggttcatatcgctgtgtggagccgctggaggagaatcccgagatcacggaagtcgtggagaatcccattgagaagaccaacgaagtcccagtgaacgtttccgaatcacaacccgccggaaaaacatgtaattctggctttcaactttccgccgacggcactgattgccaggacattaatgagtgcgaggtagacggtcctgaggatcttgataataacgcagtctgtcagcaaaagtgcgagaacactattggatcattccgttgcacctgcgttgaaggataccacctgctcgaagatcaacgaagctgtgcattggatagctgtacggatctggagaatccccagttgaatcgcactcgatgtgcccacgaatgccaggatttgccagagggaagctaccgatgcgtgtgtcccaagggttatgaactatcagaggatcagcattcctgtttggtgcaagaatctccatgctccacagaaaagggagttgaaaagtgctccccgggaacctgtctagccagtgaggataataccagcttcagttgcatttgcccaacgggctaccgcagtgaggcattcagttgccaggacattgatgagtgcgcagaggatacacacctttgcagtcacacttgccagaatacacccggtggttatcagtgccagtgtcccgaaggactcaacctggtcgaggagtacacctgtttggccgagaatctctgcgaggtgaacaacaacggatgcgaacagatctgcctgactgcccgaggaggagtttgcgcctgtcgcgagggatttcgattaagtgccgatggcaagagttgcgaggacgtggatgagtgtctggtaaataacggtggctgccagcaggtgtgccgaaatcttccaggttcgtatgggtgtatatgtgccgccggctatgagctcctcaagcttgatggcatacgcggctattgcttcgacatcgacgagtgctcgcagagaactcatgggtgcagtgatcaaatgctttgcgagaacctcaatggttcgtacacctgcctctgtccaccgggatatgcccttggcttggataaccacatagtcacatcactaaacagctcattcattactgattcaacctcatccgaaaccccatcagcgcatacatgcttggacattgatgagtgctctctggccaatgggaattgctcccacttttgccagaacgagcctggtggctttcagtgcgcctgtcccttgggctatgccctatccgaggatatgcgcacctgtcaggacattgatgagtgcctcgatagcaatggccaatgctcgcagctctgcttgaatcaacctgggggatttgcctgcgcttgtgaaacgggtttcgagctaactccagatggattcggttgcgccgacattgatgagtgctcgcaggactatggaaactgtagcgacatctgcatcaatcttttaggtacccatgcctgtgcctgcgaaaggggctatgagctggccaaggacaagctaagttgcctggatgtggatgagtgtgccggccttctttccggtggttgcagccacgagtgcatcaataaggcaggtacctttgagtgtggatgtcccttgggttacatactcaacgacgatggtcgtagctgtagtcccgctctggtgggttgtccaccgggaactcagcgatccgcggatggatgtgctccaattgaatgcaatccgggttataccctgggatcggacgacaagtgtgtggacatcgatgagtgccagaagcagaacggtggctgctcgcatcgctgctccaataccgagggttcattcaagtgcagctgtccaccgggctatgaactagatagtgatcaaaagacttgccaggacatcgatgagtgtgaccaagacaagactagttgtatcactggaacctgtataaacgagattggaggcttccgctgcgagtttcccaagttccccgttctgccggagattcccacagcttcgtcactgcctgaatcgcccaaaattgaattgaagacgccaaagtatcctgatttcaccgagctgtccaatgaaatacccgagaatcccaagaaaccagctgagttcgattacccagagcccaagtttccatctttgcctaagtgggaaggtcttccaaagcttccgccccttgctgacatacctacatcgaaagcacccgttcccctgcgtcctgaagtgcctaaaagtctgtgggttaatcagttgcaacccagggatctgtgccctcgatttcaggcaccacgaaatggcaagtcccactgcaataggtatcgccataagcagaagctcttctactacagtcgctgccgaatttcatgcaattcgggctatattcttcagggtcctgagatcaaaagctgtgacgccaatggaatttgggaggggcccgaaaccaagtgtgttggtgagtcattaagttaagtaatagattatacagttggcattccgtacctcttccgtaccttttcgcagccatcaaccaacctcgtgcacagagtcctggaatctgccccgctctaaagcccgcccaaaatggagttatactcccagctagctgcactcagggtccatctcgatttggtgacgtttgccgtcttcagtgcaatgctggcttcgtgtccaccggatccttgttgaccgcctgcatgatgctgcagggctggtcgttcggtgcagatctcaactgtcagccattcggaaacggtttgcttggaaatcaattatccccgatgtggaattctccgaaaacagtgactcctcatcaaatccagaatgtggaacagattaggccctatatcaattgcccggaaaatgttgtaatcctactgcatgccggtgagcagaaggctcatgtgactcttcaaagaccccaaactaatgttaagaatggccgattggtcgcccatcccgcttgggctggtcaacttcagggtcatctgccagctggagtccataaggttgactttagagttaacgatccggagaccaagctcacaattaaatgtcacacaataattactgttaaggctgcaacacctagagaatcaaatccatttactttgtttcgaatatctgattattcaagatcatcacttcccagaccggctccatttgcgactttgtccactggtagttcattctcatttcctgcattcaaagccctggatgcaactccaaaaccagtttcctttaccaaattccaagttttcccagattctgagtcatcagagcactcgaaacttgggtcatcttccttcttcaggctggagccccttttccacgagtcatccaagcttataagtgctgctcctgcttctagtgaaaacacacgggtggatttgggttcggatacctccaactattgtcctccatccattgaagtatatctgaaggagaatcagaatctgcgttcagtggtgtgggatgagccacgattcgagggaaaactgctcaagatatataagtcacatgtaagaaaaacaaatggcttttagaatattattacttaaagtatctatttgcagtttccgggttctttgtttaaagtcggcgatcacgcaatcaaatatgaagccaccaccaccgatggaaaaactttaagctgcacattttttatatacgtcagatgtaagtataaaaaaccaataaattttatgtctttaagttcattggaaatttaaaggaaatttattaatttaaacaattttttttttggtgtttaaatagctgccaagcccactcctgcacccaccgaacccaagatcagttttgattccgagcccgaaactctctccgatgtttcacaaacctatgtggtctgtccggataaggagcccgtccgggtaaccgccgaatccgtaagtctgacttaccataaatcgtatgcttttgatttatactttaattaaaaattaaaatttttaggtaagtctgcccgttggttgcactctgaagaatatacgtccaaaatcgagatccccgaaagagctgaaacgcggcaagctcacttctctttggcatcagtatacaaatttctgatacccgaaattattatgtaatgcttgatgcgcactttatataaatatttttgtacgacttttgtatgcctgacatttttcttaagatgcaataatagatgtgctatgacgtgaaacctgtttctcagtatagtgattgaaaatagtttacaaggggtatgcgatcttcgaaccgcactaccagctttcatattcccaatattgtgaggtgttcactttcgattcgagcaagaataatggcaattgcgagacaggtaaacaccgaagtggctgtcagagggtcggcttgttagacggcttccctggcaatttgtatgggtctttgtctttggcgacagcttcctcaaacatgcttttgaacttggcaagctggcgggtattggactgggattgagatgaagctggcggctcggggaggagttggacgctttggggtctattgcacaagacgggacttggccgggtgctcttggggggaccaccttgggcataaattgtaattatgcctgccaccgcggcagacaataaatctcaaactatttatcgtacaacatgacagaagtgggtcggtcggacctgagcagcgaacccaagccgaaaaatgtgagattttctcagttttttctatgctaccacctcttttttgcatacgaacagcgaaaacatttacaatacttaaccgcaacaataacatttttaatgcagttatgactaaatgcaaaagttattttgatgttgaatgcctttgtgggggctgtcgcttaaaattgtgcgcataacttggaacatgaaaagttacttagagtcggagtttgcggggcctttaattaaaagcgacaggtttcgagacattttactttgagatcgagtcgtgtagtgttgtgtatagtgctgtgttgtttgctttgatgccgctgcatcgccgttgttgcattggaagttgcagttattgta

SEQ ID NO: 10301 - DNA, 4255 bp, DROSOPHILA
ggaaagaaggtcttcctagtggcctttttcgtatgcgatgataactacgactttgaaaacggaatctcagaaatgttttgctcgaaccagaaatgggtggatgaaatacccacctgcattccccaattgaattttgaagaacacgacgagaaagtaggttacgatttggaagattattccgacgaaactgtgcccaacgattacgtcgagaacagtgatattgatgaggatgatgatgaagaggttagtgaaagggaaccaccaccgccaccaccaccaccggtagtggatggagccgattccaagcctgaaccacaaatagttatcgaaattaatgatgatcatgcaaatgaagtcgttgaatcagaacctgctttagcggagactgaaactgaaaatgaggtccttgaaaacgaaactcccctgaaagcggaagtccaaactgatgtactcaactccagcaatgcatctgttaaggtcaccaatgatccttatgagccaacattcttggataacaattgtggcgaagacaatggaggctgtgcgcacatttgcaagcgattgctttatccagatgaaaaccagcccatcaataagtgcgattgtcgagagggttataccctggatcctaacgattatgctagctgcctcgacattaatgaatgtgcgaatcccgagctgtcatcgaattgccagggtgcttgcgagaatctgccaggttcatatcgctgtgtggagccgctggaggagaatcccgagatcacggaagtcgtggagaatcccattgagaagaccaacgaagtcccagtgaacgtttccgaatcacaacccgccggaaaaacatgtaattctggctttcaactttccgccgacggcactgattgccaggacattaatgagtgcgaggtagacggtcctgaggatcttgataataacgcagtctgtcagcaaaagtgcgagaacactattggatcattccgttgcacctgcgttgaaggataccacctgctcgaagatcaacgaagctgtgcattggatagctgtacggatctggagaatccccagttgaatcgcactcgatgtgcccacgaatgccaggatttgccagagggaagctaccgatgcgtgtgtcccaagggttatgaactatcagaggatcagcattcctgtttggtgcaagaatctccatgctccacagaaaagggagttgaaaagtgctccccgggaacctgtctagccagtgaggataataccagcttcagttgcatttgcccaacgggctaccgcagtgaggcattcagttgccaggacattgatgagtgcgcagaggatacacacctttgcagtcacacttgccagaatacacccggtggttatcagtgccagtgtcccgaaggactcaacctggtcgaggagtacacctgtttggccgagaatctctgcgaggtgaacaacaacggatgcgaacagatctgcctgactgcccgaggaggagtttgcgcctgtcgcgagggatttcgattaagtgccgatggcaagagttgcgaggacgtggatgagtgtctggtaaataacggtggctgccagcaggtgtgccgaaatcttccaggttcgtatgggtgtatatgtgccgccggctatgagctcctcaagcttgatggcatacgcggctattgcttcgacatcgacgagtgctcgcagagaactcatgggtgcagtgatcaaatgctttgcgagaacctcaatggttcgtacacctgcctctgtccaccgggatatgcccttggcttggataaccacatagtcacatcactaaacagctcattcattactgattcaacctcatccgaaaccccatcagcgcatacatgcttggacattgatgagtgctctctggccaatgggaattgctcccacttttgccagaacgagcctggtggctttcagtgcgcctgtcccttgggctatgccctatccgaggatatgcgcacctgtcaggacattgatgagtgcctcgatagcaatggccaatgctcgcagctctgcttgaatcaacctgggggatttgcctgcgcttgtgaaacgggtttcgagctaactccagatggattcggttgcgccgacattgatgagtgctcgcaggactatggaaactgtagcgacatctgcatcaatcttttaggtacccatgcctgtgcctgcgaaaggggctatgagctggccaaggacaagctaagttgcctggatgtggatgagtgtgccggccttctttccggtggttgcagccacgagtgcatcaataaggcaggtacctttgagtgtggatgtcccttgggttacatactcaacgacgatggtcgtagctgtagtcccgctctggtgggttgtccaccgggaactcagcgatccgcggatggatgtgctccaattgaatgcaatccgggttataccctgggatcggacgacaagtgtgtggacatcgatgagtgccagaagcagaacggtggctgctcgcatcgctgctccaataccgagggttcattcaagtgcagctgtccaccgggctatgaactagatagtgatcaaaagacttgccaggacatcgatgagtgtgaccaagacaagactagttgtatcactggaacctgtataaacgagattggaggcttccgctgcgagtttcccaagttccccgttctgccggagattcccacagcttcgtcactgcctgaatcgcccaaaattgaattgaagacgccaaagtatcctgatttcaccgagctgtccaatgaaatacccgagaatcccaagaaaccagctgagttcgattacccagagcccaagtttccatctttgcctaagtgggaaggtcttccaaagcttccgccccttgctgacatacctacatcgaaagcacccgttcccctgcgtcctgaagtgcctaaaagtctgtgggttaatcagttgcaacccagggatctgtgccctcgatttcaggcaccacgaaatggcaagtcccactgcaataggtatcgccataagcagaagctcttctactacagtcgctgccgaatttcatgcaattcgggctatattcttcagggtcctgagatcaaaagctgtgacgccaatggaatttgggaggggcccgaaaccaagtgtgttgccatcaaccaacctcgtgcacagagtcctggaatctgccccgctctaaagcccgcccaaaatggagttatactcccagctagctgcactcagggtccatctcgatttggtgacgtttgccgtcttcagtgcaatgctggcttcgtgtccaccggatccttgttgaccgcctgcatgatgctgcagggctggtcgttcggtgcagatctcaactgtcagccattcggaaacggtttgcttggaaatcaattatccccgatgtggaattctccgaaaacagtgactcctcatcaaatccagaatgtggaacagattaggccctatatcaattgcccggaaaatgttgtaatcctactgcatgccggtgagcagaaggctcatgtgactcttcaaagaccccaaactaatgttaagaatggccgattggtcgcccatcccgcttgggctggtcaacttcagggtcatctgccagctggagtccataaggttgactttagagttaacgatccggagaccaagctcacaattaaatattctgagtcatcagagcactcgaaacttgggtcatcttccttcttcaggctggagccccttttccacgagtcatccaagcttataagtgctgctcctgcttctagtgaaaacacacgggtggatttgggttcggatacctccaactattgtcctccatccattgaagtatatctgaaggagaatcagaatctgcgttcagtggtgtgggatgagccacgattcgagggaaaactgctcaagatatataagtcacattttccgggttctttgtttaaagtcggcgatcacgcaatcaaatatgaagccaccaccaccgatggaaaaactttaagctgcacattttttatatacgtcagatctgccaagcccactcctgcacccaccgaacccaagatcagttttgattccgagcccgaaactctctccgatgtttcacaaacctatgtggtctgtccggataaggagcccgtccgggtaaccgccgaatccgtaagtctgcccgttggttgcactctgaagaatatacgtccaaaatcgagatccccgaaagagctga

SEQ ID NO: 10302 - protein, 1394 aa, DROSOPHILA
MFCSNQKWVDEIPTCIPQLNFEEHDEKVGYDLEDYSDETVPNDYVENSDIDEDDDEEVSEREPPPPPPPPVVDGADSKPEPQIVIEINDDHANEVVESEPALAETETENEVLENETPLKAEVQTDVLNSSNASVKVTNDPYEPTFLDNNCGEDNGGCAHICKRLLYPDENQPINKCDCREGYTLDPNDYASCLDINECANPELSSNCQGACENLPGSYRCVEPLEENPEITEVVENPIEKTNEVPVNVSESQPAGKTCNSGFQLSADGTDCQDINECEVDGPEDLDNNAVCQQKCENTIGSFRCTCVEGYHLLEDQRSCALDSCTDLENPQLNRTRCAHECQDLPEGSYRCVCPKGYELSEDQHSCLVQESPCSTEKGVEKCSPGTCLASEDNTSFSCICPTGYRSEAFSCQDIDECAEDTHLCSHTCQNTPGGYQCQCPEGLNLVEEYTCLAENLCEVNNNGCEQICLTARGGVCACREGFRLSADGKSCEDVDECLVNNGGCQQVCRNLPGSYGCICAAGYELLKLDGIRGYCFDIDECSQRTHGCSDQMLCENLNGSYTCLCPPGYALGLDNHIVTSLNSSFITDSTSSETPSAHTCLDIDECSLANGNCSHFCQNEPGGFQCACPLGYALSEDMRTCQDIDECLDSNGQCSQLCLNQPGGFACACETGFELTPDGFGCADIDECSQDYGNCSDICINLLGTHACACERGYELAKDKLSCLDVDECAGLLSGGCSHECINKAGTFECGCPLGYILNDDGRSCSPALVGCPPGTQRSADGCAPIECNPGYTLGSDDKCVDIDECQKQNGGCSHRCSNTEGSFKCSCPPGYELDSDQKTCQDIDECDQDKTSCITGTCINEIGGFRCEFPKFPVLPEIPTASSLPESPKIELKTPKYPDFTELSNEIPENPKKPAEFDYPEPKFPSLPKWEGLPKLPPLADIPTSKAPVPLRPEVPKSLWVNQLQPRDLCPRFQAPRNGKSHCNRYRHKQKLFYYSRCRISCNSGYILQGPEIKSCDANGIWEGPETKCVAINQPRAQSPGICPALKPAQNGVILPASCTQGPSRFGDVCRLQCNAGFVSTGSLLTACMMLQGWSFGADLNCQPFGNGLLGNQLSPMWNSPKTVTPHQIQNVEQIRPYINCPENVVILLHAGEQKAHVTLQRPQTNVKNGRLVAHPAWAGQLQGHLPAGVHKVDFRVNDPETKLTIKYSESSEHSKLGSSSFFRLEPLFHESSKLISAAPASSENTRVDLGSDTSNYCPPSIEVYLKENQNLRSVVWDEPRFEGKLLKIYKSHFPGSLFKVGDHAIKYEATTTDGKTLSCTFFIYVRSAKPTPAPTEPKISFDSEPETLSDVSQTYVVCPDKEPVRVTAESVSLPVGCTLKNIRPKSRSPKEL

SEQ ID NO: 10303 - DNA, 3234 bp, DROSOPHILA
aaccattctgtttgtcgggtgtcacggaaatcgattttccttaatttacatatgatattaaatacttccttgcaaacaattatcatattagtaatttagaatctttattatttatttccagaatagtggaattactgcgcagcaccatgaatatttcgcagctcggccagtttatttcaagtggtgttaatatttccataacactagtcaacattctcttctttgcggataataatttcgctataacctactacggagtgtacttcctatcgatggtgttggaattattcccgtgctgctattacggcaccctgatatccgtggagatgaaccagctgacctatgcgatttactcaagtaactggatgagtatgaatcggagctacagccgcatcctactgatcttcatgcaactcaccctggcggaagtgcagatcaaggccggtgggatgattggcatcggaatgaacgccttctttgccaccgtgcgattggcctactccttcttcactttggccatgtcgctgcgttaataagtgggcggctaaccaaccaggcatttggcccataaatttgcatattcgcttaattttaattaccactaatggcggccattaacgcgcggctcatgaaaattgcattggctgcgtttaaatgccatttagcgcggattatgcacctgaatttacactcgaacaagtaataaattatgttcaacatttaaataagtttttacgttggtttaaaattatgaaaatttgtgtccaataactaaagtttcttgtacacaatcgatttatttgcatacacttttttaattaaataatattgtaaaaagcagacggctccattatatatataaatgcaataaatctatatatatatatatgaatatatgagcatcttcttgttcatagtggtataatttctcgcagtgtttcctctcatgacatctgcataaaagctccagccttgctgggaaatgtgcattaggtgaacaatggtcattatcgacagtcttagtttttatcgtccattctggatctgcatgcgattgctggtaccgactttcttcaaggattcctcacgtcctgtccagctgtacgtggtgttgctgcacatcctggtcaccttgtggtttccactgcatctgctgctgcatcttctgctacttccatctaccgctgagttctttaagaacctgaccatgtctctgacttgtgtggcctgcagtctgaagcatgtggcccacttgtatcacttgccgcagattgtggaaatcgaatcactgatcgagcaattagacacatttattgccagcgaacaggagcatcgttactatcgggatcacgtacattgccatgctaggcgctttacaagatgtctctatattagctttggcatgatctatgcgcttttcctgttcggcgtcttcgttcaggttattagcggaaattgggaacttctctatccagcctatttcccattcgacttggagagcaatcgctttctcggcgcagtagccttgggctatcaggtattcagcatgttagttgaaggcttccaggggctgggcaacgatacctataccccactgaccctatgccttctggccggacatgtccatttgtggtccatacgaatgggtcaactgggatacttcgatgacgagacggtggtgaatcatcagcgtttgctggattacattgagcagcataaactcttggtgcggtaagctttgattaactaacttttgacaagaagtttattcactttaactggttccaaaaacgatgcactcaatgtgcagattccacaacctggtgagccggaccatcagcgaagtgcaactggtgcagctgggcggatgtggagccactctgtgcatcattgtctcctacatgctcttctttgtgggcgacacaatctcgctggtctactacttggtgttctttggagtggtctgcgtgcagctctttcccagctgctattttgccagcgaagtagccgaggagttggaacggctgccatatgcgatcttctccagcagatggtacgatcaatcgcgggatcatcgattcgatttgctcatctttacacaattaacactgggaaaccgggggtggatcatcaaggcaggaggtcttatcgagctgaatttgaatgcctttttcgccaccctgaagatggcctattccctttttgcagttgtggtgcgggcaaagggtatatagagagtctgtttaattaaatggatttcacgacccggcaagcgtattgttattgattctggcccccctgaaattggccaaaagtggggcaatcaacgcgggaaaatgaaatttcattaattggccccgtcgcgatacgcaaataaacagtttgccacacggaaattctgatttttccaacgaacaacaatggcacattaaagttaaataaattgtttacgtatacacaatttcaattctgatttctgtttgtatattttgttgctgtaatctttgtataaatctcaatagaatcagtctggtttgtcttgctgtaattaaaataaaaaatggtacgccaatcaatgaatagtaaaaaagatgtgcatgtaagttgtattttttcatagtctgcaaattgcccttgaaattgttttattatcattttgaattcacagcctttcggttgggtaaatggcaaatatctcccatttggtttgtcgtatcgtatatatattttttttctgtttattaacttttgacgagagacccagaatttttcatttagggccattttggggcacccacaagtgggtacgtgatgcaaacacattttcggttgctttgcctttttttatccgatgaatttaatcaaacttgaaagcctcggcgaatcgatgttcaatttttaagcacccggagctcacacgtacaatatatgactgatttttaattaaaactcttaccaagcgggaataattgaattctgaaatgtttccactgcattaagtttcgctgtttcttgatggcaaattattgggcatactctagaactcatcgcgaatgggtttgaaaaatactcaaactaaaccttaaaatttcttaaagtatatataataataagtacaactttaataatatatcttaaattctttacgatttatatgttttatacgtgatctgttaaatttgcagacgcaatttctttggtcaatacgcaatggaaagttttgtatcgtacttg

SEQ ID NO: 10304 - DNA, 1155 bp, DROSOPHILA
atggtcattatcgacagtcttagtttttatcgtccattctggatctgcatgcgattgctggtaccgactttcttcaaggattcctcacgtcctgtccagctgtacgtggtgttgctgcacatcctggtcaccttgtggtttccactgcatctgctgctgcatcttctgctacttccatctaccgctgagttctttaagaacctgaccatgtctctgacttgtgtggcctgcagtctgaagcatgtggcccacttgtatcacttgccgcagattgtggaaatcgaatcactgatcgagcaattagacacatttattgccagcgaacaggagcatcgttactatcgggatcacgtacattgccatgctaggcgctttacaagatgtctctatattagctttggcatgatctatgcgcttttcctgttcggcgtcttcgttcaggttattagcggaaattgggaacttctctatccagcctatttcccattcgacttggagagcaatcgctttctcggcgcagtagccttgggctatcaggtattcagcatgttagttgaaggcttccaggggctgggcaacgatacctataccccactgaccctatgccttctggccggacatgtccatttgtggtccatacgaatgggtcaactgggatacttcgatgacgagacggtggtgaatcatcagcgtttgctggattacattgagcagcataaactcttggtgcgattccacaacctggtgagccggaccatcagcgaagtgcaactggtgcagctgggcggatgtggagccactctgtgcatcattgtctcctacatgctcttctttgtgggcgacacaatctcgctggtctactacttggtgttctttggagtggtctgcgtgcagctctttcccagctgctattttgccagcgaagtagccgaggagttggaacggctgccatatgcgatcttctccagcagatggtacgatcaatcgcgggatcatcgattcgatttgctcatctttacacaattaacactgggaaaccgggggtggatcatcaaggcaggaggtcttatcgagctgaatttgaatgcctttttcgccaccctgaagatggcctattccctttttgcagttgtggtgcgggcaaagggtatatag

SEQ ID NO: 10305 - protein, 384 aa, DROSOPHILA
MVIIDSLSFYRPFWICMRLLVPTFFKDSSRPVQLYVVLLHILVTLWFPLHLLLHLLLLPSTAEFFKNLTMSLTCVACSLKHVAHLYHLPQIVEIESLIEQLDTFIASEQEHRYYRDHVHCHARRFTRCLYISFGMIYALFLFGVFVQVISGNWELLYPAYFPFDLESNRFLGAVALGYQVFSMLVEGFQGLGNDTYTPLTLCLLAGHVHLWSIRMGQLGYFDDETVVNHQRLLDYIEQHKLLVRFHNLVSRTISEVQLVQLGGCGATLCIIVSYMLFFVGDTISLVYYLVFFGVVCVQLFPSCYFASEVAEELERLPYAIFSSRWYDQSRDHRFDLLIFTQLTLGNRGWIIKAGGLIELNLNAFFATLKMAYSLFAVVVRAKGI

SEQ ID NO: 10306 - DNA, 4905 bp, DROSOPHILA
ttagccaaattcggtgatgtgggtctccgtttgctgcgggtcagctttgtgggagaactgggctacgagcttcatgtgcccaagaaggattgtgctgccgtctatcggagtctgatgaaagcgggagctggagaggatttgcgcaatgctggctaccgttccctttactccctcagcagcgaaaaaggctatcatctatggagcttcgatctgcgaccggatgacacgcccctggaagctggcttgggattcacatgtcgcaaaacgggtgcagattaccgtggcaaggcggccatcgaaaatcagcgagctgagggcctaaagaagcgactggtctacttgacgctccgggatcaggtgcccatctggggtttggagggagtctaccgaaatggcgagcccgtgggcatacttagacgagctgaatatgcctatacccttggaaagtccctcggtcagacatacgtgtcccgaccagatggcaagatcatcgatgctgattacattcggaacggggagtacgaggtggacatcttgggcaagaaataccgcgccgactgtcacttgcgcagcccattcgatcctaccggccaacgggttctcggtaactatgcatccgagtccaagtccaataaataaagattagtctcttccacttccaagaactcgtttacccggcatagggaatttctctcaacctttctctttctggcagggcacgacggtattgttgaagtgcctgccttaacatacatgtagggtcataaattactttccccatgaatatgaaaaggttcgaagaaaggtcacggtgtaggcagacaggcagtctgcgaagtggtcacccgaaatggttgcggttacggctcaattaatttctgtgtccaactattatgacatcattctcggtttccgcgaaggatatgcctttccagacgtaattctagagcacttggacacctcggccagacagagggtcgccactcaagtggatttctttgcttaaatgaaatttcatataattgtgatattgatgcaatactttcagcttataataaactaggttcttcaggcctcgatggttacggtggaggccgtattggagggactatcgaagtggccagctaccacctcctccagcgataaatcgaacttgaagatgggacggagatcgttgttgagtcggcagacgactccggcggaggcgatgttccagttccagcagatcatggcgcagttcagtgcctccaaatcgcccttcatcgagacaatattctatatatggggatgcaaacattattatcaatcagattgtgtgcttttagcggcccacttaccatagccactgtatagtcaatggagttgatctcctcgcccttgataaccaccaactgggtctcgccattctggttgttcaggaagcgcaccaccttctccttgagatactcagccgatgcatagtccagcttttgcttcacatccaccacgctaacttcgtgaccattgatctggtagatgatatatgatttgttagtgtaaattgcatctagataagataggataagctcaccttctccagtttgatgtctacatgtggacgtgcactgctatatagaatgtataccatgttggcaccgatgccacacagtattccgtactccagactccagaacatgcaggtgagtacagtgaccacaaagggaaacagatccttctctggaaagttaagacagagcgttagtagtaatacctacaaaactttatcagcataaactcactcttagatttccacatgtccttaatcttgtgcagctccactagcgatatcatcgccgctataataattgcagccagcgtgcatttgggtataaagtagaaagtttgggtaaggaatgccagtgccatgagcaccagggcaccggtgacagctccacccagtggtgtcttcaccccactggcattattcacagccgtgcgggtaaaggatcccgttacgggcatggagagcacaaagctgcccatgatgttgcacattcccagtgccaccatctcctgcgatgcgtctacaatttttcccttagctgaaaatttagaattccttagtataaatggctttagaactaattcaaattatacttacaaaatgccttcgatatggctactatttccaggatcgaaatcaaggggatggaacccaaggatgcgccgacagtgctgatcatctcgccaaaggaaacgtactctccatctacggtggtgctaaagggcggcagccggaagggcggtactccggccgtaatgtttccagtgacacggaagggttgattcccatctcgactgaggatgtaggccaaaaaggtgccaaagatcacagccagggcgttgcgggagagaccaaggtacttccagaatatacgattgccccatttgatgtctttaacacgctgaaagtatattacatttgtaaattagtgaataatatatataatatataatgcaaccatcaagttaacttaagttaataaagcaactaattctgaagagccaaatttatgctgtatcttaaggtttttaacccgaaatcaaaatcaagcggctgcaagaattttgttgattggcttaaattgatattgaaatttaataaaatttcgtttttattttcttctcaccgtcatgagcaacaggaacaccagagatgagacacccagcagggcatcccagagcctaattgacgtcaagtgggtgaagaaattcttccaggcgggcagtaaatcattcgaaggacctattttcaatgcatttcaatgtttcaggtagtttgaaatttctagaaaataaaaaaataatttcgcaactcactggtcagacccacgatgttgttgatctgggcactgccaattgtggtggccgccgccatggtgaagccagtgattacgggaatcgaaatgaacctgaccagtacacccatgttgagcaatccaagtagaagtacaatgcaaccagctaggaaacacaccagaaccgcataatccggactgatagtggcatactggttgaccattagagccatgatggcggttgtggctagtggatgttgtgaaattagcactgatagcagaaatttaccccacatctgaactcaccaattgtgacatctttgcaggaaccaaacacgatgtatgtgaagcaacccatgaaggcggagtataaaccatactgcggctccaagccggccaccactccataggcaatcgcctggggaatagtcgttaatcccaccgtgaatcccgcaataaagtcctgcatgatgtactccaatcggtaacgaggtagccacttcaggatcgggaacttgttggtcacggtggacggacggcacagcttacgaccgccatccctaataagcgtgctcacattgggcagttgctcccggtacagattatctgcgaattcaaaacaagccttggataaggagtatttaagtgtgccaagataacccctccccgtgcggggctaatcttgcctggcagcaacttgttcgcacatctgtcgatcagtgttttatattgactttgggctggtcatcttatcgccagacaacctgggctaccccacgcagataaggtgcattcagatactcttttatgaattggcacgtattttatacgattacagcccccacaatcgctggaaacgcatcaaatcaattgaccctgatcgccgcgatcgctgcttccggaaaaacccctggagcagttactcaccctcatcggctctcatcgcgggtggctctccagctttaaaccgggctgtagttccgagaacgatagggaaaccggctgcgatgcaaaggcaatggctgtaatcaaaaccggggagctaacgcgtccgctcagtgtgctgctccaaacgcgactgccgctccgatcgccgtcgtccaacggctttagagaccgaaagcaatcgcgttcgcacattctggccatataagatttacaagcgcaggtaccggtgccgccatatcatgttcgctctgttagtccgttgataaacaattacaaagacaaccttaatatttggctaatgacatggccggcttatttatataaagaaaataattacaagctaatgagtggaggaattttgttgattgttggaactacttctcgctgctcttccagattttaatggcatatgaattttgtagggcgccgctagcaatcacatttgccgtgggatggcaatgtgtgctcaaaatctggtcgccctccgtgcttatcttttgcaccagctccctcgtctgcagattccagatgcaaagcgtattatcctcgctgccggagacaatccaaatgccgccggtggtggaaaaattggagttggagcaatagaactcattcaaatgcccgcgataggtcctcatgcacttgggcttcttgtagttccatagcctaagggtgttgttcaatgtggacgacaggatgtagcgtccgttcggtgagaacttcacatatccgaccgggatgttgtcaacgtcaacgagagtcttcagcacatgcccggtgctagagtcccacaagcggaccagcccatcatagctgctggtgacaaaaatattgccatcgcggtggaagtccaccgatgttatgggatcctggtgggcgtggacgattttgagcgttttgccagtgcggacatcccaaaggcgcactgtttcgtcaaagctagtggaggccagcagattggcctgcggattaaagcagcaggagaaactgtacctggaatgcccctccaaaactttgacgcagagcttgctgcgggcatcccagagacgcacggtcatgtcatcgctacaactggcaattaatccagccgccgaccaggcgacatcgttgactccgtctc

SEQ ID NO: 10307 - DNA, 1981 bp, DROSOPHILA
agcagcacactgagcggacgcgttagctccccggttttgattacagccattgcctttgcatcgcagccggtttccctatcgttctcggaactacagcccggtttaaagctggagagccacccgcgatgagagccgatgaggataatctgtaccgggagcaactgcccaatgtgagcacgcttattagggatggcggtcgtaagctgtgccgtccgtccaccgtgaccaacaagttcccgatcctgaagtggctacctcgttaccgattggagtacatcatgcaggactttattgcgggattcacggtgggattaacgactattccccaggcgattgcctatggagtggtggccggcttggagccgcagtatggtttatactccgccttcatgggttgcttcacatacatcgtgtttggttcctgcaaagatgtcacaattgccacaaccgccatcatggctctaatggtcaaccagtatgccactatcagtccggattatgcggttctggtgtgtttcctagctggttgcattgtacttctacttggattgctcaacatgggtgtactggtcaggttcatttcgattcccgtaatcactggcttcaccatggcggcggccaccacaattggcagtgcccagatcaacaacatcgtgggtctgaccagtccttcgaatgatttactgcccgcctggaagaatttcttcacccacttgacgtcaattaggctctgggatgccctgctgggtgtctcatctctggtgttcctgttgctcatgacgcgtgttaaagacatcaaatggggcaatcgtatattctggaagtaccttggtctctcccgcaacgccctggctgtgatctttggcacctttttggcctacatcctcagtcgagatgggaatcaacccttccgtgtcactggaaacattacggccggagtaccgcccttccggctgccgccctttagcaccaccgtagatggagagtacgtttcctttggcgagatgatcagcactgtcggcgcatccttgggttccatccccttgatttcgatcctggaaatagtagccatatcgaaggcattttctaagggaaaaattgtagacgcatcgcaggagatggtggcactgggaatgtgcaacatcatgggcagctttgtgctctccatgcccgtaacgggatcctttacccgcacggctgtgaataatgccagtggggtgaagacaccactgggtggagctgtcaccggtgccctggtgctcatggcactggcattccttacccaaactttctactttatacccaaatgcacgctggctgcaattattatagcggcgatgatatcgctagtggagctgcacaagattaaggacatgtggaaatctaagaagaaggatctgtttccctttgtggtcactgtactcacctgcatgttctggagtctggagtacggaatactgtgtggcatcggtgccaacatggtatacattctatatagcagtgcacgtccacatgtagacatcaaactggagaagatcaatggtcacgaagttagcgtggtggatgtgaagcaaaagctggactatgcatcggctgagtatctcaaggagaaggtggtgcgcttcctgaacaaccagaatggcgagacccagttggtggttatcaagggcgaggagatcaactccattgactatacagtggctatgaatattgtctcgatgaagggcgatttggaggcactgaactgcgccatgatctgctggaactggaacatcgcctccgccggagtcgtctgccgactcaacaacgatctccgtcccatcttcaagttcgatttatcgctggaggaggtggtagctggccacttcgatagtccctccaatacggcctccaccgtaaccatcgaggcctgaagaacctagtttattataagctgaaagtattgcatcaatatcacaattatatgaaatttcatttaagc

SEQ ID NO: 10308 - protein, 595 aa, DROSOPHILA
MRADEDNLYREQLPNVSTLIRDGGRKLCRPSTVTNKFPILKWLPRYRLEYIMQDFIAGFTVGLTTIPQAIAYGVVAGLEPQYGLYSAFMGCFTYIVFGSCKDVTIATTAIMALMVNQYATISPDYAVLVCFLAGCIVLLLGLLNMGVLVRFISIPVITGFTMAAATTIGSAQINNIVGLTSPSNDLLPAWKNFFTHLTSIRLWDALLGVSSLVFLLLMTRVKDIKWGNRIFWKYLGLSRNALAVIFGTFLAYILSRDGNQPFRVTGNITAGVPPFRLPPFSTTVDGEYVSFGEMISTVGASLGSIPLISILEIVAISKAFSKGKIVDASQEMVALGMCNIMGSFVLSMPVTGSFTRTAVNNASGVKTPLGGAVTGALVLMALAFLTQTFYFIPKCTLAAIIIAAMISLVELHKIKDMWKSKKKDLFPFVVTVLTCMFWSLEYGILCGIGANMVYILYSSARPHVDIKLEKINGHEVSVVDVKQKLDYASAEYLKEKVVRFLNNQNGETQLVVIKGEEINSIDYTVAMNIVSMKGDLEALNCAMICWNWNIASAGVVCRLNNDLRPIFKFDLSLEEVVAGHFDSPSNTASTVTIEA

SEQ ID NO: 10309 - DNA, 26960 bp, DROSOPHILA
cgactgcgacgctatgtaggcgttggtaaaccgttgctgccatttcccgtgtaggcgtggcgacacttccacacacttgcacacacacacgcacgcgctaaactatcacaccgataaggaaacggagtgaagtgccgaaagaaaccgaaactggaaactaaatttgctctattgaaacgcacgcatctcgattatttttcatttagtgtacgtcttcttggctcattgataagatttctcggaattggattttccttttgcggcttccttcttgcttcctcttctttgcctcctcgcacacacgcgcactcacacacgcacaagctcacgcagcagacgagcgacagtgcacaacgaaaatcgaaaaacaactgaatcggtttatgggatgctacttgggcagcgctggaaacgttgctgttagtttaaaatcggcgtgcctttgagtactatcgataaaataccacagtgcgccgatgatacactggctccatttttatcgcaattcgaaatgtcaacaatcttacattttataatgtaatgtaatgtttgtttattcagaatgatctaccgtttagcatttgccccttcaaatttagggcattattagattactgagtcgttattacaccgaaacatttcatataactacttaaagaaaaaatgaacaaatgaccaggtaacctggtattggaacccggcaataaactggttgaatattaaaaaaccatgttagactaaattataaattcgttaatttgtcagttgtgtgggctcagatcacaaatctgaataagctcagcgacgcttccattattggtgacataatttcatattttacatatttatattcacgaataaatattcgccaatttcctacagggtgtttttgtatgaccgcattactctaaaaatacctcgggaaaatatagccgcaactatcgattggcgcgctgcactggagctgtgctaccatcgctaactcagtgcaacaacaaaattccaacgcaacgccaactaagtgcaaaaaaaatctaaaatttgtgtaaaattgtaaaatcccaatcgcgtatatttctaaatcgtattcgcacagcacagtatgtaaagcactccagtttatttaagtactgtgtgtgtgtgcggtaaacacacaccaataagagtgcgttttcgcgtcccttttcccaccctcttctaatggttccctcttctataactgtgtcaaatcagcagcaacaataaaatatagaacagagctacagcgtgcgtgtgtgtgtgtgtgaaatgcacaaattgataagcaatttgattcaatttaatcttgtttaagtctgatgaatatcagcgcaagcagcccaacacaaaattataaataaaaagttacgaatttatataaatagaatacccttgagtgattttgttagtcgcataaaattaattcaatacatatttgtgttccgcattttttgaaaatataacgaagttctggccaacgagagcaacaacaaaaagcggtcttgtttgtttttcaagctcaacgaaaaaaagaagaaaagaaatctgctctcagtcagctgttttaaagcagccgcctaagtgcgagtgagatagctgcctgcgcgccaaaataaagcaacaacaaaagtggaacagtggttcaaaacctagctaaaaataaaaaaaatccatttatttttgtagcaaaaatataaaataaaagcaaattaagcgaattatacatatatttgttaaggtaagtgatcagcattccatttattttaccaaaaattattcttttgcacttgtttttcccccaagttttttaaatcgtttacttttaatacgcgtgtgtcctaataagtgaagattattaagaataaagtaaaaaatgagtgatgatacgagcgcttcgggcgggacaagtgccccttttccatcgccagttactgcggacccggaaccaggagccactgcctccaaattaccgggtcccatcagatccaatattcccacgcccgctacttctggtaccggaatcccgcagcccagcaaaatgaaggcaccatctagttttggatcgacgggttctgtttccaaaatcggaagaccgtgctgcaatcacacaactcccaaatccggtccaccaccaagaggtaagtctaatcgcattgtgcaacaacgcaaaccagttagtattattgctcaaagcaaatatgttactaagagcagtatttttgaaagtagttaaaggtcttaattatcccctgggtttaattatcatccattttacaagctagaatttaaagcaagatgaaattaaaacacatctgaacaccaatgggaattcaaccagagcccctttgaaaatcttgtcagtgcattgtcacatacatattaacatcttaacaaagaacattaatttcacaattcaagaaaaggggtttttaccgatttccacttttatacgcgagttcttcacttataaaacagttggaagaagtctgataattgaattgctctccggaaaatatcgcagtaaaatatgtttcaatagtatagcccaccactatactatcaccaagtactcatgaaggttaatattaaaaaatgtacccacattcaaatgggaaaacagaaacccaaaaagaatggtgagtttaaataatgcacttttaagtttgacattgtaaaggggtcatttcatcaagtttacttactctctaccctcaatacccgagatttgactacttttgtgtttgcatctttggctcaagcaagtcaagcatccgcctacatatatatatgtgcacccacaagatgtagattgctgtatactataagcgaatgcaatgatctaatggaaacgatgacagacccactcacttgctaaatatatacatacatatacgctgaccccaccccatttgagtgcactttttgcactacattgaacttgcaattatttcggcgagaactcgcgtagttagtgtaaattcttctctaaagagaaaccattaataattcccagcgtcaactgtttcgtttggtaaacaaatgcttcacttctttcaattatttaatcgttttgaaacaccaacgcacaattcaaaaataaacaaaacaaattgccgcccactcttaactctcgatcataattatagagctgccccgaaaagtgtttttggtaaggagaattatggccaattaggcaagtgctgctaccatttaattgatccgcccaatgtggctcatttcaggcacgtaaccgcaccgcagtcgtcaacatacgacgacccactggcccatatagcaaacgatctgccaaacgatccatggatcgattgacgggttttctatttcgccggcacacacgttccatatccgattgacagtcgcaatgcaaccgcaaaatcgtagaaatttattccctgtaaatttacccaaaaacacaaaaatttgtaatgtttagggttacagaaaaaactgagtcacgaggtgtatttaatttgcatccatagaaatagtttacacggcgctatgtgcactgtgatcatttagattatcactttgtattagattggttttgtaactagtttgtttgcccatttatacattatttttaaaatcgtttattggtcgtttattgcacataattattaaacctatttcagaaattaagctgtttgcttggctcaatgaaagtccagtttgttttgatagctccgaattttttgctttagtacatttaaatttctacgctgatttgtttcaaatacgccagtgttgatcgccatatcaaagagattattccgcattttgccaattattaacgaaaacgaagtgatataccgcatgtcccaaatagttgaactactttagtcaattagtagtttatgcgacgcgctgcttaaaaccaaatccgttccaagcgcctgagcgccttgatccgctgcccagatcagctttctaaaatctctcctagcattctggaacggactgtttgactatctgccaagagacccgtcatttggcccgccatactcaatgccaaaagtctgcgaaaatctactcagctcaaatgcgaccgagaaaacctggcgaccggccggcaatctatctctacgtcgtcgttccctaattgaatttgttctggcgatgacacagaaaacgtactcaaaacgtatcttctagcttgttcgtgagctcagatcttttgaggtgtttttgcgctgcgcatttgatgccgggttccgttctcagtcgatctgatatgaaaattgcggtcgtggtgctcgtggatgagcttatgtcacttttattggtttcgatcggaaacaaaagtgaagtgagcctctctcccacccataaaaacggaaagctcatttgtcttcgcattaagattgaatcgaaaacgcgttcgggattgacgtccaatggatgagcatcgtctggcgggggattactccattcgattctagattgagcccagttctgtttacatcaccgactccgtgggagagtcaatattgatgttatgattaaccactttttgtctcacttatttgacttcacatcattaagtcgttgaaatctttataattgaagacacgtgttgcatatttaagctgaaaacgtctcgggtttcagccaacagaaaacagtatcttctcttaaaaggaatatatatacatattcgatttgataagttatgtatttgttatagtttagaaaattttattaaatacgtgtttcaatatttcaatgcgcttttttgtgcattgtcttaaaagctgattcatagatgaatctaaagataattgattctgattaactggcatttagtctctggaattcattgttacaatctcgtcaagcaattcttaaattgttttcctacgtgtaaactttatatataattagacacaacccggcgtttaaaaactttatcgaatctttcaatagccacttcaaacatctttaaagaaaaaataataattttccaaaacttacatacttttttataataaatttcactgcttataaatatttatattttatgaaatatataaggtcacataagatttcttccaagtcgaaatccaaaacatatttgcctattaattattgaatacaacaagaacatattttttagagttttcaaagccaatatggattgttaaaaaaacccaaaaagtgaaattccattttttcgaactcttgcttagttattttcatgcatttactgcacttgtgattagagtgctaaaaaccattgagcgatcgatccatatggtatcgaagaaagggaaaataaaattgcagccatgtggcaattctttgtttgccggattaactcactttgcgtgtccgtgcaaaagtcgaaaataaaaacatttttttacggctcttatttttacgcgacgtttattcaataaaaacaccgagagtgcggagctattgccacagtgtctgctattaaactctggccaacaaagcttcggcaccggattggcaatcggcttcgccgctctctcgctgcgaaaaaaaagtatctcaaagtttgcgctgacttcgcttcgcgattggctctcgacgttcagttacttgaacgacttttcgcgaggcggacgtgtttcagacgcggaattgcaactcagatggcaaccaattgaacttgatcggctctatactatagcttatatagtgaacacgcaaacgaaattgaaaatccaaaatagaagccaactttaacagagagacttacttattgttatacaactcacaaaaggtgatttggtgtgccagcaaattacgaatgtcgttatttaaattggaaatttccaattaaaatataaggcttttaaaaaagaactgtaaaggcataagttatgtgaacctttttctacgtccttgtcgatgccctaaaaggattcgagtttactgcagtgcaagatatttttggaaacttttcgtttttcatatttctggcgacagcctttgaccttggcttggtctggttgataaccaattgttaatcaaatttattcttttgttcctatgtgaaactttgctttggttgtggcctcataaatatttatttaatttcgtgtcttagacaaacctagaaattttccaatttttttgtttaatgtggttttattgagtttaaagataagatacagcgttaattgatatctctgttctaaattataacatgcttagatccttatcatttaaccgattttgttgggcttggcccatttatgactgcacaatttaatgacagcgatatttcggtcaatgaatagttttattcctgttttggactagattttatcagaaagccttggttttttaaatataataggtgtatttaaagcgcataaaaataaaacttgataattatcagaagaaacgacttcaaaggctgggtgtgggccttggcatttgtacttttgggcctttccattagccattgccggtgtactgagatcgtagctaattacggattttccgctggcatccgcattttcctgtttgcaagtacttacataagtaaattgacgcacaaaaacttgtaaatgggctgtgagcacgtgtccccaacctctctctcattgaaatgtcggctaaatcgccgagataaccttaaggcattctatatctccgatatctacgataaactctaagcgacaacaaaagtttatttgccgaaacggcaataacaaagttcggttgcggattgtattgaaaagttgcggttaaccgctaattagatatacaaatttgctattgctgattcgtattttgactgaaagagacacaaacgttgatcggtctaaaaatacgtacatatatatgcgaaatggaatgactttcacagcggcaatatttgcatattgcctaagactttgatttttagtgcaatttgctttttttttctgtgtttgtttgtggtttttggggctcggcgttgacgtcttattgccaaatctactgggcttccactggcggccaacaccatatgcaaatttcaatttttttatttagttgtctgcagctaactttctttccgttttgtggctttcttttcactgccacgttccgttcgtataacgcacattttgtcgctcaattgtttgagtcattttggaccaggccaagttgcttgctgtcatttgccttggcattgttattgctaactggtattttatcagctgttattattattttggttctgttgttgataaggagaacacatttttattttggattccattcacacttccactgactgcgacattgccagcccaaaactcttcaacttttgctgttgccacgctatctttgaattagaactgaccggtgagattctcacattatttcgctaggtagtgaaattgttactcatttaagatgttgatttttcccgaaataagagagaatcaagatgccagttatcttgctggaatgtgtacttgaaaatggaggaatttgagctaaaatctgattaccatatctgttaaagatatttttttagaatgattagggcttgaaaaaatatgaatacgtttacccatatattttttatattcaatatttctttttcatattcatctgtaaaaatttgtatatagcttattatttgtaatactcagcatttgtaggtaaataaatatggatagtaaataaagcatcttatacagtttaaacgtaaaagctgattattagtaaattttaaaaaagtttcgcggctgctgctgcttacacaaatggaatgcaaatatggagactttgtatttagaaccagatattcacataaagattacacaatccacctgcaaaaacttgtgggcgtgtgggagcgatgtcataaagccttttgaaggcatcaccttgacagactgatcatcccatctgtcaaactgggatacatacccatatctttatatatttaacactaacttccgaacacattctatatacttttatatatttgctgtggatcccgccaccggcaataatgatctgtcgtcattcaactcaatttagtcggtttgtttacacaattttattgttgccgtttgttatatttgatttgatatttatatatatatatgcttttgaagctccccaatgagctcagcttggtatttgttctagaactattggcatagacagggcaacctttcgtgggtggtatatgtggcgtatgagtaatgcgcgatgctgtatgatcacgtatacgcacctttgcgcccagctaatttgcattgcactttgtatgacactcatttaggagcatttaattgcggtaaattttccccgcctaattgcgtttcacacgcctcgaaaatgatttttttttatttattgtttcgccggttttctttgcttttccgctggcggcaccttttatttttattttcactgacttcgccggcaattaaattaccgtttctttgactaaacacaaatcggtaatgaaaagagaaaaaattggaaaaggtgtaaccacctttggttaattaatttttatggtccgcacccggtttctttttttcgattatgaaatgatatttcattttgcacctgttttgcttgaaaatcttttcaaatgatttattgtcacaactgagtgaaccaaagtctttctgtggcttttcgtgtaaacaaacccattattgccttcatttctgtttcgctattttttttttttcgttagcttagttttggccagcatatttgtttgttttctttgttgagatacttttctgcgtctaatgaatttacggactacaatattttcgtaagcttaatggaagtgttcattaagaaatgtgaatggaccatagaacgtaatttgttttttttttctaaggaattacaattttaacaaactaaggaatacatcttttaacatttccttctttgatcatatattcctggtttgatcaaatagctgcccaaatgcttaacaaataaaaattaaacaacaattttaatcactttttcctcatttttgtggctattttttgtgttcaccatttttgcccattgttttgcttacacttcagtgcttttaattatttcgtttgcaataaaagaacagcaaaagcaaaagtcaaataaattaacacgtcacttacacaattctcggaccgaacacttaagtctcgcttggaatagcctcaagtgctaagttaaaatgttcaacagaaatgcgtactttaatatatttttttgtagtaaacaatttaatgatttttgctcaagggccttaaatgtataaatgaggtatagagaattaggagaaaacgttttcgtatcctgaaatcttaagatttgtgctcaaaatataaacaaatactaactaaagtaaaaaaaaaaatcaataccaactccacgatagccaaattgagttgatggatgatgggctctcctttaattatgacattaatgtccattttgaacttttaaatacagttatgaattgcgacacgcccacttgtttagttttgcgatcgagcgatccatcgatataaattccaatcggaattatgcgtgggttgcacaaccgcaatattttatggcaactgaccaaatacaaaccaaattactttcagcattcttcgcagtggctctttagccataagtttctgaagagtctcttttatatttttaaaaaagcaaacaaacaataattaagttgtttttgctgcttatctcaagatcgacaacacacgcgtccgttggaatattaattattcacaaataaaacataaaaactctcaagttgcttatttgcctaacttacctcgttaggtggttaattatgggtatgctaaataaatattaattgcaggtggaaaagtcaaatgtcatatcgagtttgaaattctgtcttttctttttttttttgtaggtcattaagtagtgtctagtttcgttctctcaaaggaacttgtttcttcttttagattttgcataatattgatggattgcttttggtaaaatgcaaatttatgttgctgaaacgtcttcaagttgtgttgccgagggaaattctataaaatcaattttatattcattgagtattgtggatcaggactgcgcgtctaacttgacgactttgatgacatatttatagcaaactctttatttatttagacgtttaaaaccaatttatttaaaaatcaaatttatgtttatacccgtataaacgaatttttaattcgtcagaaatgccacaaaagagtgaaaaatgttgtagataactgaagatatttgagtctgcggaaacggtttgcaaagctgcctataagttttattttttcgaagccattccgagaaaaccttcaccgaacactctcccagttatctaatctctttaaaatgaaataagactttgttcggggtggggaggttggtctgccagagcgacccatagctaattgccactttgcactttacattttcttttgccttttattttacacatattttgttggctaagctgagctttcttggcccgttaccatggcctgaattcgctcggcttagcccttagctgtaattataatttaattttaagttaatattttgtgtgctgtttaatttgtcatgctcactttgcgttccttgcgcttgtttttttctttttttatgtttttcattttatttttagaagccaccagcatgagtcgtgaaagcgatgacaatttaagttcgatcaattcggcttatacaggtaaatatgtttttacgtttcacttatattttttcttatgcattcatttgttattttaacttggctactgctcaatgcgtttcatttaatctcttcccatgacattattaatttacaattaatattcaattaattgcttgttgatgtgggggcgaaattaacacatctgtgcgaacacctttttgggcataacattaatcgtatcggaatttgatgaaaattgcttgcaagacttaacgacgtcataacaatatcgatgaattttatattttatataaactaaacaatttaaaacacattaacacgtgaaaaattcgaaacagtacagtattctgaagaaagtacctatgaacgagttatacttttaggctaaaacgaactgaatatattatattatatctataacctagttgaagcacactttataaatggaactgtatacctctagacataataataataatatatcttatcagacgtgtttatttatatcgacccagtaatcatttccttttaattgacatttcgaatacctcaatgtagtttgtgttaaccctgaaaaacacactgttccttcctcccatcacttttggttcagtgatctcccaacgaacaacaggcatttcattgccttatctacttgtgtatgcaacatcttccctcagatagtgaaaatgtcaagtcaagtctcacgatctctgacagctcacagatagtatctatttaccaatcaaagacatatcaaaccgtcaaccgtaatcagtcataattttaatcgtttcttaccttagccgtaggccaacttcattaggcttaagtcgtctttgtagttcctgtgctcattggaatgttcattcaactgtttgcccttctgccacatgtgtttttattgtttcgcattcgaaacacgttctaaacttaaacaaattttaattgtaatgcgaaatacgcgactcgaccagacgcccaaccggattttttttttttttgggtatttactatatagtatatggtatacatctataattaataatatatgggacacgcctttaagcgatcagctcgattagctcacgtaagcatcttcatctggaaaaccagttttctatttggtgaaattctagtttgtcgcacaaagattcctgttgaaaacatttagcatttaaagtaatgacaattaaatattcagatatatgcattgtcgatgcaattattgtgtgcccagaacaatgagcaaaaattaatttaattgagataaaaaatgttagagcaggcacagtagccacattttagcgcgaatgtataacaattggaatatgtgaatacactaatttaagatgccaggaagtacaaagatacaatcagtgcttttaagtaaattactttcagacacacccctgaataaatgttgtatttataaacgtgctatatttacccagattgcttcgctcactgtaagcttcactgtaaccactcgtgcagttcagtggaaatgttagttcagcccacagtgatcaggacttagagatcgccaatcagcagctaataatcggttttcgtcggcattttccacagagactcgcagatggatttgcatctaacatgccgaaaagtcatgtaagtcatgcgcagtccgagttgtggggttgtgaaaaactactcgacatgtgggtagccaaagctgcaggaaaactggcagaaattggttaaaaagcagtaaaatatatataaatatatatttagctaggaaataaactgaattcaaagaacattcaggcttaccttaaggaagctttaatagatagttttagttacaattttcagcgtgagtagcaaacttttattgccgtgcaaaaacccacattatagccacttacgaatcgctcagaactgcattgcaacctacacagggagctattatcgatgaggatggcggtgcacggagctgcacagtttagtttaattaaatgttgtttaatcatctcagaagataatgtgctattgacatgaccagcactgttggctctgttggctgatttatcgccggtcagcgcgcgatcgatccgccataaatggctggcgaaatatttgttttcgatttcaacgtatctccctggctgcttcattttggccagaatcgtgagcaaagtgggtcgcagccaggcccgggttgccttttggccaagtcaagtcaactattgacggcgccacactccacttggcgttggccgggtgagcggtgctctttgatgattcatctgtcagatacatgagttcattagcagcactgacactgaatgtcaactgcaaggaaattgtttgtcatctaggtgcgtgcgtatttttagaatgacgacttttcacagttaaatgttgcaaattaagtgcggcgggggaaaggtgtttcaattagcgaaggtaaagtcaagactgatttattgcctggcattggttgcttgtttttccagccattacataaaatacgaacacagaacatcaaagccagtgttaagtgaaagtttgcaaaataattgttaaaaacaaaaaagggaaccactcaccaaaatacacaacaacaaactgttacaacgcccaattgtgataattaaaaaaaaaaagttgttacgagcatgtaggatacggaaaatactaccgtcatgataatagcaaataataacaaattgtcttgcacgatcggcgaacggtagcgaatgccagcgtatatctgtcagatacaatatactcacaattgaaccttgaagccgtctggtctggccaactcatgtcatgtcacggctgggccaacgcaatcggttgattagccaaaagcagtggcccacgagatataaagccggtacgaagtcttcttcaacacactcgtactcaagcagagcatatctggcgtagattacaagtgaagaaaaattaaaaaaaaaaagaaaaggggaaaataaacgcaatttcaactggcaaaaacacaattaactacacgacgtagacacgctggggttttcatagcgcacaactgaagatgacgctagtgcacaggaaaaaaaaattggaattattaaagttgaaatatagtgaaataccttactacatagacataatataaaattaaactttcatgttattagtttgccaattgcttttttttctgtgcattaaaaagtaagcggaaaccgagttcgtgcaattgataaattgaaatcttttctcgatctccttccttttcggcagcatttcttttgtccgctgcaattgtgtttttaaatccgctgctgtctgtcattcaatggctttgaaaacgttaccaaactgtcgacaatttaattgatttatgctcttatagctctttctcgtgcagttttgccaaaagtatgaattgattttgaaagttgctgtgaaaagaggcacaataagttacacatcaatatcaataaagaattggacacagacaatttagggaaagaaagaaagggatttttaagagatttttacaatggtttatttattcctaaaatgaatttatggcacgtcatgttagcttttttctcgtaatttaaaataaaaaacgtaaattgaggtaactttttatttggagaaattttattaacgtgttttataaaaatcatatagcaagcacacgccaaactctttctctctactcaagccatacttatagatacatacatatatttcgagcttaataacatctcagattaccgttcgccttttttttgtgctggcatctaacctttaccacaactgcttgcggccaagatcttattaaagacaagaaaccttagcacacaagctgccaaaaaactttcacaacccaaaacagcaaattgggcttaacacaaatgcgctaatttttaaccaatatttatatatatctatatatatatacataatatacatatataacaaaaggggaaatgtcaggaaaaacttgctgcacagcttgctcagttaacacccacaaaacacagcgaaatgctaaacaattgcaatgcattttatggaaattcggggcgacttcgtgtaaagatgtatatgtatgtacatttttgtatatctacaaacccgtcctgtctatagatctctatcaagagactgtcaggcgctttacgcgatcttcgctctcacccacacccgactgggatcgcttttcgcccgctagacgctcgctaaaatcggaggctggaagtcgcgcatcttgtaagttattagcccgccatcgccattgtgccagtcgcatgtatctttaaatggtatttcgtatctgtatctgtatctgtatattttctgtttgtttgttttgctttcgttactgcttgttgttttccaacgccaagatgattattatctagaagccactgggcggcgtcgcagctcaggtaagcattcgctacgattgtgagtggacataaatgcaacgcacaggattttgtaacgggggaactttgtggcaaatcatgttttataactaatttattcttttttttttttttttgtttacgtgtactgcaaatatctttgctgtgtcttgtatctgcagagcgtgtctggttctagccatttgcgcaggtggctggcttttatgcatctaggccagttgctcgctccttaaatagtcattctgcagaaacgttaagagcgcaactttatggccaaactgtcgaaataattcccatgcagatggcatatatctcggcatcttcggtagctccaagtattgtcaaactaacaaggcctaatgagccactgcaaacgtgtttaagtttacctctcactgtgggcgtaattgcgcctctaatgagccattgctgtgacaatatttacactgaattaatgtatcaagtcaaggtctttatagggttaactatgcgcattttgtttaatggttgccaaattaaattggccaagtttgtagattaatgaatttggggcaaaatcgttacgcttttaatgctaatcaaattgatgaggaaacgtaatccgtgaaaaatatgaaaaattatttaagtaaatggggaacattttgaacaagatttgcttagcttattactttttgggcttatgttaattttagtgaagggatttgattggggaaaggtaaattaagataaaatattgtctattagttatatataaagtaaaaaatgaatagaatggcacgtgttttgtaacacccagttgttttgtttttctttttaaatgttaaacatgatatgcaattgacatttaaaataaaacaccaatttattttacatgaactgaagtgtaatgtcactgaaatgcagtttgagttcattttcagcaacggcaatgggaaaattatgagcaagttgccatatctaatagatgtgggtggatgcagtcaacagcaaaatgaaattaactgacacgacagccaaacttggcaaaatgttgttatgacttcactgagctgcatgcaagttttatttagctttttaatccgcttgtttcctgtaattttccacttaatggttttccctcagacacagtaaatataaatgggtaatttaaaagtgaaatcggagagaattcattgccacttatagcatagaagtggaatatcgaacagcttgcaaatgtcaagtttacaatgctaaaatccgtctaaataatttatattcattatgcgggggatcgttctcaatggttttccattgagcaggcgatatgcaaatatgccaaatgacatcatacccaagtggaacacagataaaaaatgaactgtattggagagataaatgaaaacgcagtctagccaattttaggattttttttttagacagtattttgattgatgacttaacagttgatactaatgggaccccccaacttgatattattgctttcccatcgaacagataacagcagcgccgtgctgacagcaaacacagagcagttcatcattggacagcgggtttggctgggtggcactcgtcccggacagattgccttcattggagacacacactttgctgctggcgaatgggcgggtgttgtccttgacgagcctaatggtaagaatggtccttactctctctcttaaaggccctattaaaagtctatgcttttgctaggtaaaaacgatggctgtgtgtcgggcaaaaggtacttccagtgcgagccgaaacgaggcattttctcacgcctcacacgtcttaccacatatcccttggccggagcccagactccgacctctccattggccaaaagctccccagacagatcgcgcacagtttctccaactgcgagtattcgcagctctatgcttcgcagtcccggcattggaggcagtaagttattggatctacgaaatggatgaagtgcacaatctctacaaaaacttgtctatttttagagaatggaatggctgtgggcgatcgtgtgattgtctcttctggatttggtagtcgtcctggtatcttacgctatttgggagagacacagtttgctcccggcaactggtgcggtgtggaattggatgagcctagcggcaaaaacgatggaactgtcgatgatatcaggtatacccatgaaaatttatgagatccaagtgcgctgatccatccccattgcagatactttgagtgcaagcccaagtacggggtgtttgtacctattgcgaaggtttcactgtcgccgtcgtccaagaaaacgcgtctttccaggaccggatcaagggagtcgctcacctcgattggcaccatgaacagcatcgccaccacggccacgtcgcgcatgcgcatgaatgctcaggtataagcggtgacctcgaaaggatcaccctcaccacccagttctcccacagaaagaacacccacagtaccttaaaaaaaaaaagcaaacacaaataccgtttaaagttctggttctgttctttgttaatttttatattttacccattaacctacctgttactttttatttgagcccttttactaacgcgttccacatctaatcgcaaatcccttccgttcctagcagcgcaagtcgagcacgcccgttaagccaattttagcgacgccgaaaagccaattttccatgcaggtatgctaactcatctacaagatccacaaataaattgtatggtattcgctgttggtttttccttttcgctcttaaaaactattcgtttgccgagctgtagtcgctgttagcaaacccaatccattaacgttaaaattttgcaaaatattgtacgcagaattaatggtttggctattaaattaggttaaacaaaaaatgtataaagattttgacgttaatggatctgtgccctcttctgtataattgtggtttaacccttagtttgtaagcatttaactaacataatacacactaacccacacaaaacacaacacaaaagacacaccccaaaaacaaaaaaaaactcccaccaaaacaaactatgtaaattaataataaatttatgcctattaagtctcaatgcattttattatgtcatgtgtttgagttggtttatatatatcacaatgtacaataaaaatatttaaatacttcctgcacgctttcgctgttcaagtgttgattgttcaatgtttttgttaaatttgcttctatttgcatgtgtgtgcgttcgctgtcgccggtagaaggtaaagcaacaataaattaatgagtgtttttgcaaccagccccgcaccctatacacctgtactacatacacccacactatatatgtatccgaatctgtatctatatcgtctcgtatctctctacttcttgtgtatcgttatttgtgtgcctaggcatttcataaaagcttgctttgtcctctctgtgctctgtttattttttggtcgatcgatcgacattgtaggatctgctgcgcgagaagcaacaacatgtggagaagctgatggtggagcgcgacctggaccgcgaggatgcccagaaccaggcgctgcagctgcagaagaacatcaacgaggtaattatcttcaccgacaccatgtacgcaccgctgccctatgcggacagatcgcgaccctatcgaccctccaagaagtcgagggttaaggttccacagcaacaacacatttgggtgcccaccaccctgagcagcagcattaccaccagtaccagtactagaccaaccatagcagcagcaacagcagcagcagcagcagcagcagcatgcaacagacagcccctgcagcagcagcaacagccgcatctgcatcagaagcagcagcaggccaagccaaagaaagtttggttttgcgataaaaagaaactctttccagttggctgacttcgcggctgattcgggcccagtttgcaatgtttgctcattcatttgtgcagtttcggtttcgattaattgtgttttgtttttgtttgattttatttttgcattgcacccgcgctctggctgtttacaaaacaaacacacacaaccattttctcgttttcacacagctgtttttttttatgattttacccatcattgtcttgtgtttatttgttgttgatttaactcaaactcatctaatttttggcacgttacgttttatgttttgttctttaaccacagtgaagacactcaactcattcccaattgccagtcattttcccaaattgattcatcaaattaacttgaaacgctgagaagagtacaaatttcataagtttaactaggcatgaaaggttttgggggttcaacagcatttaactcggtcaaaatttaaaataacaatgggttaaggttattgctgatatgtatacaaacgaaattgattttacatcaacttgtatacatacattttataataattattattctttttgcattttgtgctggcgcaaaattttttatttaccaataacttgcatctgcgaagattgaatatgcataagataacaaaataagttttcatgggttcatctcagttcagatacacagatttctacacttaaattatcatatacgcaatctcgaaattacagcaagaaaaacgcaaaaacaacctattgttaattatttgcattcttaattatatacgttagcacttttgcactgtttgcttatccgcacagtgcgtttggagaaaaaaagctagcgcacacaattataccctattattgtttcctaaatttgaagaagggactgtttacttttatgtgcttttcgcaaccgctttggggcttttctagaagacgactgtcttgtgggatgattgagttttgtgctttctgtttggttttgttttcaataaattgtttgtgtttatatttatatgcggatacgtgttagacttttctatttgtcgagcgcactttgagtttgagtgttaaattagcaacaaaattatcacctgaaattcccggtcccagccacaccaaatccatattttcctgcctttctcatccactgatcaagctatccatcctttttaacgcaaaaccaaaaagataatctgactaccaatttgaacaaaattaggctggtccttaagagttgaaattctgtttgcacaagactatttttgtatgattcttatagcaaatactgatcgaagcggatcgctggagacgcctgatagcgagacacagcataaaggtatccgatctgcgacgcgagttccgcggctggtccggaaaacacgagagtcactgcatcctgcacagtgtcctcacaccgctgcgcatcaagtagaaatccggatgagaggaatgggcgaccatagtgctcaaaactattcgattcgacgatttttgaattacatttctttgcaccgagaaaggaaccactgaagacaaagttgaagtctgcacagcgttttaagctgatacaaccaaataaagaattaaagatctttaaaataatgaaaaaaggaaaccataaaaaaaaacgaaagccaatcgaaaaaccaaaacgaataaagttaacttaaatggtttgattggcgtaaaaatatcaaaaacgaaattaaaaagataaaaaaaacggttaatggaaaagttgactgacaattttcgattcttttgacgaaagcgaatttttcttgctgttggtttagttattacgatatacacttaaatactatatatatgaagaaaaatacactaacaatatgcaaaacatttttacaatctcccaatgttgttttatttatggttttaacttgcgtgctaatttcctttcctatttctttgacccctcgatcctcagctaaaagcaagaatcgttgaattggagtcggcattggacaatgaacgaaagaaaactgaagaattgcagtgctccatagacgaagcccagttttgtggcgatgaattgaatgtaaggacaaacagaagtcgtgtctggaaatgtacattgttgggttaaaaagttgatgttcgatagaatttttagtttactatatttgctcttattaaagtttagcttgatatatttgttaatattgagaatcgttaaactgattgttaaattctgaaatcaacaaggaaaaatctcaaactaagcttatcgttcgttttaatgcgtttttcaagctattgcatttgctggatccaaaagtatgctatataaatattgacttttgtaagcgaaaaacaaactctaaaaattattgcatgcggctcagtattactgagtattaatacaatagaatatgacgaactagtcaataaaatatttaatattccaattaaaatataatatgttactgttattaaatggaaaacgcatatatcttccgggaaataaatgaatagagcaagtcaatgtacatttccatgcactgagaataaaactaggccccctatactaataatataattcctatataataggctcagtcacaggtttacaaggaaaaaatccatgatctggagtcaaaaatcacaaaactggtgtccggtaaggaataacaattaaaattccaagtgaaaatgcttaataccttgatgcatcctccttagccacgccaagcctacaaagtatactaccgcccgatctaccttcagacgatggtgctttgcaggaggaaatcgccaagctgcaggaaaagatgaccattcagcagaaggaggttgaatctcggattgcggaacagctggaggaggagcagcggttgagggaaaatgtaaagtaccttaatgagcaaatcgccactctacagtccgagttggtgtccaaagatgaggccctggagaaattctccctctcggaatgtggcatcgagaatctccgaagggaactcgaacttctcaaggaggagaacgaaaagcaagctcaggaggctcaggctgagttcacccgaaaactagccgaaaaatccgtagaggtgttaagattaagctctgaattgcaaaacttgaaggcaacatccgattccctggaaagcgaaagggttaacaaaaccgacgaatgtgaaattcttcaaaccgaagtacgaatgcgggatgagcaaatcagagagctaaaccaacaactcgatgaggttaccacacaactaaatgtacaaaaagcggatagttctgctctggatgatatgcttcgattgcaaaaggagggtactgaagaaaaatctactcttttagagaaaaccgaaaaggagctagttcaaagcaaagaacaagctgcgaaaactctaaatgataaggaacaacttgaaaaacagatatcagatttaaagcaattggcggaacaagaaaaactagtcagggaaatgactgaaaatgcaatcaatcaaatacaactagaaaaagaatccatagaacagcaattggctttaaaacaaaacgaacttgaggacttccaaaagaaacagtcagaatcggaagttcatcttcaggaaatcaaagctcagaacacgcagaaggattttgaattagttgaatctggtgagtcccttaaaaaactgcaacagcaattggagcagaaaactttgggtcatgaaaaactgcaagctgctttggaagaactaaagaaagaaaaggaaacgatcataaaggaaaaggagcaggagctccagcagctccaaagcaagtcagctgaatccgaaagtgctttaaaagtcgtacaagtacaactagagcaactccagcaacaggctgccgcatctggagaagagggatccaaaactgtggccaaattgcacgatgagattagtcagcttaagtcccaagctgaagaaactcagtccgagttaaaatccacccaatccaacttggaagccaaaagcaaacaattggaggcagcaaatggcagcctagaagaggaagccaagaagtcaggccatctgctggaacagattaccaaacttaaatctgaagtaggggagacgcaggcagctctcagttcatgtcatacggatgtggaatccaaaactaagcaacttgaagccgcaaatgcagctctggagaaggtcaacaaggtaagtctgtgaaataaacgacgatatagttattgtcattctttaattaaacaggaatacgcggaatcccgagcggaggcttctgatctgcaagataaggtgaaggagatcaccgatacgctacatgctgagcttcaagctgaacgatcgtcctccagtgctctccatactaagctgtccaagttctcggatgaaatagctaccggccacaaggaactgaccagcaaagccgatgcctggagccaggagatgctgcaaaaagagaaggaactacaggagctgcgacagcaacttcaagatagtcaagactctcaaacaaagctgaaagcagagggagagcggaaagaaaagtctttcgaggaatctataaagaatcttcaggaagaagtcactaaggccaagacggagaatctagagctaagcactggcacacagacgaccataaaggacctgcaggagcgactggaaatcaccaatgctgagctccagcacaaggaaaaaatggcaagcgaagatgcgcagaagattgccgaccttaagacccttgtggaagccatccaggtggctaatgccaatatatcagctacaaatgcggagctctccactgtattggaagttcttcaggcggagaagagtgaaacaaatcacatattcgagctctttgaaatggaagccgatatgaactcagagcggttgatcgaaaaagttactgggattaaggaggaactaaaggaaacccatctgcaactggatgagcgacagaaaaagttcgaggagttggaggagaaattgaagcaagctcagcaaagtgaacaaaagttgcaacaggagtctcagacttccaaggagaaacttacggaaatacaacaatccttgcaagaactccaagattctgtaaagcaaaaggaagaacttgtccagaacttggaagaaaaggttagggaaagcagttccatcatagaagcgcagaacacgaaactaaatgaaagcaatgttcagttggaaaacaaaacttcttgtttaaaggaaacccaagatcaattgctagagtcacagaagaaggagaaacaattgcaggaagaggctgccaaactttccggtgagctgcagcaagtgcaagaggccaatggagacataaaggattccctagtaaaagtagaggaactagtaaaggtgttggaggaaaaactccaagcagccacctcccagttggatgcccaacaagccacaaataaggaactccaggagttgctggttaaatctcaagaaaacgagggaaatctgcaaggagaatctttggcagtcactgagaaactacaacaactggagcaagcaaatggggagcttaaggaggctctgtgtcaaaaagagaatggccttaaagaacttcagggcaaacttgatgaaagtaatactgtattagaaagtcaaaagaagagccacaacgaaattcaggataagttagaacaggcccagcaaaaggagaggactcttcaagaggaaacatccaagttggcggagcaactgagccaattaaagcaggctaatgaagagctccagaaatcccttcagcaaaagcagttacttttggaaaagggtaatgaattcgacacccagctggcagaatatcagaaagtcattgatgagatggatgatgcggcttccgttaaatccgcgctgctggaacagctacaaaatagagttgcggaactggagaccgcactccgtcaagccaacgatgcccaaaagactgcttatctggagactaaggaactgaggcgccagctggaatcgctggaactggagaagtcgagggaggttctgagcctaaaggctcagatgaatggtgcgagcagtaggtccggaaagggtgatgaagtggaggtgggtttcttttttttaagctaatattttatatattttgcaaacaatgggccttgtcaatttccagtcactggacatcgaaaccagtcttgccaagattaacttcctgaactcaattattgctgacatgcagcagaagaatgatgcactcaaggcaaaggtgcagacccttgaaaccttgccaatggatttcaccaagtgagttaaattctttttcatctcggtcgaagcattttcgttcataaatgtatataatatatttaagacctcatgccttcgatgccctgacaaagcggaaaccggctcccagacttttctgcgacatctgcgatgagtttgatcagcacgatacggaggattgtccaatccagggaagcgaagatcaagactactccacaccgtcatccgagtccaacaacaacgagaaggagcggaagctgccggcacccaggaaatactgtgattcctgcgagggtgagtaaaataaaatatcaaattttactgacatttaacaatgtttttcccaattacagtttttggccacgatacgagcgaatgtgccgatgatgaaacctattagttagctctagttaaattctattatttccattttactttgttttagactctatagcataaccatattgcgagatctatcagatgagatacttttacctcagcagagcttcactcaatcacacaaagaaatttctctacttaaaattgtgatcttgcgttatgcacacatccatggatagtagtctattttaaattgtttttatttattgaatgcgattcgtggcaaacacacaatcggttgttttcgtaatttttgagtgtaaacatagtgtaaaaaataaaatcaagaacgtggaagaagaagcttttattgggttttcataagactaaggaattaattggtaattatatgattaatcgccgccctccttcttctccttgatggcgtcctgaaatcagagaaacatggatattaaagaaatgtttcgaggacgttttgtgcaggtaatactttgaaacgctcttcgaagagagataattctgctagaagatcggttatggcgttcatgaatgcttcctgcggagaataatcggccgtagtctggatgcggatgacgaacttgtgctccagaggatgcggaaccttgtagccggcaaacagaacattgggatccttcagcagttggctgcaggcaagaatgcaaatttaatgtgtaatcagacgggcttgttggccaacatacttgcggatcatgttgcccagcgtgtgatcctctttgtttatggtgaatatagccgcattggtcactttggtgtccagttccttgatgattctgcagccgcgccataacaaacataaaaacgggttaaaggtggtcattcggagtagtctgttttctttactcactttttctcgccttcatagagcagaaatgactcaaaggtaggtggtgcgttcattttgatgtcttacttttcgttagttactgcaaaacttataaattgtttattaaaatcagcagcacgctcagcaaaattctccggtacagtgttgactaacgcccaagtgcaacacaagctaaagtagctatatctagcaaaaagtagctagaacgcctagctaatttattttagtattttataaatcatttttaatgtgagcatctattaaataaaataaaacttgtactttgaatttgaaaataatttaatttgcttatgttttttggtcattaaataaatagcttaatcacttcttgcaaccaacactggcagccgatacctatcgcatagacaagctgttgtgggccatccctaggtttcggtggttgaattatttgcaaatttttatccaa

SEQ ID NO: 10310 - DNA, 5591 bp, DROSOPHILA
ttccaacgcaacgccaactaagtgcaaaaaaaatctaaaatttgtgtaaaattgtaaaatcccaatcgcgtatatttctaaatcgtattcgcacagcacagtcaaaaatataaaataaaagcaaattaagcgaattatacatatatttgttaagttttttaaatcgtttacttttaatacgcgtgtgtcctaataagtgaagattattaagaataaagtaaaaaatgagtgatgatacgagcgcttcgggcgggacaagtgccccttttccatcgccagttactgcggacccggaaccaggagccactgcctccaaattaccgggtcccatcagatccaatattcccacgcccgctacttctggtaccggaatcccgcagcccagcaaaatgaaggcaccatctagttttggatcgacgggttctgtttccaaaatcggaagaccgtgctgcaatcacacaactcccaaatccggtccaccaccaagagaagccaccagcatgagtcgtgaaagcgatgacaatttaagttcgatcaattcggcttatacagataacagcagcgccgtgctgacagcaaacacagagcagttcatcattggacagcgggtttggctgggtggcactcgtcccggacagattgccttcattggagacacacactttgctgctggcgaatgggcgggtgttgtccttgacgagcctaatggtaaaaacgatggctgtgtgtcgggcaaaaggtacttccagtgcgagccgaaacgaggcattttctcacgcctcacacgtcttaccacatatcccttggccggagcccagactccgacctctccattggccaaaagctccccagacagatcgcgcacagtttctccaactgcgagtattcgcagctctatgcttcgcagtcccggcattggaggcaagaatggaatggctgtgggcgatcgtgtgattgtctcttctggatttggtagtcgtcctggtatcttacgctatttgggagagacacagtttgctcccggcaactggtgcggtgtggaattggatgagcctagcggcaaaaacgatggaactgtcgatgatatcagatactttgagtgcaagcccaagtacggggtgtttgtacctattgcgaaggtttcactgtcgccgtcgtccaagaaaacgcgtctttccaggaccggatcaagggagtcgctcacctcgattggcaccatgaacagcatcgccaccacggccacgtcgcgcatgcgcatgaatgctcagcagcgcaagtcgagcacgcccgttaagccaattttagcgacgccgaaaagccaattttccatgcaggatctgctgcgcgagaagcaacaacatgtggagaagctgatggtggagcgcgacctggaccgcgaggatgcccagaaccaggcgctgcagctgcagaagaacatcaacgagctaaaagcaagaatcgttgaattggagtcggcattggacaatgaacgaaagaaaactgaagaattgcagtgctccatagacgaagcccagttttgtggcgatgaattgaatgctcagtcacaggtttacaaggaaaaaatccatgatctggagtcaaaaatcacaaaactggtgtccgccacgccaagcctacaaagtatactaccgcccgatctaccttcagacgatggtgctttgcaggaggaaatcgccaagctgcaggaaaagatgaccattcagcagaaggaggttgaatctcggattgcggaacagctggaggaggagcagcggttgagggaaaatgtaaagtaccttaatgagcaaatcgccactctacagtccgagttggtgtccaaagatgaggccctggagaaattctccctctcggaatgtggcatcgagaatctccgaagggaactcgaacttctcaaggaggagaacgaaaagcaagctcaggaggctcaggctgagttcacccgaaaactagccgaaaaatccgtagaggtgttaagattaagctctgaattgcaaaacttgaaggcaacatccgattccctggaaagcgaaagggttaacaaaaccgacgaatgtgaaattcttcaaaccgaagtacgaatgcgggatgagcaaatcagagagctaaaccaacaactcgatgaggttaccacacaactaaatgtacaaaaagcggatagttctgctctggatgatatgcttcgattgcaaaaggagggtactgaagaaaaatctactcttttagagaaaaccgaaaaggagctagttcaaagcaaagaacaagctgcgaaaactctaaatgataaggaacaacttgaaaaacagatatcagatttaaagcaattggcggaacaagaaaaactagtcagggaaatgactgaaaatgcaatcaatcaaatacaactagaaaaagaatccatagaacagcaattggctttaaaacaaaacgaacttgaggacttccaaaagaaacagtcagaatcggaagttcatcttcaggaaatcaaagctcagaacacgcagaaggattttgaattagttgaatctggtgagtcccttaaaaaactgcaacagcaattggagcagaaaactttgggtcatgaaaaactgcaagctgctttggaagaactaaagaaagaaaaggaaacgatcataaaggaaaaggagcaggagctccagcagctccaaagcaagtcagctgaatccgaaagtgctttaaaagtcgtacaagtacaactagagcaactccagcaacaggctgccgcatctggagaagagggatccaaaactgtggccaaattgcacgatgagattagtcagcttaagtcccaagctgaagaaactcagtccgagttaaaatccacccaatccaacttggaagccaaaagcaaacaattggaggcagcaaatggcagcctagaagaggaagccaagaagtcaggccatctgctggaacagattaccaaacttaaatctgaagtaggggagacgcaggcagctctcagttcatgtcatacggatgtggaatccaaaactaagcaacttgaagccgcaaatgcagctctggagaaggtcaacaaggaatacgcggaatcccgagcggaggcttctgatctgcaagataaggtgaaggagatcaccgatacgctacatgctgagcttcaagctgaacgatcgtcctccagtgctctccatactaagctgtccaagttctcggatgaaatagctaccggccacaaggaactgaccagcaaagccgatgcctggagccaggagatgctgcaaaaagagaaggaactacaggagctgcgacagcaacttcaagatagtcaagactctcaaacaaagctgaaagcagagggagagcggaaagaaaagtctttcgaggaatctataaagaatcttcaggaagaagtcactaaggccaagacggagaatctagagctaagcactggcacacagacgaccataaaggacctgcaggagcgactggaaatcaccaatgctgagctccagcacaaggaaaaaatggcaagcgaagatgcgcagaagattgccgaccttaagacccttgtggaagccatccaggtggctaatgccaatatatcagctacaaatgcggagctctccactgtattggaagttcttcaggcggagaagagtgaaacaaatcacatattcgagctctttgaaatggaagccgatatgaactcagagcggttgatcgaaaaagttactgggattaaggaggaactaaaggaaacccatctgcaactggatgagcgacagaaaaagttcgaggagttggaggagaaattgaagcaagctcagcaaagtgaacaaaagttgcaacaggagtctcagacttccaaggagaaacttacggaaatacaacaatccttgcaagaactccaagattctgtaaagcaaaaggaagaacttgtccagaacttggaagaaaaggttagggaaagcagttccatcatagaagcgcagaacacgaaactaaatgaaagcaatgttcagttggaaaacaaaacttcttgtttaaaggaaacccaagatcaattgctagagtcacagaagaaggagaaacaattgcaggaagaggctgccaaactttccggtgagctgcagcaagtgcaagaggccaatggagacataaaggattccctagtaaaagtagaggaactagtaaaggtgttggaggaaaaactccaagcagccacctcccagttggatgcccaacaagccacaaataaggaactccaggagttgctggttaaatctcaagaaaacgagggaaatctgcaaggagaatctttggcagtcactgagaaactacaacaactggagcaagcaaatggggagcttaaggaggctctgtgtcaaaaagagaatggccttaaagaacttcagggcaaacttgatgaaagtaatactgtattagaaagtcaaaagaagagccacaacgaaattcaggataagttagaacaggcccagcaaaaggagaggactcttcaagaggaaacatccaagttggcggagcaactgagccaattaaagcaggctaatgaagagctccagaaatcccttcagcaaaagcagttacttttggaaaagggtaatgaattcgacacccagctggcagaatatcagaaagtcattgatgagatggatgatgcggcttccgttaaatccgcgctgctggaacagctacaaaatagagttgcggaactggagaccgcactccgtcaagccaacgatgcccaaaagactgcttatctggagactaaggaactgaggcgccagctggaatcgctggaactggagaagtcgagggaggttctgagcctaaaggctcagatgaatggtgcgagcagtaggtccggaaagggtgatgaagtggagtcactggacatcgaaaccagtcttgccaagattaacttcctgaactcaattattgctgacatgcagcagaagaatgatgcactcaaggcaaaggtgcagacccttgaaaccttgccaatggatttcaccaaacctcatgccttcgatgccctgacaaagcggaaaccggctcccagacttttctgcgacatctgcgatgagtttgatcagcacgatacggaggattgtccaatccagggaagcgaagatcaagactactccacaccgtcatccgagtccaacaacaacgagaaggagcggaagctgccggcacccaggaaatactgtgattcctgcgaggtttttggccacgatacgagcgaatgtgccgatgatgaaacctattagttagctctagttaaattctattatttccattttactttgttttagactctatagcataaccatattgcgagatctatcagatgagatacttttacctcagcagagcttcactcaatcacacaaagaaatttctctacttaaaattgtgatcttgcgttatgcacacatccatggatagtagtctattttaaattgtttttatttattgaatgcgattcgtggcaaacacacaatcggttgttttcgtaatttttgagtgtaaacatagtgtaaaaaataaaatcaagaacgtgg

SEQ ID NO: 10311 - protein, 1690 aa, DROSOPHILA; identical to SEQ ID NO: 10224

SEQ ID NO: 10312 - DNA, 12225 bp, DROSOPHILA
cagtggcatgccgctgctggattttcgggggctaagacttaaacttaaagattcgacttgataggatcttatgatatgataattgtctattaaacatgaagtgcattaaatattctaaataacaatcataattacataatttttaaaccataatatcccctgacaaaaatcataagtacgcctgttgaccatataccaatatggtcatcgtgatcatgtcaccaataattccataacgttcgtatcactgtggctgttggaccatcgtgtgtggcggctttatagttgaccgttccacattatgtgtccacattggataactggaaaatgggagcgcacgttgtttgccagatagagttctctatctttaaaagcaacacacataaccattcattcatattgcacataaatcattttccaccatttcttttttgattgatgtcgttgtggctattgttgcttctccatttttttatataacataaataagtacatacatacatgtacatatacatatacatatgtatgtacatatttactgttgcgagtgcaactttatcagctacaagtgcgtgagtctgagtcagaaatcggcttgaaagggggctcactcatcacatatgacatcattcggaagttgtgtaaacagtttatggcaacttcggctgtaaaaagttggagatagtgagaaacgtgagtttcaaaacgaaattttaataagggattacaaaaatcattaaatgccaataattcagcacatctgtggaatttcctccctttaaagagcacgtgctggcacacacgtacatacatatgtacatacacacacatggtcacttataattatagggaacccctgaaatccctcaacagtgtgccaaaaatcccaataacaattactggccagctgcccatggccatgcaactcccatatgaaactgtgcattcctggtattcaatcgagcgcccttttaattcccgctcttttcaacttcttgttttgcagatgtccctgacgaaaaaggatccgtcgctgagagtcgccgcctcggatccgcatctcgtttctctgggcggcggacgactgagcaccgccgtcaccatacactacatacacataggtgagttcgaaagcagcaagtcttgaggatggacgagacacgaacgagttggaaactctagaatagatacgaacaggtcaaaaaaaagttgctttaaagtacagtaaattactttcgaattttaatttaaaatatacaggttatacaattcattcacgatcgcaaacaagtagttttaaaatagttcgaaagaaacttttattcaaaactcgtgattcgatatgtgccacaaaagctatcgcaacacgaggccatctctaacaagtccactggatacgcaccgttactcggatgcgtccctctccctcgcacgcgtgtcatttgcgttttgtttgctgttgcggccacgcgtgcgcattttctcctctcttgctcgctctctttattattatttttttctgccccggcaaggtcacttgtaaagcgataagcaaaataccaaactagaagcaaaaacaacaagtaccaaagcgcacacacaaaaagtcttgcgaaagcaacgcacaaaagacaaaaaaaatggtgagcaaactgcgataagctcaactttttttttaagtttacaatgggatgcatagtgttgaaacggtttaaatcaagtgagcaataaagttacacctaaaataaatgaaaaaaggtggcggtggcatgttaaaaaaaatcaaaaactaatagaaattaaaaaaaaaattttaaatgttatacttaaaacagaaattcaaatttatccaataaaacatgcctggaaaaaagttagttattaccactgtaccaaaaccaagggaagttaagaatatgctatttattccaaaaaaaatccgagagcgagagatgtgaagcgagataggaaatactgttgaaccgaatcgactgttgaaatattccaacctcacattaccgaaaatcacttcaagtgtagggctttcggtttgtaaaccgatttaaaaaaaaatcacactgactctatttaaatttccatttaggtgacactacgattggatccgcagccagctgcagcatatcgttgaatggaagtggggtgcgtccactgcactgcaccatctacaggtatttttacaattatttttattaataaaattatatggtgaatacaaacatatatgtacgaactggtaaaatctaaatattcttcttcaaaagtctttgtataactttaatatccatgtaacgttttttaaggcaaatctaaattagaacaagaaaagatcacaagaatattcttaaattacagtacatataaccttttcacgtacaattttgcaggagcgacgccaacgaggtgaccctggtacccgaaaaggactctcgcctactgatcgacggtgcaccgatcctggaggagacgaagcttagccagggggcaatgattaccattggcaactctaattatctgaggttcaacaatccggacgaggcccagatgatgcgatcggcgatgggctccaatgaaaggatttcgatgccccaaatcgattttacgcaatcggcgagacaggcccacgagctgagtcagtccctggagctggaatccttctacgaaagcatcataaacccgattaataacccatccacctacgaactggagtgccccaaggtcttctcctccgacctggtcactgtcaacatgccggccaaagatgttttgggacagaaatacgccagttttgcccgtaatctcgccgagaatcatcgcaacgaaaagcagttgaacaatcagtatgccaagggagttggcagcaatggtggttactggaatgtgcccagcaatgcggcaatttacaaggagcagcatcagcagcagcaccagcaggctccacaggatttactaacgaaagtcaataacgatcgctacgatcgttaccccaaggcgggtggcctgcagatctactcgatgaatggtgtgaatagcgatataaataatggcccggctaccggtaataattctggcactggaggaggagctgaactggaggatatgctaaagatctgcacggagtacgccgatcgaaacaactcaatgccttctacgcacaatgtttccagtacctccagcatcacatcttccccgattgtgcagaaccgtatcaaaaccaatggttcgttgccgcgggacaagaataagtcaccatttccacagcaggcaggagtagcaagcagtgccaatatttcacttttgagtagttcctctggctatgagaatgtacggttgctgggccccaatcgtgtggagatcaatggccaaatccatgtgccagcttcagcgggagatggcggatcgtccagtggagtatcctccaatgcacttgctcccacggctgcggtcagagcaagccatgagaatcttaaccaaaaccattcggcaactacaggtggcaagtatgtgccacagagcccgaggacaaagatccgcaccaactgtatgtcgcccaaaaaagacgtgtcctttggcaatgcctttgctttggctattagtccaccacctctggcatccagcgctgtagtgtctacatccaagcccattcctattcccagtatggtgaagccaccattggcacccaaaccaccggctccaaatcagcaacgcgactacgagcagctcttcaaatccttcgaacgaaagcagcagcaattggatcgcatggtgcccgccaagcggagtaacaagaacatcaacaatctcacccttaatctgcagtccgtggagtcgcagacgcagtcacccaaaccgagcaggaagccagctccggcacccagaagcattcatctagagcagcgtcagcgtcgggagctcatccagcggcgcaagcagctcaagcgggaactggccgagctgccaccttcagcgggaatcgagggactggaggtacatttaaagtttcaaatcaaatagaaagcctttcagaattgccctcttcaagttattgagaatccgttcactaaagaaactccttccctttcagttgaaattaggtgagcagcccttagcccccagtgcctcaccgcggctgcaactgcaggccttgcagaatcgagtttgccgcctggaggcccaaaggaatgccactcgtgtgatggaggagaatcagcaggccaaacttaagcagtccatcgaaataaaacaggatcagctgaagaagtaagctaacttagtgacaaaagaaaactatttgatttacatacattctccattgccttgtagactgcgagccatgttgaagcagaaaccaaacaatgcctgcttgaaggaggagctgcagctggtatgcgaatctttggagagcgatagaaagactttcgaggacctggaatttcagtatttcgaggaggagtccgagcaccatgccagtcatgaggaatttaaacggcaggagcagcgtcttatgctggaagccgaattggccgctctgcgcattcaaattggaccggatgaggaggaaccaggttcgcccacctcgccaggatccacaggcagtaatctggtcaatggcgtgatgtcccaatctctgtttggctccgccgaactgctttgcccgaagcgacgcaaccaagaggatttgatgtcaaagagcgtgaatgaaaatatgttctataatcataaaatcgaagccaacaccagtacgcccaagcgccttcccctccagcttttcgaggacttggcaggcggcagctgcgagcagataagctttaatctatcgctgcaaggcgatcgctttgaggtcaatccactggagagacgtgtgccctcgcaggacgacatcgatcgcagctgcaaggtggccaatgatgcgcccatctccgccagccagggtgccagcacaaagatctttgacagcatcatggagatcgaacggaatcgcaaacttctgttggcccagcagggtaggaaaaccttagttttaatctgaaatctataaaagctattagtatagcgattagttaggcaaaatcgttttaaaaagtaccctttcccaaaacttcttgctttccaaaagtatgaaagaaaccctataaaaactagtattgtttcgctacagtggtttttgaaaccgaattagtagactcttcgatttgaccgccttttaatactcacactctcatttacggtccacaggtcatcaggtcattgagcacgagcgccagaagatgtacgatctgaaaaagaagagccacgacgaggcccgcacccagtatctgctctctacccaacaatcgatggagcagcaacgccagctggaatcggatgccaagtgagttgacccccattcggtatccaaccccctgctccactgcacccccggctaattgaatgtgtgccccctgtcgagttaattactccaagtgcgacaacaaagatgcacttccagtgccacttacactcggatgcacgaaatgatatttgcagaataatgaagatatttttgaattatttaaattattttgaattaattgctagctgtattatgaagagcttaagctaacttactaataatggcccataccaattagcattcactttagatttgtttggtataaaaatatttaatatcttatcttgcaaattttccaaaattgaatgaaatcgtttcttgattaattaattgttaattgtatctgtggcacaagtgtcttttgtcaatcggcctttgattgatactgatttattagaatgactatagctcggttaaaatatcattttgccgaagaagatacccagttttgtggtgcagtgtgttgttgaaatgcctattggcttgctcattgaactcgcgctcctataattaatcaaactttgtggctaatagctaaacagtgtgtgcccgcccagcactccaccctcttgaaaaccggttgtcaaatcactttgaaatttgaattgaaaacccaaacaaaacacacaccaaaatcaataaagccgcgacgagcacatttgtctgggcaaataataaacttccaccggtttcagttttattttagtgcccatatgctgatcgaacggacgccgtcacctgagtagctttttaaattatttattttcctgatttttcgaagtacattcgcgctctcaaattttgcttatacacagcgatatatgcgaaagatattttcaaatgtgttcgatacagttttgcgatcaagtttatgaaataaaataattgaaattcaattgtgaattaatatatataaaaaaatatataatattatttgcaataatattattttcacaaagctaaattcatttctctctgtgcaccgttgctgataagcttatcagctgattgtgtatccgagtgtgcgttcgccggagtatctatgtgactcaatcgtcggattgtgtgtgccaactgttgctttcggattgtgcattcacatccattgcgtccgcccgcttagtcagtttttttgggctttcgcagtcttgcagttggaactcgagcgttagccatcggattcggaatcgggtatcgaagttcgcgcgggaatgagtcattctaaatagatgatgaatcgaattaacgcgatgattccttgctggtacgatgatcgaaaaaagaaagataaaatagtgccggttgttatggtgacagaaatccaatgaataagtccataaagaacacggcactagagcattcagcgataatggttgtgtttaagttgacacattgtgaaagaattcaaaagaaataaaatatgatataaaaagttataaaaatacataatattgctagttgaaatcaaaagaaatgcagacacataaaggatttgattttcatattataaaagagacatagtttcatttcatttaaaaatataattctcttaaccaaatcaactgcattttcataaccaatattagtgtttttatttcttatttcaatatttcatgatataacgcgtaattgatggcttatttatattttcttgcagcggcggcaaagacgcgaaattattcgaaaagaccgagttgcagaagctcaatcagaaaccaggtgaaccagtggatgaccaggtgcagaagatcgctggcgacaaggagaacaatgtacaaaaccgaaagtcaacaggcagtagtcccacaacgacaacaacaacaacaacaggtggtggaacgacacctcaacaggtgagctgatggaagcaatttaaaaataaaaatataaaacttgacccctacactaaattgatgacctaggccaaacaaagcgaaagcttttccgtttgtttacttgcttgttattgtagatttttgcttcggcttccgggaaatttttggtggtcaaaagcgcaattgtcagtgaccccatccatttttccacacaccaatttatgtggcatttcctttctgtccataaacaaatcggatattgtgaggagccagatgaatttgtaattccactgaaacattgattattgctgctatatttcttgcatgacggttgttttgcattcaaacgctatttgtggcacttttgttcacttacaagatcaaaatgcaaagaaaaagttaatttgttagattagattattttgtacgctacttttgtgtcaaagaagtatgcaactttcaactactagtaactgcctcgaaatgggcgtttccatgtatttttgttttatatcagataaatataaatgcatatgtacatatatcttgataaagtgcaattttcgccagggttttaacaattgctataagagaactgtgaattgttttgggttttattaaacacctccgctcagataactaaatagtgtaaataaatgggttcataaatgaaactgattgccgataataatgcctacaaggttgaaatatttccttaacgtgcttttcgcttcccttgaacgcaattcacaagattgctcacctaaaaactctcgaagaatatatatattatagaatagagttcttgagaattatctgctgacatgttcacgtgcttctaattgcaaaccatttaagtggaatatagcacacagtaaagtattagctttgcaataagtaatagctacttggctacctattcgatccaagatattttaattcaattagctgaggctgtgctttgcataatttaaatttaataacttcctttcactgaatcacccaaagacttttttttataccagtttttacgcttatcgttttctggaagatattaaaatgaatcactgcttatattttattataaatattttttatttgttatcgttgatggacttttagcgcacaaataacattgatcgacattaacatttgtaaattactgctttggttttatttattttgctgttcagagctttcagatgaatctcttactaatgtttttgttttgcttcaattttccagtaaatccgccttttccatttccccaaaaattcattcattacaattttgtttttgtttgtgcaaagtatactattttacgagttgctccaaatttatgatgtgcacgtacatttgtgatatatcttctttgattttcctaaacttttaatataactctaataaagttgacattgaactacactgttaaatatcatttggttttcaagatcacacgatcgtgaaggcaagagtcgaaaaatttaggttaagattaagagaaatagtgggtgtaagagtgcgatcttatgcgtaattttagaaaacttgtttctcttcgccatgcgctcgaaaaaacaaaataaaatatttgttgaaaataaaatataaaaaaaattaaatcaatataaagaattccaagtttgcaaatctatttgtaactttcacaatatgagcaaatatttcaatttatccttcgttataattcccaagttctttttattgataaagttcttaaatttgtatatgaacatagccgttttcacttttctcacactcaagttattttatttattcaaattgaaccttagttgccaatggcaatataccaaatattttttaatgaggttttagcctctatttgaattggaataaatatatttttcgagtgcacctctcccatcgtcctggatgacgatgaaatccatcgccagctcgttagtcacgagttgttggccgcctcggcattttgttagctgttttattttagccgtgtttatttaaaaagagccaccccaccatcccgtcgtgctctcaattgcggattctatatggactgcacttattaataagtttaatatttgctctggtctttgttttattttggttgtatctctctcacttagttacgcgttacgttttgtatgctccgtattattttattcggattatttttcgtttttttcgatgtttacgtttcaccacgattcttggcccatttgtttacacattttccgaactcgccaatagactggccatcgttatcgtctcccgttcattggccacaaagatccgcggaccattacgaatataactacgtcgatctggttcgcgatcctcctacggcggctggacaatgttcatgtgcgccccattcgatgagatccgtcgaaaagcctgaaagtcgaaaagtctgtcgagcaagaagctttggtggcgctggcggtcgccccatcatcgtcggttttcgtcggagaatcgcttagttagttgcccatttccactggaagcacaagtgatttttaagaatttttccccatccggttttccgtcgattttcgcatcgatatgtccgtgtggatgacttacgtacagcatcggcgcacagatgcaaatgcacgccagcgcaatgagttgtactacttagtaagtggatcgagaatttattaacaagagttgggttttataaatgaattatacaagttatcactgatagaatttggtaatcaaaaaaataacaaatgtgtgcgggctacaaagatataactatggataaatgaataaaatatactttgaagaattcgttctgtagtcaacaaatttaagccattgcaaaacatgaaatttcattaagtaagataaaaagtacgaaggaaatcatattaaagcatcctaaaataaaaatataaacaaaattataaattattgaggacataatcgtataaaagcctttaacaaaggctaaaaaaaatgtgcttaatgcaaaagcagtattaatagaatagacttaaattaatggcaatttggcaaaaattgcaaggcagtgaagattcattttaaacggattctctctatcatttcagcaacgccactcgcaaccggaattggagcaccacgcaattgccctgggaataggaggtggcggcagcggaggtgcaggtggtgccaaccaaatggtggcgcgtagtccgcgtccgctttcggaggccaacaattgcgatgcgacgattgaggcgcccaagtttgccaacggaatggactcctccgcgtcgccggcggtggcggataacaagagggccagcagcaattcacaggacacagcatcggcgggcagcggaagtgggaacagcggaagcggtggcagcaccgccagcgatcggaaacgcgttctaccgaaacaccagcgtccgctcacccgctacctgcccatcttttcgccggatctaaatctgcggcaccacatcgagaccgctggccaccagatcgatccgtgcccgcacgtgtttgtggacgcccacagttgtcgcgggtaagcttcttgttttgcctttaaagcaaaagcaaactagtgtaactctaactataattcgaatgattttccagttacctgcacaagctgggtgccacgtttcatgcctggtcgaggcgctggtttgtcctcgatcgccagaggagcgccttaatttactactctgataaatcggagaggaaaccaagaggcggagcctattttgcagtgagtccatatcatggtacgctcaaaactcgtctatattaaagacacattttgtacttatccacagaccatcgacgaggtgtatctggatcatctgaatgcctcgaagagcggccgaccgcattgtacttttattgtaaaaacgaagaagcgaagctataacttacaggccgcatccgattcagcggcgcgcatttggatcgatgccatcattaccggagcccagggtaacctggactactaacggattccgcggaggactccgaacacttttgcccagtacacagtctcagcattagatgggaaatatattaaatgtataagctcaaataacttacctaataataacaaaggaaacataagattaaaaagtagccatgtaagacgaaaaaacagctgctcaacaaggacacgggcaaaaggaacctaaaactatctttttttttttggcgaactaacgaaatctgagatttcagaactggaccaaagtcaagaacgtattttttagacctaaaaattatgtatatacattttactttgtcatattgtagttaagaactatttttatgtctagatttagaaacgattgtaagtcaaaaacagtcccatgctactaacaccgccattctaaaacctaatcatacaacagattttgaaattcttgcttattaggacggcctggtatcaaaggcaagcatctatatgatcgcatatatatcataaaccctagaatatagcaataaacgtatacaaattgtataacgatttaaaagtaactaccaaaatgactcttgaacacttgaagtttcatcgtgaatttacccaataacgttataatattgtatgcctatctattatattttatgaaaaatataccatatattttgataaatgtataattggtacaatccaatcgagagataggggggtcaaattatttgcccatcgctacgcgtaagactaaaactgaacgatttgctcaggcagctggaaaggataatcaaaagcaagagaataactgagaaacactaaactaataataacaataattatgtataaatatatgtgtaacaatacaaggtagttaataaaaagaattgtttttttaaataaacaaatgatttttattcgattcgaaacggaagtattcagagtattcttaacattttgttgactttacatagttaacgtagtcaacaaagtaattgagcgttctgcatttaaaaacaattaaatttgtttga

SEQ ID NO: 10313 - DNA, 3750 bp, DROSOPHILA
ttgcagatgtccctgacgaaaaaggatccgtcgctgagagtcgccgcctcggatccgcatctcgtttctctgggcggcggacgactgagcaccgccgtcaccatacactacatacacataggtgacactacgattggatccgcagccagctgcagcatatcgttgaatggaagtggggtgcgtccactgcactgcaccatctacaggagcgacgccaacgaggtgaccctggtacccgaaaaggactctcgcctactgatcgacggtgcaccgatcctggaggagacgaagcttagccagggggcaatgattaccattggcaactctaattatctgaggttcaacaatccggacgaggcccagatgatgcgatcggcgatgggctccaatgaaaggatttcgatgccccaaatcgattttacgcaatcggcgagacaggcccacgagctgagtcagtccctggagctggaatccttctacgaaagcatcataaacccgattaataacccatccacctacgaactggagtgccccaaggtcttctcctccgacctggtcactgtcaacatgccggccaaagatgttttgggacagaaatacgccagttttgcccgtaatctcgccgagaatcatcgcaacgaaaagcagttgaacaatcagtatgccaagggagttggcagcaatggtggttactggaatgtgcccagcaatgcggcaatttacaaggagcagcatcagcagcagcaccagcaggctccacaggatttactaacgaaagtcaataacgatcgctacgatcgttaccccaaggcgggtggcctgcagatctactcgatgaatggtgtgaatagcgatataaataatggcccggctaccggtaataattctggcactggaggaggagctgaactggaggatatgctaaagatctgcacggagtacgccgatcgaaacaactcaatgccttctacgcacaatgtttccagtacctccagcatcacatcttccccgattgtgcagaaccgtatcaaaaccaatggttcgttgccgcgggacaagaataagtcaccatttccacagcaggcaggagtagcaagcagtgccaatatttcacttttgagtagttcctctggctatgagaatgtacggttgctgggccccaatcgtgtggagatcaatggccaaatccatgtgccagcttcagcgggagatggcggatcgtccagtggagtatcctccaatgcacttgctcccacggctgcggtcagagcaagccatgagaatcttaaccaaaaccattcggcaactacaggtggcaagtatgtgccacagagcccgaggacaaagatccgcaccaactgtatgtcgcccaaaaaagacgtgtcctttggcaatgcctttgctttggctattagtccaccacctctggcatccagcgctgtagtgtctacatccaagcccattcctattcccagtatggtgaagccaccattggcacccaaaccaccggctccaaatcagcaacgcgactacgagcagctcttcaaatccttcgaacgaaagcagcagcaattggatcgcatggtgcccgccaagcggagtaacaagaacatcaacaatctcacccttaatctgcagtccgtggagtcgcagacgcagtcacccaaaccgagcaggaagccagctccggcacccagaagcattcatctagagcagcgtcagcgtcgggagctcatccagcggcgcaagcagctcaagcgggaactggccgagctgccaccttcagcgggaatcgagggactggagttgaaattaggtgagcagcccttagcccccagtgcctcaccgcggctgcaactgcaggccttgcagaatcgagtttgccgcctggaggcccaaaggaatgccactcgtgtgatggaggagaatcagcaggccaaacttaagcagtccatcgaaataaaacaggatcagctgaagaaactgcgagccatgttgaagcagaaaccaaacaatgcctgcttgaaggaggagctgcagctggtatgcgaatctttggagagcgatagaaagactttcgaggacctggaatttcagtatttcgaggaggagtccgagcaccatgccagtcatgaggaatttaaacggcaggagcagcgtcttatgctggaagccgaattggccgctctgcgcattcaaattggaccggatgaggaggaaccaggttcgcccacctcgccaggatccacaggcagtaatctggtcaatggcgtgatgtcccaatctctgtttggctccgccgaactgctttgcccgaagcgacgcaaccaagaggatttgatgtcaaagagcgtgaatgaaaatatgttctataatcataaaatcgaagccaacaccagtacgcccaagcgccttcccctccagcttttcgaggacttggcaggcggcagctgcgagcagataagctttaatctatcgctgcaaggcgatcgctttgaggtcaatccactggagagacgtgtgccctcgcaggacgacatcgatcgcagctgcaaggtggccaatgatgcgcccatctccgccagccagggtgccagcacaaagatctttgacagcatcatggagatcgaacggaatcgcaaacttctgttggcccagcagggtcatcaggtcattgagcacgagcgccagaagatgtacgatctgaaaaagaagagccacgacgaggcccgcacccagtatctgctctctacccaacaatcgatggagcagcaacgccagctggaatcggatgccaacggcggcaaagacgcgaaattattcgaaaagaccgagttgcagaagctcaatcagaaaccaggtgaaccagtggatgaccaggtgcagaagatcgctggcgacaaggagaacaatgtacaaaaccgaaagtcaacaggcagtagtcccacaacgacaacaacaacaacaacaggtggtggaacgacacctcaacagcaacgccactcgcaaccggaattggagcaccacgcaattgccctgggaataggaggtggcggcagcggaggtgcaggtggtgccaaccaaatggtggcgcgtagtccgcgtccgctttcggaggccaacaattgcgatgcgacgattgaggcgcccaagtttgccaacggaatggactcctccgcgtcgccggcggtggcggataacaagagggccagcagcaattcacaggacacagcatcggcgggcagcggaagtgggaacagcggaagcggtggcagcaccgccagcgatcggaaacgcgttctaccgaaacaccagcgtccgctcacccgctacctgcccatcttttcgccggatctaaatctgcggcaccacatcgagaccgctggccaccagatcgatccgtgcccgcacgtgtttgtggacgcccacagttgtcgcggttacctgcacaagctgggtgccacgtttcatgcctggtcgaggcgctggtttgtcctcgatcgccagaggagcgccttaatttactactctgataaatcggagaggaaaccaagaggcggagcctattttgcaaccatcgacgaggtgtatctggatcatctgaatgcctcgaagagcggccgaccgcattgtacttttattgtaaaaacgaagaagcgaagctataacttacaggccgcatccgattcagcggcgcgcatttggatcgatgccatcattaccggagcccagggtaacctggactactaa

SEQ ID NO: 10314 - protein, 1247 aa, DROSOPHILA
MSLTKKDPSLRVAASDPHLVSLGGGRLSTAVTIHYIHIGDTTIGSAASCSISLNGSGVRPLHCTIYRSDANEVTLVPEKDSRLLIDGAPILEETKLSQGAMITIGNSNYLRFNNPDEAQMMRSAMGSNERISMPQIDFTQSARQAHELSQSLELESFYESIINPINNPSTYELECPKVFSSDLVTVNMPAKDVLGQKYASFARNLAENHRNEKQLNNQYAKGVGSNGGYWNVPSNAAIYKEQHQQQHQQAPQDLLTKVNNDRYDRYPKAGGLQIYSMNGVNSDINNGPATGNNSGTGGGAELEDMLKICTEYADRNNSMPSTHNVSSTSSITSSPIVQNRIKTNGSLPRDKNKSPFPQQAGVASSANISLLSSSSGYENVRLLGPNRVEINGQIHVPASAGDGGSSSGVSSNALAPTAAVRASHENLNQNHSATTGGKYVPQSPRTKIRTNCMSPKKDVSFGNAFALAISPPPLASSAVVSTSKPIPIPSMVKPPLAPKPPAPNQQRDYEQLFKSFERKQQQLDRMVPAKRSNKNINNLTLNLQSVESQTQSPKPSRKPAPAPRSIHLEQRQRRELIQRRKQLKRELAELPPSAGIEGLELKLGEQPLAPSASPRLQLQALQNRVCRLEAQRNATRVMEENQQAKLKQSIEIKQDQLKKLRAMLKQKPNNACLKEELQLVCESLESDRKTFEDLEFQYFEEESEHHASHEEFKRQEQRLMLEAELAALRIQIGPDEEEPGSPTSPGSTGSNLVNGVMSQSLFGSAELLCPKRRNQEDLMSKSVNENMFYNHKIEANTSTPKRLPLQLFEDLAGGSCEQISFNLSLQGDRFEVNPLERRVPSQDDIDRSCKVANDAPISASQGASTKIFDSIMEIERNRKLLLAQQGHQVIEHERQKMYDLKKKSHDEARTQYLLSTQQSMEQQRQLESDANGGKDAKLFEKTELQKLNQKPGEPVDDQVQKIAGDKENNVQNRKSTGSSPTTTTTTTTGGGTTPQQQRHSQPELEHHAIALGIGGGGSGGAGGANQMVARSPRPLSEANNCDATIEAPKFANGMDSSASPAVADNKRASSNSQDTASAGSGSGNSGSGGSTASDRKRVLPKHQRPLTRYLPIFSPDLNLRHHIETAGHQIDPCPHVFVDAHSCRGYLHKLGATFHAWSRRWFVLDRQRSALIYYSDKSERKPRGGAYFATIDEVYLDHLNASKSGRPHCTFIVKTKKRSYNLQAASDSAARIWIDAIITGAQGNLDY

SEQ ID NO: 10315 - DNA, 4739 bp, DROSOPHILA
atcatatttgataagcgcaagaagattctagagtaagtccattaatggtgtttggttaaacaagatctcaattcccccaaaaatcccatcggtgcagtgagtttagaaagcaaaaccacggcgacgtggaaaccaatcagagcgtgcccaacttttggctgagggttctcaaagcatcgtacaccgagttcatcagcaagagggatgagaaaatattagaggtatgttatggatagatccgatttgaaggatatttaaattttaattgaaatttttcccgcgcagtgcttaagcgacatccgttctcggctgtacaacgaacccgtggtgaagtttgatatcgaattccacttcgatcccaatgattactttaccaacacggtgctgaccaagacatatttcctcaactgcctgccggatccagacgatccgctcgcatatgatggcgccgagatctacaagtgcgaaggctgcgtcatcgactggaagcagaccaaggaccagaccaaaaccggtaagccatctgggagcatcaaatttcacagatgttagttgaattcactcattgaccagaaaatcaagagccgtcgttctttgagttcttctcgccgccgcttttgccagaagatacccttgaccccaactactgtgacgtcaatgtaagattgaatatcagcgatctgcgatcctttcacatgcatctcctcccacaggctatgctgcaaaacgattttgaggtgggcttctatctaaaggagcgcgtgattcccaaggcggtgatcttcttcaccggcgagattgccgattgtcagagctccagcggatcggagaccgagtcggaagataccgaggacgagtcggatgccgaagaggaggatggcgtcgacaagtaaacattttacaccgcttatatacagtttacatacatttttaactcgagtcaccgaactattggcctgtccttacccactacataccaaccaaataaacatttcattatacatatttaccaaaaggatctcgcgcgctctttttaatgcctagctaaaggaattgaattgtggttttgatttatacagtgcgtttagcctggcgtgtatatattacaaggactcgaatagtcaaacgtaatactagatggctgagctacagcactcgcttgtagccagcgttgtggatccatcggcttggccatgtcgtcttttttcttaaaaaaaaataaaataatccagcacggcccacttcgacggaatctttacaaacaatattctaaggagccaccacctcctgtggcggtggcgatttcggtggctgctcgtcgtcggcgcgcggcggtggctgcagcatcaccaccaccgtgtcatcctcttcctgtgtctccagctccggaagtctttcaaactcctccaagtgattggcgaccacttcgcatttcggtttggagatcttgaagcgccgaattgccggaagcgtaatgctggtgccactaacatcgatatacaccagattcggagagcactgcaccaggtgctccagggtatgatttgtgatgagatggtagtttcgcaacgacagtcgctccagtttattgtctggcgagcgattgatgttccggatccagacaacgtccggttgcaccggtcgatcagctcggccaaagctatacatcgcccgatcggtgacatagtattgaggtgttgtctgacaggaaggcggacgtgggcgcactcgtcgagcatagtcgcgatccagtggctcgagcatgttccaaaacatcggatgctgaacaacctgatcgtagttcggacgcggatgcgtacgatggcgtcgcgtcggcatcagaacattcatcgggagtgagaattgttgattgacatagatataccgttgctccgttccctgcgcaaatacggccacaacactacgctgttggcgcgggttagcgttctcagcgtcgggcacgtagatgtaagcgcgcgggggtctaggatccaagccgggactctgcccgggagcctcgatattggctgcatcaactgcaattggtgcatcggctgcattggctgcatcggctgcatgcggaagtggcggcaagtcgacgcctccgctcaaaggtgcagcgttgctatgaccatttctgggcaacgataaaacctccaatttgtccgacgaagaccctgaggtggatgatgtgtcctcatcatcggattctgatggtgctcgtattcgtttcgcctgaagatcctgaccctccgaaggaggctcagttggcaccggcgacttctcctcctttctatcgctgcagttgtccaaattgaacgcaaccttgcatgcacgcagatgctccatggcggcccgcgatgtggacggctcgtcatcgctaagcactttcagtgaatcaggctgcggggaagcagcttcgtcagtggcgttgccgttggtattttttttagcaacggcttgtttggagtgcaggatctgtggcgactcaagcagcagttccttgagattctcgatagcgctaaaacactgcagatctgagttgttgatgggcgtctggcgaagatctagtgactgaaataaataaccctttataaagaatattcgccgattgcacctatgccaacctctagtttttggaaaccgaaacgtgccgccatgctgccatagggcacaaacttgcatagcgcctgacagcccttaagactaagacgccgcaaggaaggtaacttcgacaggcccataatataatagggctcgaaccagctgttgtcctcaatactgagatcctaaataagacggggttaggctattcattggactgtcgttcgctcaaactcacctctagatcaagcagatgcagctctatggagtaaaatatgctttttggcgtgtcgccgaccctaacgctacagtcctttagcttcagacgcctcagagtggccgggaactcagttatgtgtatctgaagaaaagataaaattggggtagaccagggaaacttgcgagatgccagcactcacgtattcgaagtccaggctgacgccctccagctccagcactttaagctgtacaaccctggggaaaacggagcttagcgtttgggtgaactggcggaattcgcctgcaacatgctgcgaggacggaggtccgcagattttaatggtgtgtgtcttttcggtggctcgtccaagaatctcttctaggatgcccataggcaggggcccgttgcttaagtctatgtgatgatagaagcggtgatccagcaggaggttttcaaagcgcggcgagcaactggaatattacggaatgttataatatggaaaggacatggaaatctcagcgacgcagagatctttgttgatagcggactacttactgcatcaccgccagaatggaggacgtgtccaggtactggaagatctcgaagagcagctcatcacagaagtccatgaggttgcactccgtttcccggtcgagggattccttatgctccttctcccttttgcgctgttttatctccggctcctcctcggtagggatttgtggcagcactggctgcacgggcacggcggccagctcccgcccacaacgttcgttgtccgggaagcggcgcttaggcgctgcaaggcacgtactgcccaattcggcctgttccatgcttgggctgctcctgcactttattgccaattttcgccagcagctttttttccagctaaatgcaattggtcaagtgtgaccgcagtcagatcccgagataagccgctagtaggggtattcctatgtcgaagagatgaaactggcttccgaatttcccggtaatttttaatgtcgtttttattattatattattttttttcttgattattacgatttgatactaaaggcggtggcactagctgctcatagttatacaattgagtcgtctggtaaaatgggaacaataacaagtagttaataatcgtttaattcttatgtagataataaagttgcctattttgctattttcctatttcaaacaaatattgcatattatgaatgaaatttaaaaataaggcgcattacgcatgtgcatgtgcattaaaaaagttattatacaaatagaataaacacattaaattaaataagattcctgttgtcattactagcaagcagtgttggaaaacaccgtgctgccctcactaatttctacacccgtctcgtgtatttttgtgcctgatttactgactgaaaatgcacctgctgcggagcctgcgccagctgaatggcctccaaggagtgcgccaagctatccggcaggtgtcctcggcgcccaccaagcccgccgccctgcagtacgagcgcgatccgcagccgcttttcacggatgccgaaacccagcggctgctccagtccatgacgcaactgaacttggacaaggtgtatcggaagcgcacggtgccggacaacagcagcgaaacgaagttcatgagcaacgagcagctggacaacgagttccagaacttggtggtgcgggctcagcaaattctgcaaatgccacccattgtgcagatcaaaaaagatgtggagcgggtgatagccaaggatacggcgctgaaggacttcgccaactccaagttcgtattcacggacatcaccttcggccgacggcagtcggaacgcaaggtaatcgtccgggatatggacggaaccttggcctacgccactcttgataccacgaagcgcatgaaccagttgta

SEQ ID NO: 10316 - DNA, 2490 bp, DROSOPHILA
tcacacttgaccaattgcatttagctggaaaaaaagctgctggcgaaaattggcaataaagtgcaggagcagcccaagcatggaacaggccgaattgggcagtacgtgccttgcagcgcctaagcgccgcttcccggacaacgaacgttgtgggcgggagctggccgccgtgcccgtgcagccagtgctgccacaaatccctaccgaggaggagccggagataaaacagcgcaaaagggagaaggagcataaggaatccctcgaccgggaaacggagtgcaacctcatggacttctgtgatgagctgctcttcgagatcttccagtacctggacacgtcctccattctggcggtgatgcattgctcgccgcgctttgaaaacctcctgctggatcaccgcttctatcatcacatagacttaagcaacgggcccctgcctatgggcatcctagaagagattcttggacgagccaccgaaaagacacacaccattaaaatctgcggacctccgtcctcgcagcatgttgcaggcgaattccgccagttcacccaaacgctaagctccgttttccccagggttgtacagcttaaagtgctggagctggagggcgtcagcctggacttcgaatacatacacataactgagttcccggccactctgaggcgtctgaagctaaaggactgtagcgttagggtcggcgacacgccaaaaagcatattttactccatagagctgcatctgcttgatctagaggatctcagtattgaggacaacagctggttcgagccctattatattatgggcctgtcgaagttaccttccttgcggcgtcttagtcttaagggctgtcaggcgctatgcaagtttgtgccctatggcagcatggcggcacgtttcggtttccaaaaactagagtcactagatcttcgccagacgcccatcaacaactcagatctgcagtgttttagcgctatcgagaatctcaaggaactgctgcttgagtcgccacagatcctgcactccaaacaagccgttgctaaaaaaaataccaacggcaacgccactgacgaagctgcttccccgcagcctgattcactgaaagtgcttagcgatgacgagccgtccacatcgcgggccgccatggagcatctgcgtgcatgcaaggttgcgttcaatttggacaactgcagcgatagaaaggaggagaagtcgccggtgccaactgagcctccttcggagggtcaggatcttcaggcgaaacgaatacgagcaccatcagaatccgatgatgaggacacatcatccacctcagggtcttcgtcggacaaattggaggttttatcgttgcccagaaatggtcatagcaacgctgcacctttgagcggaggcgtcgacttgccgccacttccgcatgcagccgatgcagccaatgcagccgatgcaccaattgcagttgatgcagccaatatcgaggctcccgggcagagtcccggcttggatcctagacccccgcgcgcttacatctacgtgcccgacgctgagaacgctaacccgcgccaacagcgtagtgttgtggccgtatttgcgcagggaacggagcaacggtatatctatgtcaatcaacaattctcactcccgatgaatgttctgatgccgacgcgacgccatcgtacgcatccgcgtccgaactacgatcaggttgttcagcatccgatgttttggaacatgctcgagccactggatcgcgactatgctcgacgagtgcgcccacgtccgccttcctgtcagacaacacctcaatactatgtcaccgatcgggcgatgtatagctttggccgagctgatcgaccggtgcaaccggacgttgtctggatccggaacatcaatcgctcgccagacaataaactggagcgactgtcgttgcgaaactaccatctcatcacaaatcataccctggagcacctggtgcagtgctctccgaatctggtgtatatcgatgttagtggcaccagcattacgcttccggcaattcggcgcttcaagatctccaaaccgaaatgcgaagtggtcgccaatcacttggaggagtttgaaagacttccggagctggagacacaggaagaggatgacacggtggtggtgatgctgcagccaccgccgcgcgccgacgacgagcagccaccgaaatcgccaccgccacaggaggtggtggctccttagaatattgtttgtaaagattccgtcgaagtgggccgtgctggattattttatttttttttaagaaaaaagacgacatggccaagccgatggatccacaacgctggctacaagcgagtgctgtagctcagccatctagtattacgtttgactattcgagtccttgtaatatatacacgccaggctaaacgcactgtataaatcaaaaccacaattcaattcctttagctaggcattaaaaagagcgcgcgagatccttttggtaaatatgt

SEQ ID NO: 10317 - protein, 713 aa, DROSOPHILA
MEQAELGSTCLAAPKRRFPDNERCGRELAAVPVQPVLPQIPTEEEPEIKQRKREKEHKESLDRETECNLMDFCDELLFEIFQYLDTSSILAVMHCSPRFENLLLDHRFYHHIDLSNGPLPMGILEEILGRATEKTHTIKICGPPSSQHVAGEFRQFTQTLSSVFPRVVQLKVLELEGVSLDFEYIHITEFPATLRRLKLKDCSVRVGDTPKSIFYSIELHLLDLEDLSIEDNSWFEPYYIMGLSKLPSLRRLSLKGCQALCKFVPYGSMAARFGFQKLESLDLRQTPINNSDLQCFSAIENLKELLLESPQILHSKQAVAKKNTNGNATDEAASPQPDSLKVLSDDEPSTSRAAMEHLRACKVAFNLDNCSDRKEEKSPVPTEPPSEGQDLQAKRIRAPSESDDEDTSSTSGSSSDKLEVLSLPRNGHSNAAPLSGGVDLPPLPHAADAANAADAPIAVDAANIEAPGQSPGLDPRPPRAYIYVPDAENANPRQQRSVVAVFAQGTEQRYIYVNQQFSLPMNVLMPTRRHRTHPRPNYDQVVQHPMFWNMLEPLDRDYARRVRPRPPSCQTTPQYYVTDRAMYSFGRADRPVQPDVVWIRNINRSPDNKLERLSLRNYHLITNHTLEHLVQCSPNLVYIDVSGTSITLPAIRRFKISKPKCEVVANHLEEFERLPELETQEEDDTVVVMLQPPPRADDEQPPKSPPPQEVVAP

SEQ ID NO: 10318 - DNA, 5936 bp, DROSOPHILA
ataaaaaaaattgataaaactgaagtttattctcgcactcaagtaacaaattggtttttcttttagtttcgtcgagaaggtatgattaatgataatttttgttattctttgaaatacttgacttttcccgtttgcaaatgcatcgaaaaattattaaaacgaattgtgaggcattttaaacttaagttcttacaaattaataatagcgaaaaaatgcaatcgaaaatctgagcaaatatacgtatggatcttagcggattttaaagagttcttgagagatgttcccccttgcgaaaatacgattttacgtctcttctatttttccctttctctgcggttttttttttggtttttttttttttttttgttttgtttagcccaggtaccaaaagtaatcattcgttatgttttcttttttttaagtattgattatgatgtgagggatttcatagggcccaaatgttcttattactcaaagtccggttgcgactaattcaagcgagatcttgcaaaaacttaaatatttttggttgaaatacacgaagcgtcaatacagcttaaaattgtttcgaatgctttacacttaagtctcgttaagattcgtattaaaaacaagaactgccaatctgtctttgagcaatatgttggaaccaaacaatatttctcacatcataatccatactattctgagcgatacttgtttcgctaacaaacaatgattatttttgattttcaatacaaccgtttaaatgtatacggtccccggtttagtcagctttacattcgtctctgtggtttgtttcttctgccaattaaatttattttaatgctcctgctgctgctgttcttctttcgttgttgttgctattgttagttgctgctgctgctgctgcttttgcttttgttgttgctgttgctgtatgatggtgttgccgctgttcttgctgttactgttgctgcacgttgcatgtagcatgttgctggcgttcgtttatggcattcagagaaagaatttgcccagcaggaggctaacgatggccgcagcaatggcaactgcaatgtaaaagaccggaatctgcttctcagccaggactggggcatagggctcattcacctgtttgacggccggcgagctccggaaacgtgtgatttgatcctgcaaatggttgagaaatttattaatttacacaaatggatagattgatccttatctggctacttacaaaatatttatcctatgtattcttttttgaactcgaaaacaaatcagcaccccaactgaaccgagttattgtataataacaataattatatatcaagcgcgcagaaaactcccaggcacaacagatcattatttgcattattcttggaattaccaaattggatttacttatatttaaaggctgattatttttagtacaccacagcaacctaatgcaagaaattgtcactaatagtgtcattaattttcatatcaattttgagatcatcgcgtacagcctataatttgaaaaaagtcagaggcctgcttctccttatggctgaatcgactcattctaaccgattgcgaacaaaactgaatattcaatattgaagacatcttgataatactgctgaggaactcccttaggtagcagtaacttcgacattgcactactcaaaacacagaaaaaatgaagagtcataatggaattggcttaccttcaagtgaagattctctcttcgcaattcaatgttgcattcacgcagcgctttgatctctccggacagcaagtccagactctcagacgtttcgagcaaattggatggcttaaactgggtaatatgttagcgttatttattatgccattagaaaggttttgcctgttcgacttaacataccttatcctcgctggagagcttcggcttgctctcgagcgcctcagcgctggctgagctagtattggcacccgcgcttccgcctccggcagctccggttccgccgccaacggcaccaccaccgctggtgttctcagcatttgcctcagcggtgggcatctcgaaaacgcacttcagtttggcgtccatcagctgctcgggctccagatccttccactgcgggtgtagaataggacgttgattagaaaagtaatatacacactatgccatcattaagagtcctattcgtttccccttaccaatttatttaaatcgcttagatcagcatccatgggtgccaggacgctctgcaccatgaacttgtgcttgttcttctcctgctgatcgtagacgaatggctgaaggcagactatgtacatgccgaggataagtaacgatattattagagtaacgatataccatttgagaaatactcactctccacctgggttgatcgaaagggaattatcttgccgatgtttggacgtacgcagtagcgtttcggggcggttgtcttgatcttgaagaccagaggcagagccgagttgttgcgcagagtcatgattgtgacaacgggtcgggtgaagggacctgtaaggcgagaatatatcaaaatgagtgttagcttaaggaacacatcttattaatttcatggcacatataacgcatatgtacatacatatttccctattgttaatattttctgatttccgattttctcctcatgatatgatctttaaataaaacaggcattatcgccctttcatattgaatgcacccgattagtcacactattttggcgatagccccacccaacccaaaagcgcccaacactcgcactttccacatttctctactttcccgattttccccactcttcctgatttttgtgtagcgtcacgctcgttgcgtcattggtcgaggcaagttcaaattaattgaattaatatcaaaacaaaatcgagaacgggcacaaaaaccgaatagtaaactgaatatcgaggaataccctgcatattgaagttggattcactaccaaaatgtgtaacttattttgaaactattatgaaattacaaaaattacttcaaattatttcagatttaatgtgattagtaaacgctagtattactccgaatattacttttaagccgactagaaatcgatcgcggggtcttacattctaaaatagtttttttggtcacatttttaacaggcattggtgagaaaatcaaaacaaaccaggaaatgggcaaaaactaacgaaaggaattttttttgtttgttagcatggcgtgtgcgtgtttttctttggtgtaagtgtgtgtcaaggaaatttcattagacaaagtcgcgtcatgcatgtgtttttcacccctcgccgaccgcactattcacgatctaacgggaaacgtgggcgagggggttgcaaaagaatggggctaaggctcactcacacatacacagatattaaaatatttgcgcacaatggaagcgatagcaaaatacttgaaaagttaactcaatttttttcaataagacaaaatacaaatggtgaatggttattggtgtattattctagatcgcaatcaacaatgattggtcatttaagtagacatttcgttctgcaattgagactgtgataaaatttcgcgaaaaaaattaaatgtttatgcactggaaaatgcagcttggcaacaggagttcaataacaatgcgatgacaaccgtgccacttgtcgcacccactgtgcgagctctttgcattgtttttgtcactgctgctgttgctttttggccaaaattcaaggagccaaaagacaagaaaaaattaaaatggcccatgacaagtttttgcgtataaaaatataatgctagccaaaaacgcgaaacgagtgagcaagagggagagggatggcgagtgcaagtgagaaagagagcgacgccagctgccggcatcaaaaaataaaatacattaaagagctgaagcaaaaaaaaaaaaaagaaaaaaaacggaaagaagcagagcgatgatacacgtagaccccgaaaagaacaacaataaaaggtgtcgtatgtaaaggaagaacaaaaacaacggaaattattgatagccaatcgagcgagatggcaatagaaagcgtagagggagggagattaaatgtgcgcgtgagagagagaaaaagtgaaacttgcagtttgctctttgcaagaaatgggaggtgaatcggcttttttggtcgatatgcagcgacctttccgcaaaaacgcgaaaataatgtaaaataaacttacccacaaaacgcaactcatgttctggttcaatggtcaacggaagatcaaagagtgatttgctcattgtggcggctggcttttgttgttgttgttgctgctgctcctggtgttgttcttgtcgttgttgctgccgagaatttcactctctccgcttttcgcctcttatcgttttaattttattttttgtgcgtcctgtttttgcccagctatttgttgttcttgctggctgtttgctgttaagaaaatgcacacaaaattatattaaaatgcagacgcacgcatagatacgagacacaggcacacaactaaattaaaagagggatttcaaatttttcgcttacgtttgcgttttttagccaaatatatcaagaaaactgctgctgtttttatgcctgtttcgttttactttactcgtctctctttttttctttcgtttttcgttcgtttcgctctcacaggcgaaatatcggtaaatttatgcgaccacacacacacgcatggacaaaaaaaaagcaagagccagagaaactcacgcacgcacgggctttttgcagaaaatttcgggaaaaaaacacaacgatcaacgtgcgacttcttcaccgactttaggtcgcttttctgtcgatattttcgatttcagtggtttaccacgcttcggtttcttcgcaaacttcagttgaaaacgcaaaatgtaaaaaagccatatattctgtcagctagtgatgtgaaaaaaatatcgatgcatcgggtatcgatatttttagtttagcgacttttcgatacttgtcaagcattggtcgttaaattaccttgtaaaatatatatagtgttttttaagacaagatattttttctatttttttttatttaggtaatttgaaaatgttattaataacaatttgcaccaaaattttcctttccctgaataatgccattcagcttttgacagaatataaattagttaaatttataacataacgagtacatgaaatttaaaaatgtattaaaataaattttcctagttttaagttacaattttgcaacaggaagcaaagcagtcgaagtaatacataaaaatacgaataaaaataagaacatgcaaaattacaataattttaagcttgccaaagcatttatttaatagaacacaaatttgtatttgatggtagtattacatattttatgtaaatatagtcggccttaaggacacacaaagttgtaaaataacctgatatcaaattattctgatgttcaatcatagcgttttgtatattatatatataatacataataatacgaaaaaaaagaacatgcaaaattttattaattttcagctgaataacttcacttgcttgccaaagtatttttagtaagacaaaaaatttgcatggtagtggtacatttgttatgtgcatacagtcgtccttttaaaggacatacaaagttgtaaaataatctgatatcaaattattctgatgttcaatcctagcgttatgaatattatatatgtttttagtcatatagagatctgactgcctaagaattaaagtgttggacaagcggcggaatttcgatttggcttaagaaaattacacttctaacagcatctccttaacacttggccgcctgctgttcctggatatttatgccgaatcgcacagcgaaggctttactagctagcttcataatctcgttgcgaatggagaatggagccttggccacaacggc

SEQ ID NO: 10319 - DNA, 1365 bp, DROSOPHILA
cacatcactagctgacagaatatatggcttttttacattttgcgttttcaactgaagtttgcgaagaaaccgaagcgtggtaaaccactgaaatcgaaaatatcgacagaaaagcgacctaaagtcggtgaagaagtcgcacgttgatcgttgtgtttttttcccgaaattttctgcaaaaagcccgtgcgtgcgtgagtttctctggctcttgctttttttttgtccatgcgtgtgtgtgtggtcgcataaatttaccgatatttcgcctgtgagagcgaaacgaacgaaaaacgaaagaaaaaaagagagacgagtaaagtaaaacgaaacaggcataaaaacagcagcagttttcttgatatatttggctaaaaaacgcaaaccaaacagccagcaagaacaacaaatagctgggcaaaaacaggacgcacaaaaaataaaattaaaacgataagaggcgaaaagcggagagagtgaaattctcggcagcaacaacgacaagaacaacaccaggagcagcagcaacaacaacaacaaaagccagccgccacaatgagcaaatcactctttgatcttccgttgaccattgaaccagaacatgagttgcgttttgtgggtcccttcacccgacccgttgtcacaatcatgactctgcgcaacaactcggctctgcctctggtcttcaagatcaagacaaccgccccgaaacgctactgcgtacgtccaaacatcggcaagataattccctttcgatcaacccaggtggagatctgccttcagccattcgtctacgatcagcaggagaagaacaagcacaagttcatggtgcagagcgtcctggcacccatggatgctgatctaagcgatttaaataaattgtggaaggatctggagcccgagcagctgatggacgccaaactgaagtgcgttttcgagatgcccaccgctgaggcaaatgctgagaacaccagcggtggtggtgccgttggcggcggaaccggagctgccggaggcggaagcgcgggtgccaatactagctcagccagcgctgaggcgctcgagagcaagccgaagctctccagcgaggataagtttaagccatccaatttgctcgaaacgtctgagagtctggacttgctgtccggagagatcaaagcgctgcgtgaatgcaacattgaattgcgaagagagaatcttcacttgaaggatcaaatcacacgtttccggagctcgccggccgtcaaacaggtgaatgagccctatgccccagtcctggctgagaagcagattccggtcttttacattgcagttgccattgctgcggccatcgttagcctcctgctgggcaaattctttctctga

SEQ ID NO: 10320 - protein, 269 aa, DROSOPHILA
MSKSLFDLPLTIEPEHELRFVGPFTRPVVTIMTLRNNSALPLVFKIKTTAPKRYCVRPNIGKIIPFRSTQVEICLQPFVYDQQEKNKHKFMVQSVLAPMDADLSDLNKLWKDLEPEQLMDAKLKCVFEMPTAEANAENTSGGGAVGGGTGAAGGGSAGANTSSASAEALESKPKLSSEDKFKPSNLLETSESLDLLSGEIKALRECNIELRRENLHLKDQITRFRSSPAVKQVNEPYAPVLAEKQIPVFYIAVAIAAAIVSLLLGKFFL

SEQ ID NO: 10321 - DNA, 7933 bp, DROSOPHILA
cagcggctgcgacggcaccaccgccgcccaccggcatcgaggagagcttctcgcgaccctccttgatcaggtcgtcgatgctcttgccagccagctccttgatgaccttggtcagacgctcggcgtcgacctcaacgcccacagagctgaggatcttctccagatcgctgttggcgggcgagtccttgccaccgaggacggccagaaggtaagcagccacgtaacgcatgtttaagtcttgggttcttgacacgaaacgtgaattggcaaaatgtacgaaaaacacaactttcctttgcaagttgtcgtcgaaaaagaggcggaagtcagtgtggccgcgcggtcgaggctcgaaaataccagctcatacttatatataccaaagtataccacatccttatctagcaatacccctaatgaaacgataaattcaaatattattttcaattttgcttttaaataaaaattagagcaatattattgatttttgaacaatttggtgtgttttttttatatttacaacatcaaaaagtatttatattagcttaataatatgacctttcttacagcatggaaatgttatcagttgcaacactgggtttcaaacttggctatcgtaatagtgggaagcactttgctcttgcagtaggcggtcacaccatttgaaacggttctgttaggcgaggtctaacatactgttaagtgctggaaagagagcaaaatgagagtgatcgtaagctaagagaaggaactagggatgcgtaaaagttaacagctggctatcgatgattaacatgaccatcgttttaacagcagaacttaactgttatttgtacacataaatataaaactgtaataaaactcgaaaaagctgtataaaaaataaatttttttcgaaaatatgtttaatatgagatatttattattcttcaaaaacactttaaatttaagttgcacccccacttgaaataaattgcagaaaagacatgagacccatcttattgtatgctgtatatataattgcatatataaatgattgttgtacaaaattttgaaattgtataatgcattcctgaactttgtgtatcacatttcgatttggagggccttcaaacgccctcgagaatcgtttcacatgtaatggtcatcagatagttgatcggcagtagtattcacacttaacttacgactacaaacaaattaaggtattctttattccggatccgtatccccggacacaataactggactgtcgcgaaaaaataaacaaaatgcttcactacacttaaaggaacattggtaacaagaacgaagcgcggccgcaatgatcagtccactgccactttcacttccacatccataatccataatccataatccataatccattatccattatccttctgggcatcgagactataggggttcctgctgaaagtaatcgtgctccaaacaggccaaggcggatggtcgcaggtggaggtcgtaggaaagcattttctgcgggcaaacatagggtatgcgttagtctagaccatgcaacaagatatgtatcttcattttcatactcacattcaacagatcatcggcgtacttgcacaggtgtgggcaaaagtcttttggtctctttggatgccgctggggaaagtgttccagggccacggaaatggtctgtggccactgttgctcggtgggtctaccggtcagtctgcgtgaaatcgcataaatgtaattaaaaatcaccgatttcaatggcagtatttgtgcactcactcgaagatgcggtccagctgattcttttcggaggtgcccgggaatagggcgcgccgattgaacatctcgaagatgatgcaggcggcactccagatgtccacggtgctgttgtagggctgggcgagcagaacctcgggtgcgcggtaccacaaggtgaccaccacggaggtgagcttcatctccgaaccgtaggtcttggccaagccaaagtcggcgatcttgaggtggccctgcgaggagaccagcaggttttgcggcttaagatcccgatggatgatacggtgtgagtgtaagaagtccacaccggtcagtagttcccttgacaagcgctgcaataggaaataatttcatataccattttctgaaattttgatatcattttgagacccacctgaattgtgggcggcgacatgcccgatttgggaagtctgtctataagatccgaaagatcctgctccacatgttcgaaaaccaacagaatcagcaattggccgtcgcgctccagaaactggcatacttcgtacagtctgaaagagaggggaagtgcaatctttgtatgtacaaattgtttgattttgtgtgcgacagagagcgatgtatgggggaaatgttgagagatataaaaaaaatgtgtcataaaatgctgctggttgtggtgcgccaatacgccattggccatactttgttcgtttcgggaactacgcgaagcactcgagacaaacacatgcgcacatggcgatcaaagagccaaagagagcgtccagtaagagaggctacagatcgttttcggacagaggcaaaacgtaaacgttagcagagcagattagcattatgttatgttagcattatgttagaatcagttcgggcagttattttaacattgcctttgaattacttaaaaggcacagttttattgaaaccttctactgttacacttgctttagcaactggcacattgggtttttaaaaatacagataaatacaagaaacttaatttgccattgatttatttcttgtacccctccaacacttttggcttcaaacaaaataacagctgcactttgtagccatttgcaacttaacttaacattctgttgtgcgagatctctctctctctctctctctctgtcgatctctttgtactgtattcgcgtcgcgctctcacgctgctaaagtgcaagcgagtgcgcacatcgataacgcgcgacagcaacatgtggttatcgagctgctctgttaattcaaattcctaacggccgccgcaaacaaacataatgccaatacaaaatcgcccacatttgcgaactgcagtgatcagttatcagcgggagcggatcgacttgcttcagacttacttgacttgactggcatatgtcagaagcgagggcgttcgccgggggcaaatcgtcggaatattacggctatagcatgcacagataaacacaagcgcgctgacattgcgatgcggctctttacaaatgagtttggcaaatagctttggcgccgccacttggccccaatggcgggtgataacacccctcatatacagctagctagctatagttctacataaagtactcaactccaaggccatttagaagcccactgcccttgtggcagcgtgtaaatcacccatactcacttgacaatattcgcatgattgctggcattcagctgcttcagcagcgaaatctcccgcagcgtggacattggcacaccgttctcgttcagcgatatcctaaccttcttcagcgccactatgttgccggtgatcacatcgcgggctctgtaaaccgttccataggcacctgaaaagtggatcgaaattgtacatcaaaatgcttacaacgggaaataaatgcgaaagacagccgaaaatagaataaaataaagtcagctgtgccgataagataaatggcagaaatcagagaggcgagagaaagagagaaggtgccacttagcttcttcatatcattatggtgtatttatacttttcatattcaacatcgtatttatagcccttacgattgaagtgacttgatttatttgccttgttcgatgaactaactgtttataatgattgaatgaatagacaatgaatgcatttagcccaaaagaatcgtattgcaatgcatgcaataattgcatatattagagactatattatatgcactcaaaattagtcaaaatattgcacgaaattcagactaatttcctcatgaaactgttgctgtctcaggtacaacgtgatcttaatttctacatgttcacgggcaaagaaaaacgacaagagacgagcaaaattcccaatcagaatcaaattctggcatgccagagaaatgtcaccgaaaatttatcacccgtacggacaaatggacaaatggacaaacggacggacggacggacatgcgtggggggtagaaaagctagaaggcaccggctatttcggttgacactgacatacagaaacagcagatatgtactgatacacccgaaataaacgcaacttgagggggggggggggtgaatttggttttccgtccctttgtcaccgtctctagaccacctggcttatgaactgtgccgctgttgctacattcaagtacaaggccgtgagctcgactcgtttttgaacgtcggcaactggtctgtccaattggaattgtcaaaaaaatatacaaatatacaagcaaaataaactcgaaaaattgcgcaaagaaaacaacaaagcaaagcactatgggaaatttacgcactttatctggccgaaaaccgattaatatatgtaatattaaatgcatgcatttagttacaacggtgactactgttaggcaatgcaaaaaagttaattgaatgactatctgcaaactaaaaaatatatattatatatcattaaaaatatgggctagtgtaaggcaatgcaaaaaaagtttggagttagtttggccacaaaaagtggtcaaattttccatagtacaaagtagcaaaaatgagactgagcgaaagcgaataataattgaatgaatgtgcacagaaaggcagacagccgaaagtttgagtgtatgtgtgtgtgtgtgcgttgtataacagatgaaattgtgcggacccatgactcgcacaacacccagtaacaatatccatcattagcattcgcctgcccatgatgatcggcatgatcggtgacgtaattgatttgggctttatttacagcaaacaagcgatcgtaattactgaccacaaaaaaaaaagaccatgagccacttgtcagatcatcatggatgtgagatcggcagaaacacgtagtccgccgagagtggacctaaaagtatgcaggtagaaggtgtaggatccaatacaggggagttttccatccaatatttccccttttcgcggaatttccacgcttaattagtaaaggggtaaaaaaacaacaacattcctccaagtgcacttgtcatttcagcttcataacaatgtcggagctcccgattgatcgtaaacagtagtgaaaccaaatagcccagactttgtaagcaaattaaagtaatcaaacgttaacaacaagcgaccagcaaacgaaagcctctcgtgcgaagagagccggacctatcccaacaacaaagcaaccgcgtcccattattaaatcccacccaagtcgctcaccttcgccgatgatgttgagctcctggtagttgaacggatcgccatcgccgaacttcttcgcctgggacattttctgccgcttcagctggcgtacatatgacatttagctggattttacggttatttgcgtattcctctaatattccgggtaatcgaaaccgttagttgcaccagctggaagtgaaggggtgttttttttttggttatcgatcgtctgcatgtcacgtatcgatatgtccttgtgtccccacgcgatagttcacacagatcgtagcgtgagagggagagtgcgagtgcgtgagagagagagggagggccttacctgatttcatacctgttgccttttctagataaccccaaaactggcgataaagactggtgtgacaggtgcgctaatggaagaagtctggctatatgctccgctatgcttttctatctccgagaaccgaaaaccgaaacatatacatggacaactacatatgtatgtatgtatgtagatggcggcggtcgttgaaccgcgtttaatgttttcgtacatactccgtttttatgtctaaccaatcgcagaacggcaaaggccaacactagttatgacttattcatgttattcagtgacgctgctcgccgtctccgttttgcggcttcgttcgtgcatcctgttgctcttattcgagcttgactgtgaacgctgtactggttatctactgtcgcgttagttggcgtgtgtccactattctctcctatctaaagtgctaccacttttctgtcagtgcattttttttgcccgaaaaatatacatataccgcaaaaaagaacccgaatacaatgtattttgttgctggcatttgtcaattaattctaatcgcgagacaagcgaaacaacaataataagcgacacagtcacaaaactgggtagaaagagagtgtccagaattgtgaaaggtattacgaggtattacgagctgtatatttgggtctaaaatacatagttattgttgcaccagttttcgccccctctctctccctcgtcatccctctctcgctcaccatttgcgctctactgataaggaaatttcggcttcactttacttttttttcggtgaacttcaatgccaatgttgtcgtttttctttcaaccgttgtgcgaaatattagttaaatattaagaaaatgtggtttttatttgcgaagactcgaacacacacacaacgccgctaagtgatttcgcttgagagatcggtcttacacacacacacatacacaaacacaaacgcacacaccgagtggtacacacacacaggcgcaggtattatgtatacatatatgatttttattcgctttgacgaaattttggcatttgttgataatccagctagaaccgcacgataggagcaacgcgacgcgaattttcggtgcgaacacggttcagttgccggcagtcgcactttaattaagtttttaaaacgtcttataaatttttaccaatattcgtaagagttgagtgattttgtgttttgttgttggcacagctctggaaactgttttagatggtctacttaacagtggcttctcttcgcctgttatcgcccgctgttagcaaacagacggccgctaacattgtgctgtatacgtccaatcggttaaacggttaatttcgaaattgctgccagcgatcgttattgaatgttattccaattcgataacgtaagtgttattgtgttatactaatgttattgatttctgggaatttgatattttcaacttgtaataatgcccaaatttattttttttgcaatgtgaatttcaggcatttatatatgtaacatatataaattacaaataaataaataataataaacataatgaaaataatatttgaaaaaaatttttattacatacgataaaatgtgaaaattttaaaactgtcgtggtcaactacaattggtcggccataattagttaactccaaacatgtgtgtcattgacttttagcatttttaggatttggtaaacttaaatttttataaccctgcaaaataatacaaaattctggaataaaatgtcttaatgatctagattggcggcataattcaatttgtaactcaatccggcgataaagtcactcgttgaatgtataatttattgacatgagttgaatgccaaaagtcgctcaacatttttttgagtgaaagcttgcttaccgatttccaacgatctggccgcactgccaatttcgaaatcgaatcaaggcattcgcagtggggcgcgtaaatttaaaaacaatgttgcaaatacattgtgaaaccaataaacgcatttaacaaaccgcctatcacaaatgttacccattggattggcgaaaatttccatgtttttttttggggaaaaagcgcgattaattagtaacgaaatcaaattagagcacagtgacgaagtcagccgagtgctaattaccaccagcgggtatcaggcacctaaattatgcatgacgtacgcc

SEQ ID NO: 10322 - DNA, 1849 bp, DROSOPHILA
ctcttacgaatattggtaaaaatttataagacgttttaaaaacttaattaaagtgcgactgccggcaactgaaccgtgttcgcaccgaaaattcgcgtcgcgttgctcctatcgtgcggttctagctggattatcaacaaatgccaaaatttcgtcaaagcgaataaaaatcatatatgtatacataatacctgcgcctgtgtgtgtgtaccactcggtgtgtgcgtttgtgtttgtgtatgtgtgtgtgtgtaagaccgatctctcaagcgaaatcacttagcggcgttgtgtgtgtgttcgagtcttcgcaaataaaaaccacattttcttaatatttaactaatatttcgcacaacggttgaaagaaaaacgacaacattggcattgaagttcaccgaaaaaaaactggtgcaactaacggtttcgattacccggaatattagaggaatacgcaaataaccgtaaaatccagctaaatgtcatatgtacgccagctgaagcggcagaaaatgtcccaggcgaagaagttcggcgatggcgatccgttcaactaccaggagctcaacatcatcggcgaaggtgcctatggaacggtttacagagcccgcgatgtgatcaccggcaacatagtggcgctgaagaaggttaggatatcgctgaacgagaacggtgtgccaatgtccacgctgcgggagatttcgctgctgaagcagctgaatgccagcaatcatgcgaatattgtcaaactgtacgaagtatgccagtttctggagcgcgacggccaattgctgattctgttggttttcgaacatgtggagcaggatctttcggatcttatagacagacttcccaaatcgggcatgtcgccgcccacaattcagcgcttgtcaagggaactactgaccggtgtggacttcttacactcacaccgtatcatccatcgggatcttaagccgcaaaacctgctggtctcctcgcagggccacctcaagatcgccgactttggcttggccaagacctacggttcggagatgaagctcacctccgtggtggtcaccttgtggtaccgcgcacccgaggttctgctcgcccagccctacaacagcaccgtggacatctggagtgccgcctgcatcatcttcgagatgttcaatcggcgcgccctattcccgggcacctccgaaaagaatcagctggaccgcatcttcgaactgaccggtagacccaccgagcaacagtggccacagaccatttccgtggccctggaacactttccccagcggcatccaaagagaccaaaagacttttgcccacacctgtgcaagtacgccgatgatctgttgaataaaatgctttcctacgacctccacctgcgaccatccgccttggcctgtttggagcacgattactttcagcaggaacccctatagtctcgatgcccagaaggataatggataatggattatggattatggattatggattatggatgtggaagtgaaagtggcagtggactgatcattgcggccgcgcttcgttcttgttaccaatgttcctttaagtgtagtgaagcattttgtttattttttcgcgacagtccagttattgtgtccggggatacggatccggaataaagaataccttaatttgtttgtagtcgtaagttaagtgtgaatactactgccgatcaactatctgatgaccattacatgtgaaacgattctcgagggcgtttgaaggccctccaaatcgaaatgtgatacacaaagttcaggaatgcattatacaatttcaaaattttgtacaacaatcatttatatatgcaattatatatacagcatacaat

SEQ ID NO: 10323 - protein, 317 aa, DROSOPHILA; identical to SEQ ID NO: 10179

SEQ ID NO: 10324 - DNA, 5101 bp, DROSOPHILA
gggaaacgcgattgcgccaagctcagataaagctctgagcgaccggttaatgtgaatgtacatgtaggtctgtcggggtcaccggagaagcttgaaatccggtgtttttcccttctaagctaactcacccagggccttcttctccttgaatcgctcctcgccgccggcccacagaacggagaactcccggggattgaaggtggccgtgctgcgttccttctggagatcgggattcactggtttggctggcattttgctatgcggcacagtattcaagtcacgtaaacaggttatggattaacgagccaccgcaaagcgtccgtcttcgttgaatatcgcgtactgactgattgttgctggaaaggcgaattgcgctcagtggtcagtcagtcggtcactcaagtgctggtggaggaaatccagtggaggagattgagattatggactgctgatctgatccagctattccgaatctaatcatcgatgccagctctcgaacgacgtgaactttaaccgcgaaaatacacatgtaataagttcgcttttgtgttgaaatagtctgtagcacaaccattattctcacgccattgttgttgggctacatttatgagtaaatacacaaaataaatacactgcatgtaaaaagtacttgggcgttttctttcagtttgtttctaatttaaataagattgctttcataagcttctttgttcgtataatttgtttgcaagtgaataatgcaaattcactacatctttctgcataaataacatctttaaaatgtctcaaattagccgttttaaaaaaagtagggtatttgaattccgccttaattaatagattaattttgtttttagcagctctttgtttgtattgtgacgaaatcagctgttgaacagggctgcaaaatacaaacaagtacggcagcactcgacaactccagggatacagtcaccataatcttggcgccaattcaaaaaaattcaaaaattccaattttattaaaaacatagatatatttgctagctaaatgatcatgaggtaacaccaatctttggccttatagcataggttcaggcttgcacatacggaaacacgtaaaattaaatcacgatttaatacacttactaggtggtaaattcatttggcttaggtcagaacattatttataatatccgcttaaatgccatgggcatggctagtggctatagctatgccccgctgatgctgccccattccagagtcataggaacagctggccgctggctccatttgatgcacttccgccggataccagtgactgtgagattccggcaactgatggtaacttagatccgccgaaacatgggtttcgcctcgcgtagtcttcggataagattgcgtatgcagggtttgccaatccatacgggcggatgaggtggttgatgatgatggggcaaatgccaaactccggctactctggtggaactcaaagggccagctctgcaagacagtataatgtggaatgtgtggataaaacaggcataaatcataggagttgtggaaaccgcaggggctatatatggaacaatatgacgacaacccatcccgagacagcgccattgtttgtttacgcaactttgattgtttttagtgcccacccccgcctccacgtctagatctacaataacagcctcattaacggatctataaaaacataaacagccaaacacttgcggacaagagacactcatttgtatgccatacaatgagggattggaaatgggatatagggatgctagggctagcgagcaaatagcgaaccaatgggttgttcccaacagatcatcttgggcgcgtggatggtataaattcggatagggtcgggactctccgatccgatctgatttgccaccatatgggcacaagacggagccgtatttgctgaatttttcacgcattcggtgtgtaaacaattgcatctatttagataagttgtgcacgccatgaatcttgagtgatagattgtgtaaactccagcgggaatggctgatggataaacacggttagacaaattttaattacaataatccgagtgggaaaactactgaggatgacactttccctcgcatgtcattcactgtgtcgcttcaaagcatcaagagcatctttaaaaataaaaaataaaagcaaagactaactagtgccccccatccagatccgcaggtctgcgttaccatctccgttccctgcccgctccaccaacagcctgtcactcatatttaatattttcgaaattcacaaaagtatcggattacaggaaagcaaggcagtctgaaatcacaaaatgtgatttcggtgttctagtggggggcccggctgaatggctgactccggtcatgggatgtggatgtggttacgtttgtggttcacctccacatctagaaaaggtggaaatacttgtcgccgcatcgcgtccgcatcaccaagcagatgttgcaccacattcctttggatttttgatctatatttcgctaaaattgcgttgaattacccctataagttgagtagtattactaaatacttaagttgcttgttaaaaaaaaaatgagaataatagattgcgtatacgtttaaattgtaatagtatcaattttttaaattttaaacactgaagcctgggtttccgtgtaactttccacgatctctaagttaaaattctacgaaaggctaatttcaactagcaaaatttacaaatatctacctactttatttccttaatggcttttcaaagaaaacgcataaaagaaaaattttcattcccaataccaaactttccataaaaagacataaacttatgggaatcccgatcggctgaacattacttctcaattagactgaaatccatgaataaacattgatcttgggcatatcactgggcatcccctgcgacacctgtcattaactgacgagatccacctgaagtggccggctcattaatgcgttcccgttcccccgagccgcgggtgcagtgcatcgttaagtggtggcagtgacatcacttatattcgggcagggggatcgcaattgcatgacacttaccatgccgtgtccgttgttgtggaaattataattgcctccaccggacgaatctgccatgtgacttgtgtccaggccttcggaactggtggtactcgagtgactgtggttgaggctgtggtgctggttgtggttgtgcgggtggttctgcgagtggctgcctgtctccacagccgtaattagctgcttgatgtagagcgtggccaaacgcaacgtgtccaacttggagagcttcgtgtccggcggaatgttgggcagcttggtcttcaaacgtccgtaggcgctggataaaacccgcatacgcatccgctcccgggcatttgccgcatttcgctgcaccggcggttgggagcctggaaaatcagaaatgtagatacatcttaaggagctccaataacaagagattaattagaaacaaaaggttttattggtatccacaaaagttttaagttacattatagatatcttcgcaaagtatgaagttcaaaaagcatatggagtatgaattttaaactcaatttatatctattgtgctttctgttattataatttttatcattattattatattttcatttagagcttaacgcattttaaattaacattccttttaaggtaaattctaaagttcgatttaaaaaattctaaggaaattgaattttactttaaagtaaataataaatttacaaaactagctaaacatatttacattgtcaacgtttttaagcgtttataatacatctttttaatataagtacaaaatcacctataaattgaaatcgaactcactttgagaactggcatcctcatcgaagtcgtcatcaaagaactccgtggggctggaactgcgcttcttgcgtggcattgttcaaaaacaagttggtggtatcacaagaatcacttcgaatattttcaaattggatataaaattccaatcactcagttttctcacttaaaatcgaaacgcaccgaaccgaaaccaatctgtgagtcgaatacgtccgatctgcgtggcacgtagagcacttctgtcacgggttacggggagatcctcctttttgagcattctgctccgcagtttgcagctctccagattccgtctatttctggcacctctggtgggcgtgcctgctccgcaaacagtcccaattggcggaggaatccggacacatggtgcgatcggcggtctctttctcggttgtttgccttctggctgccaccacattggccacacagtgttcctccgtcggtctgcgggaaaattcaaaatgaaacgctcggtttatccggttcactacgggcgttggagtggggatgttgtgccgtaaggatgtgcgacgggcgagtgcgaagcgtgccaagactccggctccagatggcaccacctggtattcgatctcgcagtgcatttggagataggcattaatggcagatcggaagagattataatcctggggttcaactgcgtatcctgtttggggtcgccgcgatggttggcatttgagtatgggtccaaaatttcattgcttatgtggggagttttaagttccgagaacgattttgacttttcaaattttctgcgggaaatgaaaatactcgaaaatatatgtacatatatgtaggcaacactttgtttaatctatagaatttacgttttctttaagtgcttttaaaagaaaagcaagagtttaataaatctatttatatgaatggattaattgaaaccacaacatattagcaagaagcatctgttaaaccgcatctttattgaaactaaaaatttgctcagattaaattgttttttgacctacgtagctgctaactaattttactacttgccacgcctccgaacccagataagaaacgtgctgtgaccctaaaacgtggccttgattagggcctccagtcatggatggaacgtcactggcacagcaggtttatcaggatgctgaaccatgggttatccgatcaattcagcgggagattattatggcggtattgtgtttttaactcgagaattcag

SEQ ID NO: 10325 - DNA, 1066 bp, DROSOPHILA
ctctacgtgccacgcagatcggacgtattcgactcacagattggtttcggttcggtgcgtttcgattttaagtgagaaaactgagtgattggaattttatatccaatttgaaaatattcgaagtgattcttgtgataccaccaacttgtttttgaacaatgccacgcaagaagcgcagttccagccccacggagttctttgatgacgacttcgatgaggatgccagttctcaaagctcccaaccgccggtgcagcgaaatgcggcaaatgcccgggagcggatgcgtatgcgggttttatccagcgcctacggacgtttgaagaccaagctgcccaacattccgccggacacgaagctctccaagttggacacgttgcgtttggccacgctctacatcaagcagctaattacggctgtggagacaggcagccactcgcagaaccacccgcacaaccacaaccagcaccacagcctcaaccacagtcactcgagtaccaccagttccgaaggcctggacacaagtcacatggcagattcgtccggtggaggcaattataatttccacaacaacggacacggcatgagctggccctttgagttccaccagagtagccggagtttggcatttgccccatcatcatcaaccacctcatccgcccgtatggattggcaaaccctgcatacgcaatcttatccgaagactacgcgaggcgaaacccatgtttcggcggatctaagttaccatcagttgccggaatctcacagtcactggtatccggcggaagtgcatcaaatggagccagcggccagctgttcctatgactctggaatggggcagcatcagcggggcatagctatagccactagccatgcccatggcatttaagcggatattataaataatgttctgacctaagccaaatgaatttaccacctagtaagtgtattaaatcgtgatttaattttacgtgtttccgtatgtgcaagcctgaacctatgctataaggccaaagattggtgttacctcatgatcatttagctagcaaatatatctatgtttttaat

SEQ ID NO: 10326 - protein, 242 aa, DROSOPHILA
MPRKKRSSSPTEFFDDDFDEDASSQSSQPPVQRNAANARERMRMRVLSSAYGRLKTKLPNIPPDTKLSKLDTLRLATLYIKQLITAVETGSHSQNHPHNHNQHHSLNHSHSSTTSSEGLDTSHMADSSGGGNYNFHNNGHGMSWPFEFHQSSRSLAFAPSSSTTSSARMDWQTLHTQSYPKTTRGETHVSADLSYHQLPESHSHWYPAEVHQMEPAASCSYDSGMGQHQRGIAIATSHAHGI

SEQ ID NO: 10327 - DNA, 3480 bp, DROSOPHILA
aaagggtatgcgcgaacttttgaaatcctgggtagttggggttggtgatgccctttgttatatagatatccattcttggcatgggcattggaataagttgtctagaagaaataaaaaagtttagatgacttaaatattgattacaactacagtgtattaataacataacataattaaaacatagtaaaagcaataaaatggtttttttcttatttccttttacttgctaaaggacaccactatctccactccactattttctttagttcaactcattatcgtatttataaattactttaagagtcaatttggtatttaacttcatatgtgtttagatgttacattgtccttaacaacacatgaatgaactgacattttgtatattcttaaaatcgagaaacaagaatcaagccgaaaaaagttggtgtaggtgcaaatttttgtaacagaaatatctgaagatagtcaaagttacttgcaattataatttcttgtatttgctttatttaaacgattgtttcgactgttaacaactaaaatgtattccgtttgtttaaaatgttaattattgaatcaatgaagacttacaaggacttcggccttcctgcattcagatgtaaaaattactcccacacatataaagcaaattacacgtttgacgcatgcgcaaatcttggtatatagtgttgttaacaatactaaatattattacaaataatttaatttactaaggaacaaaaaatttattaattatttattatttttttatatgcaaaaactgagaaaacaacttaaaaatcgaaactgaaaatgtctctgagttttaccatggcacaaaattttcttttaatgtaaacttatattattattatttaaggaataggcttaaaactttttgctatgtttttttcaaagttcttaaaaaatcccaatcccaacaatttatgaatacctctgattaaattttttgcactcagtatttttctcattttgagatatggtaacacttaagcacaatgtgatttaaaaaaccataacattgtatataaaagtaatagaaatccaaacacaactagaaaaatgaaataaccgtagacctaactaataagtgaataataatgatattattcaaaggaattcggcgggtgcaatcccagctaagaacgccggttgatttggtgctcattcgggtgaggttcttggccattacgcaacaaaccactataacaaactataactttccaataattttcagtactccactgcagcaacgatagcttcccaagatgacaaaggtgtcactacagcgtcgccagtatcccaggcgggaaaggtccagcatttacccgatagtcaaattacctggatgcctagtccgtacaccatgcccggaaaaactcttagccagtacaagaagctatccaagttccggctgacatgtaagcgagatggttaaacattggccaagcatcgaccatagttgtctttcgttgcagcgctggtggtcattacaacgatgggcggctatgccatggcgccagctgctttcgatcccacaacgtttgcgatgtgcaccctgggcacaggactcgtttcggctgcggcgaatgccattaatcagtatcacgaagttcctttcgattcgcagatgtcgaggacaaagaaccgggtgctcgtcacggggcaaatgacaccactgcatgcagttaccttcgccgcggtgtcggcaactgccggcttaagtatgctgtatttcggagtaaatggattgacggcggcgctgggagcgggtaacctgttcctctacaccacgatatacacaccgatgaagcgtatcagcatagtcaatacctgggtgggatcgatagtgggcgccattcctccgctgatgggatgggctggttgtgcagccaccctggacgccggcgccatgatcctagccggagtgctgtacgcgtggcagttcccgcacttcaacgctctgtcgtggaacctccggccggattattcacgtgccggctaccgaatgatggccgttaccaatccgggtctttgtcgccgcactgcgctgcgatattcggtggctattgtcggactttcagccatggcacccgtactggacgtcacgaactactggtttgccttggaaacactacctctgaacgcgtacttcgcctaccttggtaaatatactcattaaccatggaatcctatatgttatgtctaatacgttctgtttgcttgcagcgtacaagtttcatgaaaagtcagatagtgggagctcgcggaagctgttccgattttcactgatacacctgcccgccctgatgctgctatttctgaccaataagaaggaatggtatttcagcaaacccgccggtgaggagaacaaaaaggagtccacgtacagtgcgataaagcattctgctagcagtcttggtaatgtcctgcccgtcgccgtagccgaaggacccagatagaaatattaacattaatttgataaaatgttaagtatcgtgtgaaatttaaatatacttagtgttctgcaacttgtaaaaacagtcatttaatattaaggaaacacgtacccctgtgcggcaaatatatgttgcgcctaataaatgacacgacatccttgaaaaatatgcggtgtaaccaatccggcgctgaatacaaataaatttaaaatatacaatttggcatggaatcttaagccgtacagtaatttaaattgcaagattctaagtatgaccttattatattgttctttgagcacttgtttcaaaaaaagcacggaaacggtaaaaattgttagtggaagtaatcccgtttcccgttgtttcatcggttgttgaaaataaggaatttaaatctattttattttgataaattgtagcaatcgaatcgaacgtattatttaaggcattgtaaggcatctcttcttcagattccagagtttattcctttggagggttttttttccaagattaaaaaacgacatgcgcatttcctagggataagtattctagctattttaggaactatattccgcaattgaaataattttaataataatagtaaaatccgtcagataaatagtcaaaaatttctagctaaaaatgagtatagctgtacgttatcgataacagaaataccaaaaagttgcccctatttcagtatatttcactggttcctctgctgtatgcgttggtcttacaaatgaaaagaacaatattttgtattgtgttgcaatagccttgatgttttatcacagaagcacattagcataatcactgatttatcgcgatgccgagatgaatcatgcagctaacgcgactatcgctggagccctcgtttggtaatttgaacgggaaactagatcaaatgagcgaaaaatctgtggcgaaccactggagtgaattatttttagtgagctgaacgtggattgtgacaatgaaaaattgaggaatagtgtttaca

SEQ ID NO: 10328 - DNA, 1294 bp, DROSOPHILA
gtaacacttaagcacaatgtgatttaaaaaaccataacattgtatataaaagtaatagaaatccaaacacaactagaaaaatgaaataaccgtagacctaactaataagtgaataataatgatattattcaaaggaattcggcgggtgcaatcccagctaagaacgccggttgatttggtgctcattcggtactccactgcagcaacgatagcttcccaagatgacaaaggtgtcactacagcgtcgccagtatcccaggcgggaaaggtccagcatttacccgatagtcaaattacctggatgcctagtccgtacaccatgcccggaaaaactcttagccagtacaagaagctatccaagttccggctgacatcgctggtggtcattacaacgatgggcggctatgccatggcgccagctgctttcgatcccacaacgtttgcgatgtgcaccctgggcacaggactcgtttcggctgcggcgaatgccattaatcagtatcacgaagttcctttcgattcgcagatgtcgaggacaaagaaccgggtgctcgtcacggggcaaatgacaccactgcatgcagttaccttcgccgcggtgtcggcaactgccggcttaagtatgctgtatttcggagtaaatggattgacggcggcgctgggagcgggtaacctgttcctctacaccacgatatacacaccgatgaagcgtatcagcatagtcaatacctgggtgggatcgatagtgggcgccattcctccgctgatgggatgggctggttgtgcagccaccctggacgccggcgccatgatcctagccggagtgctgtacgcgtggcagttcccgcacttcaacgctctgtcgtggaacctccggccggattattcacgtgccggctaccgaatgatggccgttaccaatccgggtctttgtcgccgcactgcgctgcgatattcggtggctattgtcggactttcagccatggcacccgtactggacgtcacgaactactggtttgccttggaaacactacctctgaacgcgtacttcgcctaccttgcgtacaagtttcatgaaaagtcagatagtgggagctcgcggaagctgttccgattttcactgatacacctgcccgccctgatgctgctatttctgaccaataagaaggaatggtatttcagcaaacccgccggtgaggagaacaaaaaggagtccacgtacagtgcgataaagcattctgctagcagtcttggtaatgtcctgcccgtcgccgtagccgaaggacccagatag

SEQ ID NO: 10329 - protein, 391 aa, DROSOPHILA
MILFKGIRRVQSQLRTPVDLVLIRYSTAATIASQDDKGVTTASPVSQAGKVQHLPDSQITWMPSPYTMPGKTLSQYKKLSKFRLTSLVVITTMGGYAMAPAAFDPTTFAMCTLGTGLVSAAANAINQYHEVPFDSQMSRTKNRVLVTGQMTPLHAVTFAAVSATAGLSMLYFGVNGLTAALGAGNLFLYTTIYTPMKRISIVNTWVGSIVGAIPPLMGWAGCAATLDAGAMILAGVLYAWQFPHFNALSWNLRPDYSRAGYRMMAVTNPGLCRRTALRYSVAIVGLSAMAPVLDVTNYWFALETLPLNAYFAYLAYKFHEKSDSGSSRKLFRFSLIHLPALMLLFLTNKKEWYFSKPAGEENKKESTYSAIKHSASSLGNVLPVAVAEGPR

SEQ ID NO: 10330 - DNA, 3478 bp, DROSOPHILA
atcctactcgatctcgatgatggcgcccgccttggacagtgcctccttgagtttctcggcctcctccttggggatgtcctccttaacgatggtcggtgcgctctcgacgaactttttggcctgcaccaggttcatgccctcgagtaggttcttcacctccttgatcagcgccaccttctgcttttcgtcgaacttgaccagcttgaccttgaaggaggtctgtaccttcttgggcgctgcctcctcctcatcctcggcgggagcagcacgtgccggcccagcggcgaattgtggggcaaatgcggtctcgggcaggttcagtttctgtttgagcagggtgctcagctcggccacctcgaggagattgagcgcggcaatgttgttgacaatcgagtccagtttgggattgggtggcttggcggctccttccggcgcgggaggcaccagtttttccgcacccgagactgcggcggccggagccgctgcactgtacatgcgatgcagctgcacttggcgcgaaatctggcgaagggcgaggcgtgtgatgtgcatcttattggtatctgcaagtcttaagttagaaaagcgttcaactatcatttaatatccatttacttacggttttcgggtgacaaaataaattctttgggccgcagcagcaggttatgtgagcagtttatcgataaacagccagggctgcattcaacatatttggttgaacggcagtgccatgcttaaataaaaccatatggttggaaaagtaacgtttaaataccgctaaataaataatttaatttacaattgttttttgcttgtttttgcttgttttgcatggaaatttatttaaaaaataaacaggtaagaacctttgaacttgattttcatttaagaaagttcttccattttctagcataattttagatgtaaatgtataaaatgtattgtataaatgttaattatatttgttttatttcctatgcttgtaattcgattacagagtttacaaagagtacacctttacgtagtcgatcttcatgtggccctcgtccagccagtggtccctgatcttcttgacttccttccaaaaggctttctgcgcctgcggcgccctctcgttccagggtttgatctcgtgctggtactcgttaaaaccgcccacgctgagtccgaaggtcaagtagaactcctgatcgaagggtgccagtccagtgccctcctccagtttctgggcctgcggtaaactctttccggcggcagtcgtctcgctgaaagaccctttagcacttccctggacacaccactccttgccgtccaccagccagcgaagttccctgggtgtccattcgagggtgtaattgtggaaactatcgctccagtcctcggagttatttccagtacctggcttcaggcaattcttgaccgatcgcagcggctcatctgcaaagagcacggcggcgccatacaaatccagattacctccattcggacgggtataagcgattctcagctgtcccgaccgataatcatccactccgtagatcggacgcctgggctgcagccagatttgtggagtcacccactgtgcccgcggcattttggctcgcacctccacgcgaccatacttgaaggagaaatccttggaggagaactgagcggtgaccattggcggaagtccgtcatttagggttcgcccatttcttacacagtcgtgggtattcgcttgtcccgtacacttttcacccagatccaaactttcacccgaacccttcttgaattgttttttcattgtgttcgtcgagagcaccacatgaccattggctaagcacaaggtttccggagcgtcatccacgtacacattaaactcgtagtcgggttgaccggaaaacctgcgttccgctttccacttattgggatccagctttgcagcattgaactcatccacgaacaccagctgcccggcacagcgagtgggtgctccattgacctcggttttgggagtagtacaacccaaccttatgtcgatatccggatcggcaggtggagtccagggcgttgtggagactggaaccacaggtggatgtggtgaggcattattaccactgtacccattgaccacaaacgacccgtcgtcttcgcgataacccagtccgttgtagataacgtatgtccagtagtacagggtgtcgccaggctttagagccgtaatccggtcccggaaggtccagcgtccgtttttcgctttgacaatgtcccgtgcccaggtgccagcctccaggccctccatctcctcatttagtttgccatggaaggcgaacagggtgatgccctcctcatcgggaattgagacctcgaatcccttgggatagaaaacatcgatcttagccttgggtacttcatacccctgaacgccaaggagcaggaacagcagttggaggcagcagctccaggccacaaagcgcaatgcatccgccattgtgggaataccaattaaaactgcgatgagcggtcagacaactcggacttgaaaatctgagaatcttatcaagaaccggtcgaggcttgtttgttaaaggtgcactgcaaaaaagtacacaccgtaaagtgctatcgcagattctaaagtctaaagcctatgttgaagcaagtatgtgccatcgtagctaaaaataacaatgggcgatttaatcaagaaaataaaaagtaaaatacaataattttggtgtttttatatataaatatctttaatggtagtattttctaagtgtaatatttatttgagatttttttgccaatgtttagagaagagcgacaacactcccacaagaagaatttgggatttacccaatcacagccattgagagtaagcttttagaagtatgagtaagaataaagaagaacatacggacaaaatgtacaaccttctattaaagatgattttagagattttaaaaagcccgcttaataaacagcgaagttgcccaactctaacgtgtcagctgtttgtggtattgtggtatatcgataactttgcttgcggtatatcgctgtagtaataagggcataagggcatatcagtgaaagattaaatttttttgttaatagtttccattgttgccattaggtaaatatttaaacaatacttctattctgaaataataagcttcgccgtgtagcaggcgacgaatttcgatgaaattctgagtctcgtccgtttccttgtcttattagctttcgttctctcgatagaaaaatttgtagaaaatatcacacacgggaaaaaacaaaaacatgaacatatttttgtaaaatatttaattagcgagaaggacacagcgtacacgtatattttgtggtttcgcatgttgttcgtcagtgtttttgtgcaattatttgaaagatttggccaaacgcgaaacgcaacagaaagaggagaacacaataagacaataacaaattcgcagcgcgtgtgtcgttgaat

SEQ ID NO: 10331 - DNA, 1478 bp, DROSOPHILA
ccacaatggcggatgcattgcgctttgtggcctggagctgctgcctccaactgctgttcctgctccttggcgttcaggggtatgaagtacccaaggctaagatcgatgttttctatcccaagggattcgaggtctcaattcccgatgaggagggcatcaccctgttcgccttccatggcaaactaaatgaggagatggagggcctggaggctggcacctgggcacgggacattgtcaaagcgaaaaacggacgctggaccttccgggaccggattacggctctaaagcctggcgacaccctgtactactggacatacgttatctacaacggactgggttatcgcgaagacgacgggtcgtttgtggtcaatgggtacagtggtaataatgcctcaccacatccacctgtggttccagtctccacaacgccctggactccacctgccgatccggatatcgacataaggttgggttgtactactcccaaaaccgaggtcaatggagcacccactcgctgtgccgggcagctggtgttcgtggatgagttcaatgctgcaaagctggatcccaataagtggaaagcggaacgcaggttttccggtcaacccgactacgagtttaatgtgtacgtggatgacgctccggaaaccttgtgcttagccaatggtcatgtggtgctctcgacgaacacaatgaaaaaacaattcaagaagggttcgggtgaaagtttggatctgggtgaaaagtgtacgggacaagcgaatacccacgactgtgtaagaaatgggcgaaccctaaatgacggacttccgccaatggtcaccgctcagttctcctccaaggatttctccttcaagtatggtcgcgtggaggtgcgagccaaaatgccgcgggcacagtgggtgactccacaaatctggctgcagcccaggcgtccgatctacggagtggatgattatcggtcgggacagctgagaatcgcttatacccgtccgaatggaggtaatctggatttgtatggcgccgccgtgctctttgcagatgagccgctgcgatcggtcaagaattgcctgaagccaggtactggaaataactccgaggactggagcgatagtttccacaattacaccctcgaatggacacccagggaacttcgctggctggtggacggcaaggagtggtgtgtccagggaagtgctaaagggtctttcagcgagacgactgccgccggaaagagtttaccgcaggcccagaaactggaggagggcactggactggcacccttcgatcaggagttctacttgaccttcggactcagcgtgggcggttttaacgagtaccagcacgagatcaaaccctggaacgagagggcgccgcaggcgcagaaagccttttggaaggaagtcaagaagatcagggaccactggctggacgagggccacatgaagatcgactacgtaaaggtgtactctttgtaa

SEQ ID NO: 10332 - protein, 490 aa, DROSOPHILA
MADALRFVAWSCCLQLLFLLLGVQGYEVPKAKIDVFYPKGFEVSIPDEEGITLFAFHGKLNEEMEGLEAGTWARDIVKAKNGRWTFRDRITALKPGDTLYYWTYVIYNGLGYREDDGSFVVNGYSGNNASPHPPVVPVSTTPWTPPADPDIDIRLGCTTPKTEVNGAPTRCAGQLVFVDEFNAAKLDPNKWKAERRFSGQPDYEFNVYVDDAPETLCLANGHVVLSTNTMKKQFKKGSGESLDLGEKCTGQANTHDCVRNGRTLNDGLPPMVTAQFSSKDFSFKYGRVEVRAKMPRAQWVTPQIWLQPRRPIYGVDDYRSGQLRIAYTRPNGGNLDLYGAAVLFADEPLRSVKNCLKPGTGNNSEDWSDSFHNYTLEWTPRELRWLVDGKEWCVQGSAKGSFSETTAAGKSLPQAQKLEEGTGLAPFDQEFYLTFGLSVGGFNEYQHEIKPWNERAPQAQKAFWKEVKKIRDHWLDEGHMKIDYVKVYSL

SEQ ID NO: 10333 - DNA, 6571 bp, DROSOPHILA
gtgaggagaacaaaaaggagtccacgtacagtgcgataaagcattctgctagcagtcttggtaatgtcctgcccgtcgccgtagccgaaggacccagatagaaatattaacattaatttgataaaatgttaagtatcgtgtgaaatttaaatatacttagtgttctgcaacttgtaaaaacagtcatttaatattaaggaaacacgtacccctgtgcggcaaatatatgttgcgcctaataaatgacacgacatccttgaaaaatatgcggtgtaaccaatccggcgctgaatacaaataaatttaaaatatacaatttggcatggaatcttaagccgtacagtaatttaaattgcaagattctaagtatgaccttattatattgttctttgagcacttgtttcaaaaaaagcacggaaacggtaaaaattgttagtggaagtaatcccgtttcccgttgtttcatcggttgttgaaaataaggaatttaaatctattttattttgataaattgtagcaatcgaatcgaacgtattatttaaggcattgtaaggcatctcttcttcagattccagagtttattcctttggagggttttttttccaagattaaaaaacgacatgcgcatttcctagggataagtattctagctattttaggaactatattccgcaattgaaataattttaataataatagtaaaatccgtcagataaatagtcaaaaatttctagctaaaaatgagtatagctgtacgttatcgataacagaaataccaaaaagttgcccctatttcagtatatttcactggttcctctgctgtatgcgttggtcttacaaatgaaaagaacaatattttgtattgtgttgcaatagccttgatgttttatcacagaagcacattagcataatcactgatttatcgcgatgccgagatgaatcatgcagctaacgcgactatcgctggagccctcgtttggtaatttgaacgggaaactagatcaaatgagcgaaaaatctgtggcgaaccactggagtgaattatttttagtgagctgaacgtggattgtgacaatgaaaaattgaggaatagtgtttacattcattttataatttattttaccagttatcttttttatcgcgataaaggagaggcgtatgaaagtttctttacacagtgcaaaacgaatataaatttctaattatgaataatgtaccacataagtttcgtcaagtttgtcgattgtgcctcacattggttaacgagtgcgatgttgcagtactacagatttacgataattcgtcgcataataatagtgccccagacagaatatcggccgattttcgtggcgtcgcgaatcgtgccaactgcttttgcagcgctttaagccccaatccgtgcagttgcatcgttgataacccgctatcagccaacaaaaatgaacggcgcaaccagggaacacccgtacccgtgcccatacccatacccgtttccgtgcctgtgcccgttccaagccagcagatccaatcgcaaacccttcaccatcaccaaaaccaaactaaaatccattacacgccaagtgtgccttctgctgcggacgcaaagtcgagtgagcgcgaacgccaatgccaattggagtcggacatcgccgagagatcaacagtattcaaaagtcagtcatcgtcggatcacgaacatatagaatatagcggggagacgccatccccctccgcatcgctatcccaatcccaaacaaaatcggagccaatgcgcgaggaggaggaacatcagcataatcataatcagcagagcggacgcgaagagacaagtgtgaatacaacaaatataagcggaaccgataactacggcaaagagcacggtcgggatgattcatcatcaccacatcttacatttcagatattcaactgtctctctattaaggtaagcagatttccatccaacacatttgcaaagaaacgaatttacattaattacgcacatacacaagcatgctcttacctgtgtgtgagttggatatatcgcgtatatgtacacgataatgcccgcacacacgcgcacttttgcgagtgcttgccgtgcgctggtgtgtgttatctatgtgattacgacaccacacgtcaaaataataggaaatgattgggccgcttttatcccatggcctattaacaatcggtatcaattgtttggtattttttcgatgaaccattgcaaggcattggcccaggcccacgcacaccacgccacactcgtacatcagtgtccagcgcacgaatgtaaatattgctatgtacatacgtgtgtgtatatgcacgcatggatgtatgttagagacctacatacattaatccaccaaagagataacattcgtttcgattgtttaagtgcggatataccgacgtacatacaccttatatggccccaatgtgttttttttacatacttcgagtactttcatttgttattatgtatttatttatttattgatttgataatttgtgctcttaatgcatttcatgagctttagtgtttatttccgtagatgaacatatgttatttttttttttttttatcattttatagggttgtttttaatttttttcaattaaaataatttgtttcatgagatttacagagatataaattgtatactaaagttttaatacatgtataatgataaaattgattaaaatacaaatagttttagcttgatttatacaatatcaaagcatccaatgttcttcttttagttccaagtataaccagtcatcaatcccatcgatcgattttgttaccgccttgctccttagtcattgcatcattctcattgctagccaactgaatattaaaagtggatactgcagtataagatacattcatatttctttcaggcactgcccaacgatggattacccaacgtggtttgtggcgactgcagacaaaaattggattccttcgaaaaatttcgaaccatggcgcacaattcacaaatagctttgaaagaatttttaaatatatccaaaaatctgagaccagtaagtataagtattgattggaaggaacttagttagtcatacgccattaaattaaatgaccatttgaattactactcacgaactatgttttttgcaggacccaaatgatttggaaaccaagctcgatgcaattttaaaggcttcatcggaggctatagcggcaaaggctctgacggagttaagcacgttctctaaagttaagtacgaccacagtaaattggattccagcatccaacccggcttggatcggaaaatcgagattagcaatcaagaaatgccagcacatagcttatatccaagtttattcaaatcaattactatgaaaagcgatcaaaagagcaaagcaatgtctggatcctcacacagccagtttgattcaaaactgcaaaaggactcggatatcgagaaatatgaaaatctgcagcagcagcttgaaacggctgccgttttaatggatataagcaaaaaaatagtaatttcccctccatgttcgaatccgcaatctccgtgtttttctgcagctgtagatacaagtattaaaagttctgtgataaaatcaaaacgtccatcaaaccaaaatgaaattcaggacggtgttgaaattgacctatccgtcaaaaaacaaaagaacgattactctaatcaacggaacgcggccccaatacaccatttttgccaaactccaatgcttgatattcagtcacacttaagaagtgaagaggattttcaaaactacagtattaccattaaccaagttggtgggtccgacttcaaatcaaaagcacccaaggcgagtaccggctccttgctagactctggcgatagttccgactctcacaaactagagatggacatcacgtcctccataaatgatagaaagactccggatagcttaagctcggatcacgccacagatgcggcaactactcaactctggcaggcactggccagatcagccggtacgtattattatccgaccactgaccgcatattattatgaaaaacatttcaatttgatagctaaaagcaaggaggacaatccggcatcacaaatatttcgaaatatgatgagccagcctttcgcgtttccggttccgtcgacagtatcatttacaaaagtacctgaagaacccatagcactattaaaggtaaactatttcttctatttcaagtagcaagtagctataggaaagtctaatactctttgtgttcttaggatctatcagaggctcaatccagcaaatcaaaaccatgtagaagaaaacaaagttttcctaccaaaactgattgcatcgatgtagttaatgagaatgtgactgatacttataccacttcagaagcaactccggatgataagaaagataaaagggtacgttatcacagtcatcctcattgaatcacatactaattatattatttcttggttcaattccgatttcgtagaacataaacctttttaatgccatacctggtgctcaaaaagatatgtcatgttcgaattgtggcaccctcaccacaacaatttggcggcgaagtgttcgaggagagatggtgtgcaacgcctgcggattgtacttcaagctgcatggggtcaacaggccgcattcaatgagacgcgataccatacacaccagacgcaggcgtcctaaagaattggagcgatctaaaaagagtgagtgagagttcgaaatttatctacatttttcgattcgaaagctagccctctgtgacccatagatttatttattttttgagtatctaacaatgaaaacaatttgtttacttaatgttttttttttatgttccctgaccattttattgttggtaattaaatgtaacttgccaaaacaatttatttttctgttaatatgttcattaagctattgatttagcaatcggaatattaaccgcgtacccacccaaaatattttcttgcttgtccaatcatattttatgatgtcattgttgtagatggcattggacgtgcctgttaagtcgttaaactgctcaagtttgaataaatatctacgagcctttcattattaattgtatgatttatttgcgaaaattataaatatacactttcttttgcagaacacaaacaaatgtcatcatgttcttcaatagaaacaacgaagcaagatttcttgacggctagggaatctctagccatttcgggccttgttttaaatgtatgtatctgcactattactttaaagtcttgataagtagattgatcaactagatctatttgcataagatttaaatacacttaaacttcaattttctaatatgtttttattttagaaattcaaaaaggaaattgatgataccgagaccccagccgcagcagcacttaaagatattttatcaaggcgtaagaagtcaaattctttgccggcgtttaatgatacctgtgaaagtgcggatctatccgcaccgcttaaccttgtttccagtgaaaataatgcaaagttaacataaaacgccaaatatattccccctactcacttttcgaaaaaaaaagaagaacctttaacccacattttgtttatttatgaggtcgcgtaagagagaaaaacaaatggtataggattaaaaatacgtatagattattaataaaattttcattctttaaaactaaattttattcatttgtatctttaaaaactaataccaaaatacttattagtgtaaaagaggtatgaaaattgaaccagtatgtcaaaacttttaaataatatcacactaaatatagaccttaagagaggacatcaatacttaatgcaattaaattaaaaataaaatttattatatttatatttattaaaaccattttacagtatttttaattttttaataacacaaatcgcttctattaaaatgaaaagttcagttttaacaatgatttttcagctgtctttgcaattgaacaacttctaaagctaaaaaataataatgttttaaatctcttgcctatacgaaaatcatgtgataatataataatctccacaaaacattttaatagtaaaactatgcaaaaagcaataatcacgcaatgcaaacttttcaaggaaatatttaaattatatacaattataagaaactaaaaaacttaatgctgttttcgaatctacataaattgtctaaataaaataaggacttcataataggctaagatacaaaaaatattactcatttattttttcaaataaaatactctatacaatttttaacaatcacaataaaactggttaatgtaaaatgaaaatccaaattctactgtttttttttaactatttgcctggggtatgggataagcaaccgaaaaatctgttaaactaatgatgagaatttgaaaaaatatatattaaagatatttaagtatcttaattcgaatagaaagggacttacatttttaccgccgactgttcaatgagaaatgctgtaagtggaaacatgctgttagactcccgaattatcgatgtagtacaacaagcactcgcatcgatagtcc

SEQ ID NO: 10334 - DNA, 2439 bp, DROSOPHILA
atcaaatgagcgaaaaatctgtggcgaaccactggagtgaattatttttagtgagctgaacgtggattgtgacaatgaaaaattgaggaatagtgtttacattcattttataatttattttaccagttatcttttttatcgcgataaaggagaggcgtatgaaagtttctttacacagtgcaaaacgaatataaatttctaattatgaataatgtaccacataagtttcgtcaagtttgtcgattgtgcctcacattggttaacgagtgcgatgttgcagtactacagatttacgataattcgtcgcataataatagtgccccagacagaatatcggccgattttcgtggcgtcgcgaatcgtgccaactgcttttgcagcgctttaagccccaatccgtgcagttgcatcgttgataacccgctatcagccaacaaaaatgaacggcgcaaccagggaacacccgtacccgtgcccatacccatacccgtttccgtgcctgtgcccgttccaagccagcagatccaatcgcaaacccttcaccatcaccaaaaccaaactaaaatccattacacgccaagtgtgccttctgctgcggacgcaaagtcgagtgagcgcgaacgccaatgccaattggagtcggacatcgccgagagatcaacagtattcaaaagtcagtcatcgtcggatcacgaacatatagaatatagcggggagacgccatccccctccgcatcgctatcccaatcccaaacaaaatcggagccaatgcgcgaggaggaggaacatcagcataatcataatcagcagagcggacgcgaagagacaagtgtgaatacaacaaatataagcggaaccgataactacggcaaagagcacggtcgggatgattcatcatcaccacatcttacatttcagatattcaactgtctctctattaaggcactgcccaacgatggattacccaacgtggtttgtggcgactgcagacaaaaattggattccttcgaaaaatttcgaaccatggcgcacaattcacaaatagctttgaaagaatttttaaatatatccaaaaatctgagaccagacccaaatgatttggaaaccaagctcgatgcaattttaaaggcttcatcggaggctatagcggcaaaggctctgacggagttaagcacgttctctaaagttaagtacgaccacagtaaattggattccagcatccaacccggcttggatcggaaaatcgagattagcaatcaagaaatgccagcacatagcttatatccaagtttattcaaatcaattactatgaaaagcgatcaaaagagcaaagcaatgtctggatcctcacacagccagtttgattcaaaactgcaaaaggactcggatatcgagaaatatgaaaatctgcagcagcagcttgaaacggctgccgttttaatggatataagcaaaaaaatagtaatttcccctccatgttcgaatccgcaatctccgtgtttttctgcagctgtagatacaagtattaaaagttctgtgataaaatcaaaacgtccatcaaaccaaaatgaaattcaggacggtgttgaaattgacctatccgtcaaaaaacaaaagaacgattactctaatcaacggaacgcggccccaatacaccatttttgccaaactccaatgcttgatattcagtcacacttaagaagtgaagaggattttcaaaactacagtattaccattaaccaagttggtgggtccgacttcaaatcaaaagcacccaaggcgagtaccggctccttgctagactctggcgatagttccgactctcacaaactagagatggacatcacgtcctccataaatgatagaaagactccggatagcttaagctcggatcacgccacagatgcggcaactactcaactctggcaggcactggccagatcagccgctaaaagcaaggaggacaatccggcatcacaaatatttcgaaatatgatgagccagcctttcgcgtttccggttccgtcgacagtatcatttacaaaagtacctgaagaacccatagcactattaaaggatctatcagaggctcaatccagcaaatcaaaaccatgtagaagaaaacaaagttttcctaccaaaactgattgcatcgatgtagttaatgagaatgtgactgatacttataccacttcagaagcaactccggatgataagaaagataaaaggaaattcaaaaaggaaattgatgataccgagaccccagccgcagcagcacttaaagatattttatcaaggcgtaagaagtcaaattctttgccggcgtttaatgatacctgtgaaagtgcggatctatccgcaccgcttaaccttgtttccagtgaaaataatgcaaagttaacataaaacgccaaatatattccccctactcacttttcg

SEQ ID NO: 10335 - protein, 733 aa, DROSOPHILA
MNNVPHKFRQVCRLCLTLVNECDVAVLQIYDNSSHNNSAPDRISADFRGVANRANCFCSALSPNPCSCIVDNPLSANKNERRNQGTPVPVPIPIPVSVPVPVPSQQIQSQTLHHHQNQTKIHYTPSVPSAADAKSSERERQCQLESDIAERSTVFKSQSSSDHEHIEYSGETPSPSASLSQSQTKSEPMREEEEHQHNHNQQSGREETSVNTTNISGTDNYGKEHGRDDSSSPHLTFQIFNCLSIKALPNDGLPNVVCGDCRQKLDSFEKFRTMAHNSQIALKEFLNISKNLRPDPNDLETKLDAILKASSEAIAAKALTELSTFSKVKYDHSKLDSSIQPGLDRKIEISNQEMPAHSLYPSLFKSITMKSDQKSKAMSGSSHSQFDSKLQKDSDIEKYENLQQQLETAAVLMDISKKIVISPPCSNPQSPCFSAAVDTSIKSSVIKSKRPSNQNEIQDGVEIDLSVKKQKNDYSNQRNAAPIHHFCQTPMLDIQSHLRSEEDFQNYSITINQVGGSDFKSKAPKASTGSLLDSGDSSDSHKLEMDITSSINDRKTPDSLSSDHATDAATTQLWQALARSAAKSKEDNPASQIFRNMMSQPFAFPVPSTVSFTKVPEEPIALLKDLSEAQSSKSKPCRRKQSFPTKTDCIDVVNENVTDTYTTSEATPDDKKDKRKFKKEIDDTETPAAAALKDILSRRKKSNSLPAFNDTCESADLSAPLNLVSSENNAKLT

SEQ ID NO: 10336 - DNA, 2193 bp, DROSOPHILA
tgatattctttgtagttgctttaaataacatgagatgaaatcgttaattggcataacaaattgaattggttaaaggaaaatatgttatagatattcgaaatggtttattacaataggggttatataacctagtatatgaccaaaacatatttctctactgcttcggatttatcaaccgattatcgatccaataccaggacaattatattttatatctccagtttattccaaatatactatatatttaaatccttgatcaatgctttttaatatacattaatttgagaataaaataattagcttgtacacaaattaaacgataacaaataaataaaaaacataataagttcacattttatagaatcttttattctttttctcacaacatagaatgttgtttaattaatatttattacattatgattcacattggaatcagcatctttttgggccacagcgaagccaataagcagcaaaaaataacccgcaaggaacttcatgtctatcagaagagaatagaaataaaacacagacccggtttttatatagtttataagccaagtgttgcataagccaagcgaatcgtttaattcttttaaacggtggccaattttaatatcgttaaatcatttttctttcggtcgtacgaaaatcaaatcttttgaatattacatttggtaaaattggttttgctacatttggttttggtacatttggttttggtacatttggcattggcacctttggtttcggtatcagcgctttttgaaacacttgcgtttttagcataaaatatatatattaaaatttatatttaatataattaggcaaaaacatctgatatactgtcagattgtgactagtcgtaaaagccatgaccattaataagttttggccaaacaaagcttcgaacaaaaggtttatgaaaaaatatatatggtatattcttgtatactaaaatagatttaatatttcaacttaaaataaaataaataggccattgctattacatgcaaacaattaagtaaatgttttattgaattctgtgcctgcaattatcaaaagctcatttactttgcggcgctgggactattgatgtggatcacattcttgttttcgttggtgttcggatccgcagattgggcgaaagccacaccggcaaagagcagaacaagtgcagaggtgatcttcatgtcggccagttggaattggaagtaatgacaagctaggggagtgctcttcttataaggcctgggttgcgtaagcgatactaatctaaatgccagacaatttgaaattaattgcacgatgaaagaaaaagaagtggaactaattccttaaacccgagacataatagaccgattacaatttaaataacacttgattccttttgtcaatctgacaaacatttatataatctgaacttacctggcacggcgatagaaatctttcttgatttcataaaattagtattagtctttagcaagcatttttaaaaagcacgccaatgaaatttactaagccgaaaaaaaaagtttcttcttgaattcaaattcataatcacacctgtttcagaaggatatgagaaagcagttgtctggttactatctaccacagttctcaatgacttgtcgtgataacaatagtcagttaaaataaaattattattttcccaacaatattgggaaacgtaaatgaaatttactgaaccgaagatacctttttgttgtttgaattccaattcataatcacacctgtttcagaaggatctatgacagcagtggtctggttactatctactcccatgtctggttggggtttcaaaagtcagtccatgtagtttaatattgtaatacatagattaaacactctcataaacatatattgtgattagcgatccattttattagaagaaaataacctctgactcataatatttaactttcggctggagcatctgcgagtcctgcttcaggagcagctggagctgcggcaggagctgcggcaggaggtgcggcaggagcagcagcagctgctgcggcaggtgcagctcctggcttcttggcaccgatgacgatgacgttgtgatttgtattctggctcttttgggcgctaaccaaagccagaacaaccagcaaagtgacgaaaagagctaggaacttcatatcggccagttggaagtcaatttaaaag

SEQ ID NO: 10337 - DNA, 193 bp, DROSOPHILA
atgaagatcacctctgcacttgttctgctctttgccggtgtggctttcgcccaatctgcggatccgaacaccaacgaaaacaagaatgtgatccacatcaatagtcccagcgccgcaaagtaaatgagcttttgataattgcaggcacagaattcaataaaacatttacttaattgtttgcatgtaatagcaa

SEQ ID NO: 10338 - protein, 40 aa, DROSOPHILA
MKITSALVLLFAGVAFAQSADPNTNENKNVIHINSPSAAK

SEQ ID NO: 10339 - DNA, 2866 bp, DROSOPHILA
cgattgaaaaatcagggaagctagatgtgtgattttctcgttgcgttgtcatagggaaattccgatatgaccaccaagtactcaccttatcgcaaaacaggctgataaaatgttttaatgggaaaaccaatgcctccagcagtctttcgtcactatatatagcgtggaaatcggggtaatactttagttcagaacggaaatcgctttggaaacatgccaccaccaccgcaccagccccaccaaccgcacccaccgaagggtcctgcgcatcctggggatcaccaaccaggaccgcatccccctcaccacggagatccgaagccccatcacggacatcactaggcccatggacaaggactataaataagattcaattttatacagaacaaaacaagatggatactttttagggaacttagtttctaatagaaagtcttaaaaactcttcaaaccaaagaaataaaagcctgtacaaaatacatagctctactcttttctatatcttcaatgtttatgatcttgaattggtgatactgcttaatgcattctaagcttccattaatttgaacaaagcatacatatgatttgaagatctaaatgctttttaaattataatacacgtcctaagtgcaacgtactaagcttaagaatttgttgctgattgttgctgattgttgcttacaaaaataaaatattataacatctccatattgttgtacttatgaactacatgcaaagtcgtcattaacttattctttaagtcacatatagacatatcagtaaacaattcgcttgtttgttattactaatttcgaatgtcatacatttgtttttattgagcgaagtgttgttgtgggaaaacccgaaacttacttatcaaccgaactgggctcgtcttatctgaaatttagataagattacaacgtattcgaatcattttcctataaatggtttgacaggataggctttagcttagtactcaactaaagtcagaaaagtcaagatgccacctccaccgcaccacgaccaccaccatcatcatgggccaccacaccatggacctccccaccatgggccaccgcaccatggtcctccacaccacgggccaccgcatcacgggccaccacaccacggaccgccgcaccatggacctccgcaccacgaccaccatcatcatggaccaccacaccacggtcctccaatgcatcctcgatgagaactataatacaatataagccgaatttaacgttataaactgatatggaaaaacttaatcgttaactgtgattaagccacaaactaacattaaaatatcttcactaacttctagttagtttcaccaagagcaaaatgtttttattttagaaattgtttaattttataacaccattataaagatactgattctaataagcaattagaagaatattgaagcaagaattgattaagtatgattaagtatcaaaaagccagcagataaggtagacaattatatataaaagaaagtccctctccactagaatgcagataagattacagcctactgaaactatgttacttttgtataaaaggtctggcaggagtgagccagtttagtgtacaacagaagcccgccaagcaaagatgcctcctccaccaccgcaccaccaccacaacccgccgcctcatgggccaccgccccacggaccaccgcaccatggacctccgcaccatgaaccacagcccccgttccacacgccagtgcatccgatttaccacgaacctcctcacggaaacagctccggctacaatcctccgccgccgcatggtccgtatccatatggtccaggatacgtggccccaggacctccaatgcatccgcgataagaactgaactgtaatctagatcggttaatatagtgtgatatcaacaaatgtacatttgtgtgtgattaaaaaatatgctgcttttaaatatataaactaactttagttagtcacgcctatgtgtgattcaagttttattacttgtagcttctatgccaacaaacaatcccatttcgagtatgatgatatatgcgcctaataagataaggacggttttttggaattcccataggaccgtcataaagataatccattgaaaaagtcgtcattctttaggtgcgttatgatagcttattttcgggtactatcaaattcttgaggtaacacgtcattactaatatttcactaggaaaacaatcaatcaatcagtcaatcaatcactggattctttattaatacgtgggcttatcgtattagtcgaatgtcatgaattcttaactgagcatatctttgatttattggctcttttccattccatttgttcaagaataatatttttgtttttattttgaacgctgaactattagtaatcatgcatataaacctgttgtaaaccttatcaatgagttacttcaactcaacgctagataaagctgtgcaatcttatcgataggaaatacgcatttgcttacattagtcagaacctaacttagattgttgaggtgatttttggggtacgccactgttgatttttagggaaagtacaaagggatgatataatatataactttaaagacttatttagaatataacagtattttaacagtgctacttaataatgggagcacatagacaaaatttgtttttaaaaagaatatattactcatccgccacgttggctgatatggttatgaccttctggctggataactagtgtaatacatgcgattttcgcaatagacccaccccgtttgtgaccgcaatcactcaggcgtttaataattgactgcatctgcggtcgaatcccaatcgaatcggggtgggtgggttgtttaatgga

SEQ ID NO: 10340 - DNA, 866 bp, DROSOPHILA
aagatgccacctccaccgcaccacgaccaccaccatcatcatgggccaccacaccatggacctccccaccatgggccaccgcaccatggtcctccacaccacgggccaccgcatcacgggccaccacaccacggaccgccgcaccatggacctccgcaccacgaccaccatcatcatggaccaccacaccacggtcctccaatgcatcctcgatgagaactataatacaatataagccgaatttaacgttataaactgatatggaaaaacttaatcgttaactgtgattaagccacaaactaacattaaaatatcttcactaacttctagttagtttcaccaagagcaaaatgtttttattttagaaattgtttaattttataacaccattataaagatactgattctaataagcaattagaagaatattgaagcaagaattgattaagtatgattaagtatcaaaaagccagcagataaggtagacaattatatataaaagaaagtccctctccactagaatgcagataagattacagcctactgaaactatgttacttttgtataaaaggtctggcaggagtgagccagtttagtgtacaacagaagcccgccaagcaaagatgcctcctccaccaccgcaccaccaccacaacccgccgcctcatgggccaccgccccacggaccaccgcaccatggacctccgcaccatgaaccacagcccccgttccacacgccagtgcatccgatttaccacgaacctcctcacggaaacagctccggctacaatcctccgccgccgcatggtccgtatccatatggtccaggatacgtggccccaggacctccaatgcatccgcgataa

SEQ ID NO: 10341 - protein, 80 aa, DROSOPHILA
MPPPPPHHHHNPPPHGPPPHGPPHHGPPHHEPQPPFHTPVHPIYHEPPHGNSSGYNPPPPHGPYPYGPGYVAPGPPMHPR

SEQ ID NO: 10342 - DNA, 5628 bp, DROSOPHILA
tctacacccagacactgcagttcaaggttcttggccgcgtcaaggttcaatctctcgaggtgggcattgcggaatctgatgctagcgctgctacccgcaagcagagtgtgacctatccaggaaaactgcaggaggttctctccgctgacagcacccagaagcttttgctgaaggccgttctggtagatgaatccaccagcaagcctctggctgtccatcaggcattcgttcgactctacaacaagaaaactgacaaggagatcatctttgtggccgagcaggatagcagcaaggcgtacaaattcgacatggatgttggcaacaacggaaagaactttaactaccagagcggcacctacagcatttacttgaccgtgggcgattcctctttgtccaactccttcgagtggttagttgctgaagtccaattgaaattcaacgaggataagggtaattatgcaacttaattgttatggaaagtactaatctaacctcatatctggttacagaagtcaagcctaagaacacttctggtcccctgcccgaaatcatccatcagttccgagtgcccgataagcgcccgccccgcattgtttctgatatcttcaccggactgtgcataaccccgcttgtgctgcttttcgttttttggggaaaactgggcatcaatgtatctaacctgacgctggcaccgagtacgatcgggtttcatctgggtttcggtggcattctggtgctgttcttcgtgttctggctgcagcttaacatgttccagacactgcgcctgctgattcccatcgcagtattcacattcctggctggcaaccgattactgagacgtctttacgcacaacgtaactcgaaggcaagtgcgtcgtaagtgcgttcatcattgtacgaagtcaataagtgagctactctctatcttgcaacaccatcagaaaacaaactttaataaagcgatttagttaagcccaaacacacactaaatactgcctttaaatatagttgaatattttatttgtgtataattttacagcctagtttcaactgcacaagccctgacatcataattgtcttaaagaccatttgctaagcagacagttgtataatacaaaaacaatggaaacaaatgtatatttacaataataacacttgtgaaaatcttccagagcaataggatatgaatctagaggtgagccttcatgaatggcttcaagtacttgtggaatgctccgttgactggctccttgttcaacgggttcttcttcgtagactcgaagatgtgttcgtaaacatttccatcataggcacccaatgcggaatctagcacgcgatcgtgaagatcaaagctgtccaccaagctgacggcattcggccggaatcgttttaagcagttctccaggcgaacctccagtttcgtgacatcttgatcagtgagatcaatgaactgttgaaagttacatataacattaaatattcttaactaatatcaatttaaaatcgtacccgcaagaagtcgccaatgcggttgaggcaggcgtctaccagatacagctccagcaccacctttaggacttcagctagttctggggacacctcgcgcgacaaggccaaaagctccgtataggcagtctgcgctaggaaggcgcgtccatgaagctacaagtggtacaaaattatataggatactgagtgaataacagatatttcattacgacttacatctgcagctgctgttaggaaggtgccacatagattagctgccacctcggtaccataaccttgcttgcggcgcagttcaatctgctcataggcaattcgggttttgctgatataaaaatatgaatttaaatacttggtacttctacctttttttctttagtaaatacttacttggcggcaacgaattggaaagccttgacaatagacctcaatgatccgtcaaagttaacaaacttggtttggtttattgcatcactgatgtacgaaaccgttggcaccagcttctctccattcaaggcctgcccataaaccttcaccaaatagcgagcagtctgcagcagcatcactgtgttctcgccctcataggtgcaaacggccgtggtcatgccgtatatcgtggggaagttggagcagtccatgtagccatgtccgccacatgacagacgacacgtttccacgccggcggcggcatcggcactacagatggccttaaggcagcaggacaatgcatgcatttcgggcaggcgatccaagttaccctgctcaatctcgccagatatcacgttgtacatattccagatgccatcacccgtcgttttgaaaacgatggctttagctatctgggggaacaacttcaactgctgcgtggtatggtccatgatttggggctccggttgattgggatcaatgggactctgtcggcgaacagctgaatacctagtggcaatagtggatgcctttgccaggctctgagcggtatcacggataagagcacaacgcacaaacatcttgaatgaaaaaatggttaaaatctctgtgaagatatagtgaatatgtgtaatagtaccatagttccgtaggtaagcacgctattcttcggcgccacatatgtgccatcgggcagcacttgctggttcttcatcagcatgttgtttaaaggcacccgtacgttcttcagtcccaaatagccattgttgacacccttcatgcccagcttggtaccaatatctccaatgtcgatgccgggcatgggacggtgagtatcggaatccctcaattggacaataaaaggagccagaccacggaactcgcccttggtgtagagttgtgccaccacaaccgcatggttagcagtgtgtcccactgcaagtcccagattttataacaatttcaaaatattaagtgttcaagaaaactcacatccaccgggccaccacttgtatgcactgagtgatggagtgtttataacaaactcctgggtgctggcatcgtagtcagccctggtctccagaccgcgcaggaaggttccgtgtcccagttccgtttgggcataggtgccaatgatttcacagtcccaggccttgctcagccattccacctgctgatccatcgttccctggcccatgatggtgggcacgaacatcacgtagtgcagcgcaagcggattgccctcctttagaatagccgatcccaaggatccaccaagcagagcactataagcacacaaattacaacctgaagtacattaaatataaggatttctttacttgtaagtatccactccatcctcgccatcagcacgtagcttgcggatcttctctcctatgatgcaggctttgcgcaagctgtgctcatagagctccttgtgtgacaaataggaaatgggcaagtcgtcctgaagggctggatcctccaaaaacaatttctctggaaaaatcataaacgaaatttaatgtaaatgaagccataaggaaagggatttaatattttaggaggtgtcatttagataagcattgttgaattttgcagcgtaatcatgagtggaaagtattcttcgttaattcgcgggagttactgggcattgtccatttatgatgccctgagcgaccgtgcaaatctgtcagataaacctatcagctaaactaatttcaagtggacctggaaatagatggtgggtagctgcaaacattcaaagtacacaagtagtcggattgatcgcgattcgcgcgaagttcaaagattaataacttatgagctggctaataggtgctgattaactagtagcggcttgtttatgcggaatacataattaatgaactttgggccacggcgtgcagcaaaatcaacaaatcgcatgaatgaatggacggagaagaagcgtatcaaaacaaagaagttgacaggatgttttggataatttatcagtggctgacatggctagcatcagagtttgtaccctacagattagctataaatgcgttaaagcctagcttaattgccaagtcatgcttttggcacaatttcttgcatccactgttgggaaacgcgattgcgccaagctcagataaagctctgagcgaccggttaatgtgaatgtacatgtaggtctgtcggggtcaccggagaagcttgaaatccggtgtttttcccttctaagctaactcacccagggccttcttctccttgaatcgctcctcgccgccggcccacagaacggagaactcccggggattgaaggtggccgtgctgcgttccttctggagatcgggattcactggtttggctggcattttgctatgcggcacagtattcaagtcacgtaaacaggttatggattaacgagccaccgcaaagcgtccgtcttcgttgaatatcgcgtactgactgattgttgctggaaaggcgaattgcgctcagtggtcagtcagtcggtcactcaagtgctggtggaggaaatccagtggaggagattgagattatggactgctgatctgatccagctattccgaatctaatcatcgatgccagctctcgaacgacgtgaactttaaccgcgaaaatacacatgtaataagttcgcttttgtgttgaaatagtctgtagcacaaccattattctcacgccattgttgttgggctacatttatgagtaaatacacaaaataaatacactgcatgtaaaaagtacttgggcgttttctttcagtttgtttctaatttaaataagattgctttcataagcttctttgttcgtataatttgtttgcaagtgaataatgcaaattcactacatctttctgcataaataacatctttaaaatgtctcaaattagccgttttaaaaaaagtagggtatttgaattccgccttaattaatagattaattttgtttttagcagctctttgtttgtattgtgacgaaatcagctgttgaacagggctgcaaaatacaaacaagtacggcagcactcgacaactccagggatacagtcaccataatcttggcgccaattcaaaaaaattcaaaaattccaattttattaaaaacatagatatatttgctagctaaatgatcatgaggtaacaccaatctttggccttatagcataggttcaggcttgcacatacggaaacacgtaaaattaaatcacgatttaatacacttactaggtggtaaattcatttggcttaggtcagaacattatttataatatccgcttaaatgccatgggcatggctagtggctatagctatgccccgctgatgctgccccattccagagtcataggaacagctggccgctggctccatttgatgcacttccgccggataccagtgactgtgagattccggcaactgatggtaacttagatccgccgaaacatgggtttcgcctcgcgtagtcttcggataagattgcgtatgcagggtttgccaatccatacgggcggatgaggtggttgatgatgatggggcaaatgccaaactccggctactctggtggaactcaaagggccagctctgcaagacagtataatgtggaatgtgtggataaaacaggcataaatcataggagttgtggaaaccgcaggggctatatatggaacaatatgacgacaaccca

SEQ ID NO: 10343 - DNA, 2532 bp, DROSOPHILA
gcgtgagaataatggttgtgctacagactatttcaacacaaaagcgaacttattacatgtgtattttcgcggttaaagttcacgtcgttcgagagctggcatcgatgattagattcggaatagctggatcagatcagcagtccataatctcaatctcctccactggatttcctccaccagcacttgagtgaccgactgactgaccactgagcgcaattcgcctttccagcaacaatcagtcagtacgcgatattcaacgaagacggacgctttgcggtggctcgttaatccataacctgtttacgtgacttgaatactgtgccgcatagcaaaatgccagccaaaccagtgaatcccgatctccagaaggaacgcagcacggccaccttcaatccccgggagttctccgttctgtgggccggcggcgaggagcgattcaaggagaagaaggccctggagaaattgtttttggaggatccagcccttcaggacgacttgcccatttcctatttgtcacacaaggagctctatgagcacagcttgcgcaaagcctgcatcataggagagaagatccgcaagctacgtgctgatggcgaggatggagtggatacttacaatgctctgcttggtggatccttgggatcggctattctaaaggagggcaatccgcttgcgctgcactacgtgatgttcgtgcccaccatcatgggccagggaacgatggatcagcaggtggaatggctgagcaaggcctgggactgtgaaatcattggcacctatgcccaaacggaactgggacacggaaccttcctgcgcggtctggagaccagggctgactacgatgccagcacccaggagtttgttataaacactccatcactcagtgcatacaagtggtggcccggtggattgggacacactgctaaccatgcggttgtggtggcacaactctacaccaagggcgagttccgtggtctggctccttttattgtccaattgagggattccgatactcaccgtcccatgcccggcatcgacattggagatattggtaccaagctgggcatgaagggtgtcaacaatggctatttgggactgaagaacgtacgggtgcctttaaacaacatgctgatgaagaaccagcaagtgctgcccgatggcacatatgtggcgccgaagaatagcgtgcttacctacggaactatgatgtttgtgcgttgtgctcttatccgtgataccgctcagagcctggcaaaggcatccactattgccactaggtattcagctgttcgccgacagagtcccattgatcccaatcaaccggagccccaaatcatggaccataccacgcagcagttgaagttgttcccccagatagctaaagccatcgttttcaaaacgacgggtgatggcatctggaatatgtacaacgtgatatctggcgagattgagcagggtaacttggatcgcctgcccgaaatgcatgcattgtcctgctgccttaaggccatctgtagtgccgatgccgccgccggcgtggaaacgtgtcgtctgtcatgtggcggacatggctacatggactgctccaacttccccacgatatacggcatgaccacggccgtttgcacctatgagggcgagaacacagtgatgctgctgcagactgctcgctatttggtgaaggtttatgggcaggccttgaatggagagaagctggtgccaacggtttcgtacatcagtgatgcaataaaccaaaccaagtttgttaactttgacggatcattgaggtctattgtcaaggctttccaattcgttgccgccaacaaaacccgaattgcctatgagcagattgaactgcgccgcaagcaaggttatggtaccgaggtggcagctaatctatgtggcaccttcctaacagcagctgcagatcttcatggacgcgccttcctagcgcagactgcctatacggagcttttggccttgtcgcgcgaggtgtccccagaactagctgaagtcctaaaggtggtgctggagctgtatctggtagacgcctgcctcaaccgcattggcgacttcttgcggttcattgatctcactgatcaagatgtcacgaaactggaggttcgcctggagaactgcttaaaacgattccggccgaatgccgtcagcttggtggacagctttgatcttcacgatcgcgtgctagattccgcattgggtgcctatgatggaaatgtttacgaacacatcttcgagtctacgaagaagaacccgttgaacaaggagccagtcaacggagcattccacaagtacttgaagccattcatgaaggctcacctctagattcatatcctattgctctggaagattttcacaagtgttattattgtaaatatacatttgtttccattgtttttgtattatacaactgtctgcttagcaaatggtctttaagacaattatgatgtcagggcttgtgcagttgaaactaggctgtaaaattatacacaaataaaatattcaactatattt

SEQ ID NO: 10344 - protein, 669 aa, DROSOPHILA
MPAKPVNPDLQKERSTATFNPREFSVLWAGGEERFKEKKALEKLFLEDPALQDDLPISYLSHKELYEHSLRKACIIGEKIRKLRADGEDGVDTYNALLGGSLGSAILKEGNPLALHYVMFVPTIMGQGTMDQQVEWLSKAWDCEIIGTYAQTELGHGTFLRGLETRADYDASTQEFVINTPSLSAYKWWPGGLGHTANHAVVVAQLYTKGEFRGLAPFIVQLRDSDTHRPMPGIDIGDIGTKLGMKGVNNGYLGLKNVRVPLNNMLMKNQQVLPDGTYVAPKNSVLTYGTMMFVRCALIRDTAQSLAKASTIATRYSAVRRQSPIDPNQPEPQIMDHTTQQLKLFPQIAKAIVFKTTGDGIWNMYNVISGEIEQGNLDRLPEMHALSCCLKAICSADAAAGVETCRLSCGGHGYMDCSNFPTIYGMTTAVCTYEGENTVMLLQTARYLVKVYGQALNGEKLVPTVSYISDAINQTKFVNFDGSLRSIVKAFQFVAANKTRIAYEQIELRRKQGYGTEVAANLCGTFLTAAADLHGRAFLAQTAYTELLALSREVSPELAEVLKVVLELYLVDACLNRIGDFLRFIDLTDQDVTKLEVRLENCLKRFRPNAVSLVDSFDLHDRVLDSALGAYDGNVYEHIFESTKKNPLNKEPVNGAFHKYLKPFMKAHL

SEQ ID NO: 10345 - DNA, 3239 bp, DROSOPHILA
tttcggtggaaatggcaatattccgcagtttgccgcagtaaattcacaaaacccttagtatccacactagttgccagcgtttagccgtcttttggccatcctctggccacaatccacacaattaaacgttgaaaatcccttactttgtcacagaagaaatcgagatacgatgtcagcgcaaaggcaaacgcctgaaaaagaacatgttacggcagtgtgcagcaacgccagagagtccgcttccgccgacacgcacacggttgcattccggctgccagggctgcgcaacaagtgaactatcgaacggagataggcggccatgagtggggattattcctcgacttaatcactttttcgaacgcgtttgctacttgagttgcacatttatatgtacttcatagaaatataccctgctttcaggcatactattagttttaagccacttttttaatgacaaatttcgaactttctatcgatatgcggcatttcgcggttttgccagtcacaacgggtggcgatagttgaaattcgcatgccaaattttctttattacggtcaccttatagaaattttgatatgcttgagtattaaatgttattatttcactgactgtaaaataaaaagttatttaaatcgtaatgcatatatatttataacatatagttctttatttgattttgtaagtggaaaaaaatatgtggtatgtaaagattatatatatgggatatataaaatacacaaaaattttactatattacatagtaaatttaagggtggtaaaacgtttttacacgaatacaatatccaaatactttagtaaaatatatttttaatcataagaatttacccatattattaacttttctggcacattctatatccgatagtttacaccttatgccttagtatttttcggtattttctccggccacactggcagcaggccgaagtttctcgtccaattgggattatttcggaatttcagttactagctcgtcatcaaaacagcaacaactgttgagaataaaattcttgcgtgaaaccgaatcaatagaaaaacaaataaaacaaacaaaatggttcgccgtggacgttcagccagtcccccgccctccactcgtcggtaagacagtcgcgaaaaacaaagaaaattcgggggaaattggataaagcgccggcaggaaattcatttcgtaatcaccgaccaatcaatcggatgatctggctttatctcatggacagaatttcacttccgccgctttttccggcccccgaaatgggttaaggttacgtaaccttaaaaataagaggattcccaataacatgggatgttttattggtgctgtcctcctagcggaagacccgctaaatctggctacttattcaattacgaaagtgctcataaaatccatttttgtaagaaatttactaaatttattgttctatgtaaatatatatatatatcccaggccattgatttattaaattaaaaacatcacatgtttttattttgcgttaaaaaagtaaaatattcaaatgtttatacaatttggcttattataaagaaaacaagaatttgcataggaatataaaaatattacctacttttgcagtagatataaaataaagtcctttaaaaatcctaggaattagttaaatttgtatagttcattgttttcaacacaaagacccttcaatttcgtcacggaatgatcaacgacactccagagcaaagtccacaataacaactgattgcttctgttttcccaacagcaccgcacctgtgcaggcccgtgcccccgccccggccccggctcctgtccagacacgtgccccagcaccggccgcctctgcccctgttccggcgcccatgagcgctcctcccagtgccgtcggcatgccggcaccgcagcagccatcgatgttccagcagatggccgccaccgctggaggcgtggccgtgggctcagccattggacacaccgtgggtcatggattgacctcgctgttcagcggatctggcgacaaggaggccgctgctcccgctccggcggcagccgctcctgccccccagcagccatactacgcccagcagcagcagcccaatgagccgcagggagcctgcgcctgggagctcaaacagttcatccagtgcgcccagggtcaggcggatcttaccctctgcgagggattcaacgaggcgctgcggcagtgcaagcagagccaccatctccagtagagggcccagctccggtagaatatcatctggccaagcaccggcggatgaacgcagccggatgaacccatcggatgaacacctccggatgaactctgtcctatcccttcgtttagttcttaattgtttaattgcaagcatctgaaagaaagcattgtttaattgtagtgcaaaatgaaatgttaaatagaaaatcccgttggcagcccaaaaccctttccaaaaaaaaacacaaacaaacaaaacaaaaaagaaaccaaaccccacgggttgtcaatgtgggccaaaacaaaacgaagtttccaagagtttttattgtttaaaatataaatatatgcataagttaatatcaagttataattgttgtctaaacaaggagccaagaaaatctttgaaatattcatttttcaagaagcttctagaaaaaatgcaactttcccttttcctccttctggaaaatgcaaaatttgcattctattgtgaaatgtggctgcatgcggttgccaaaaataattttggtgacattgcacttctataaataggaaaatcgattcatttccctatacatttgtatgggaaccccttttcgcctttttcattgtcacgtgtctttcatttcagcttttcttgtgttttgattgcaatgcgctttgttttgttgaaattaggtggtaaacaaatgggaaatatgataaacatgtttacctacttgctgtttagttataaatgaagggttatatagcatatatattctattatatgctatacacatacagatgtacatattcatggttaaacgagcgattagtcatagatcttattaatggtcttatgaaatatttgccgtggaaacgtaattttgaaaagttaagaactgtttaaaaggttccctaaattaccacccaaaaaaatattatgaactaatccctgcgttcgagacattcatgtttccgtttttattcaataatttttacatagagtcatcactgttcataattttgca

SEQ ID NO: 10346 - DNA, 589 bp, DROSOPHILA
caaaacagcaacaactgttgagaataaaattcttgcgtgaaaccgaatcaatagaaaaacaaataaaacaaacaaaatggttcgccgtggacgttcagccagtcccccgccctccactcgtcgcaccgcacctgtgcaggcccgtgcccccgccccggccccggctcctgtccagacacgtgccccagcaccggccgcctctgcccctgttccggcgcccatgagcgctcctcccagtgccgtcggcatgccggcaccgcagcagccatcgatgttccagcagatggccgccaccgctggaggcgtggccgtgggctcagccattggacacaccgtgggtcatggattgacctcgctgttcagcggatctggcgacaaggaggccgctgctcccgctccggcggcagccgctcctgccccccagcagccatactacgcccagcagcagcagcccaatgagccgcagggagcctgcgcctgggagctcaaacagttcatccagtgcgcccagggtcaggcggatcttaccctctgcgagggattcaacgaggcgctgcggcagtgcaagcagagccaccatctccagtag

SEQ ID NO: 10347 - protein, 170 aa, DROSOPHILA
MVRRGRSASPPPSTRRTAPVQARAPAPAPAPVQTRAPAPAASAPVPAPMSAPPSAVGMPAPQQPSMFQQMAATAGGVAVGSAIGHTVGHGLTSLFSGSGDKEAAAPAPAAAAPAPQQPYYAQQQQPNEPQGACAWELKQFIQCAQGQADLTLCEGFNEALRQCKQSHHLQ

SEQ ID NO: 10348 - DNA, 4172 bp, DROSOPHILA
gtttaatgatacctgtgaaagtgcggatctatccgcaccgcttaaccttgtttccagtgaaaataatgcaaagttaacataaaacgccaaatatattccccctactcacttttcgaaaaaaaaagaagaacctttaacccacattttgtttatttatgaggtcgcgtaagagagaaaaacaaatggtataggattaaaaatacgtatagattattaataaaattttcattctttaaaactaaattttattcatttgtatctttaaaaactaataccaaaatacttattagtgtaaaagaggtatgaaaattgaaccagtatgtcaaaacttttaaataatatcacactaaatatagaccttaagagaggacatcaatacttaatgcaattaaattaaaaataaaatttattatatttatatttattaaaaccattttacagtatttttaattttttaataacacaaatcgcttctattaaaatgaaaagttcagttttaacaatgatttttcagctgtctttgcaattgaacaacttctaaagctaaaaaataataatgttttaaatctcttgcctatacgaaaatcatgtgataatataataatctccacaaaacattttaatagtaaaactatgcaaaaagcaataatcacgcaatgcaaacttttcaaggaaatatttaaattatatacaattataagaaactaaaaaacttaatgctgttttcgaatctacataaattgtctaaataaaataaggacttcataataggctaagatacaaaaaatattactcatttattttttcaaataaaatactctatacaatttttaacaatcacaataaaactggttaatgtaaaatgaaaatccaaattctactgtttttttttaactatttgcctggggtatgggataagcaaccgaaaaatctgttaaactaatgatgagaatttgaaaaaatatatattaaagatatttaagtatcttaattcgaatagaaagggacttacatttttaccgccgactgttcaatgagaaatgctgtaagtggaaacatgctgttagactcccgaattatcgatgtagtacaacaagcactcgcatcgatagtcccatcgtttactttacatcaccaggcgttgttttggtatcagatcagatccatttgttattgccagccagcagcatgttggagaacggttcgcacttcttcgagggcgttgagaaactccttgagatttggtttgaggagagctccaacggtgacgatgatctgcgtaacatcagcaggtgagtccctcaacaagtgcggaacccaaacagccgacatgtcctttgtgcacaagtgcatgcacagttgcgggcaaaagtatacgtacatatgcgccgttcattttcgtcctgaaaagaaatgaaatgtatttctacactgataattatcttttaaacataacatagtcccattggaataggttacacattggtttttaggcttatcagatgcggcacacgtgtacctacccaaattaaattgaagtttttatttatgattctcaagatatacaaatttgatttgaaatttcaagaaattagttattaaagggaatttctttttaaactggcagcctgtagaactttgtaaattcacttagaattaagctttcaaaaatcggtcttaacccttggccttgtttgataacgagttttaatcaatcccattaatccaatcctcattatctcaaaataaattttggtcgaggcattgtgtacatgtttattcaaatagccttgaacttttaatgaatgtaaatgatatttttcagatctgattgggaaaacgtgcttagcaatgtcaactgtcaaataataagcacatccaaaaacgacattattgatgcttttgtgttaaggtatgcgaatatataaaactaaacttaataaaatattattaattattttaaatttgtattcggtgcgagcagtgagagcagtatgtttgtttcaaagcgacgatggatccttaaaacttgtggaacgactactccattgaaatgcctgggtcagttgcttaagctggctgaggccaatggatacaatgtggtcgcagacttgttctactcgcgaaaaaatttcactagaccggaggcgcaggtgggcaaaaaaattaattgcatttcaaatgattttatatcatatatattcagataactccccatcaaggctttacggaggaagttacgtatctggactcaatttttcccaacggaagatcctattgtctgggctccatgaacctggagtgttggtacctctacacttttagtcgttctgatatcaaaattacgccccaacttatatcggatgagaaaaacgttgactccgatccagatcaaactattgaaatattaatgcaagatctagatcccgaaaccatgtcaatcttctataaaaacaagtttaatgatgctaatggcgctactgtggtatgaggatatattttaaatgattaaaaccaatacatatagattgtgatttcagaaatctggtatcgataccatattgccgactatgcacattgatgactttttgttcgatccttgcggctactccatgaatggaatcaacgataaggtaacatagaaaaattttacaagaactattgacataaattctttatagggggagtacatgacaattcatattactccggagaatcaattttcgtatgtgagcttcgaaacaaatgtggctctaagtaactatcgtaaacttatcaatcaagtaatcaatactttcaagccgggaaagtttattgtaaccatctttgccaataaggtaagctgttgctccactttttgtataattatttaaaataattttcgaatattgtggatcagtgctcgttggcctacgaaactatgaaggaactggaagtggagtactcacagggatcgcactggaaacgaaccgacatgcaatgttgcaactttccatcttacaatcttctgtttgcacaatattcccacagtgagaaaactggtgataatttataaaattccaaagccaacagcaattgtgattgttttgcgtatgtctaacaaaatttatttttcgttcgttattaattattcaaaataaatgtcgaataaataaaataataaatactactactactaaataacgtacaattactttttaaatagactgttaatataaaatactaaaatataccaacaccctggataattcgcaaattccaaatgtagcaaataattatcggatctgaacaagtgtcacaggcaaagttccatccctagcagtatttgacaagtcggcccaaaagaaaaataaaaatgagtgcgatttctaatgaagacattatttggaccataaagaacggagagttcgatgctgtgcaagacgcttttcagaatgatgtgcgctgctaatactctaaataattttggaattaattaattctatttgtatacaggcacaaaaggtgaatgaggaaatcaagggccgttttccagtacactatgcagcagattttggacaactgaatgtcctggagtttcttataagcttaggagcagacataaatgtaagtagctcacaatgccaaattactcggccatgaatcattaatgtttcgtcagttactggtttcatatattagtgtacatatatacacgtctgcaccaccttcatttgtttagtcatagtctcaagctaaacaaatgaaccaggtgtgcacctaagacatgccggtcttcgtataataatagaacttaattgtaattaactaatatttattgaagagaaaggacaaacatggtattacccccattctggctgccatttgggaaggacatacgagctgtgtggaattacttctaaaaatggtttgtgcttccttgtttctacatatacgccaaataaacatgttttcgattgcagggagctgataaaaatggttctactccagatggccaaagctacctcgaggcggcggaaaaagacgagattaagaaactccttgcataatatgtacatgtcattttaggatacaaaccttatgtttcagtatcaagtacacttttaaatacagtcgtgtatagcttttaaaaatgtcaactatttatttcgatgctttggaaaaattgatac

SEQ ID NO: 10349 - DNA, 1349 bp, DROSOPHILA
aaagggacttacatttttaccgccgactgttcaatgagaaatgctgtaagtggaaacatgctgttagactcccgaattatcgatgtagtacaacaagcactcgcatcgatagtcccatcgtttactttacatcaccaggcgttgttttggtatcagatcagatccatttgttattgccagccagcagcatgttggagaacggttcgcacttcttcgagggcgttgagaaactccttgagatttggtttgaggagagctccaacggtgacgatgatctgcgtaacatcagcagatctgattgggaaaacgtgcttagcaatgtcaactgtcaaataataagcacatccaaaaacgacattattgatgcttttgtgttaagtgagagcagtatgtttgtttcaaagcgacgatggatccttaaaacttgtggaacgactactccattgaaatgcctgggtcagttgcttaagctggctgaggccaatggatacaatgtggtcgcagacttgttctactcgcgaaaaaatttcactagaccggaggcgcagataactccccatcaaggctttacggaggaagttacgtatctggactcaatttttcccaacggaagatcctattgtctgggctccatgaacctggagtgttggtacctctacacttttagtcgttctgatatcaaaattacgccccaacttatatcggatgagaaaaacgttgactccgatccagatcaaactattgaaatattaatgcaagatctagatcccgaaaccatgtcaatcttctataaaaacaagtttaatgatgctaatggcgctactgtgaaatctggtatcgataccatattgccgactatgcacattgatgactttttgttcgatccttgcggctactccatgaatggaatcaacgataagggggagtacatgacaattcatattactccggagaatcaattttcgtatgtgagcttcgaaacaaatgtggctctaagtaactatcgtaaacttatcaatcaagtaatcaatactttcaagccgggaaagtttattgtaaccatctttgccaataagtgctcgttggcctacgaaactatgaaggaactggaagtggagtactcacagggatcgcactggaaacgaaccgacatgcaatgttgcaactttccatcttacaatcttctgtttgcacaatattcccacagtgagaaaactggtgataatttataaaattccaaagccaacagcaattgtgattgttttgcgtatgtctaacaaaatttatttttcgttcgttattaattattcaaaataaatgtcgaataaataaaataataaatactacta

SEQ ID NO: 10350 - protein, 347 aa, DROSOPHILA
MLENGSHFFEGVEKLLEIWFEESSNGDDDLRNISRSDWENVLSNVNCQIISTSKNDIIDAFVLSESSMFVSKRRWILKTCGTTTPLKCLGQLLKLAEANGYNVVADLFYSRKNFTRPEAQITPHQGFTEEVTYLDSIFPNGRSYCLGSMNLECWYLYTFSRSDIKITPQLISDEKNVDSDPDQTIEILMQDLDPETMSIFYKNKFNDANGATVKSGIDTILPTMHIDDFLFDPCGYSMNGINDKGEYMTIHITPENQFSYVSFETNVALSNYRKLINQVINTFKPGKFIVTIFANKCSLAYETMKELEVEYSQGSHWKRTDMQCCNFPSYNLLFAQYSHSEKTGDNL

SEQ ID NO: 10351 - DNA, 2698 bp, DROSOPHILA
ttcaccatatgattcgcacccaaatccgctcctgtccgaagatcgtgtggcgcctatttcacctggtccgggagagaatgtagagcactcacgcatgggaagtgctcggcctctaactcgtattggctttagtggttacccgaatttacgcgtaccgcttctagacaaaaacaacccgatttctgggcgaggaaagtgatagaaatgcctggcactggcactgatacccaatttgccgggctgcgcacgcgtgcagcgccgcatgattcccccggatgggataaaagaaagtgtccgtctgtttgctcatctctgcggtatgtaaacgtagctccacattggcatcttctttccgctcgagccagttttagtggctataaataaaatcgaaaactcggcgccattgtgatccgtccgtttacagaccatgatgatgtaacggtaccatctagctggatttggcgcgtgtttttgagtcagcaagagctgattactgatctgatttggtgcatttactagaacgcagcacgacacgcacgacaccaattagcaggacaccactaatcgccgactatgacactaattaaggtttaatcccaaaaggaaggtaaaagtggattgggctggattgttttccaggccgacgcttagaaagttgcacgtaatttgctgcgttgccaactacgagcaatccatataagttatttggagtgcgattagggcttttcaaaaaacaaagacttttttaaaagtttttcctctagatattaaccttaatataattatgtaaatgaacaaatataattatgttttgatctagtaaactaaccacagcattgcaagaaagtttgtattatgtaaatacttttgcgatttctaggcgaaaagtattttacctacttttgtctaaaaacctatccttctgttttgcaaaaacaaaatattgggttaaacaaaacgtaaagtttacagcaaatgttgcctggctttttattaaaacagtaactagcagctaaacgcaaagtggataaacgaaggcaccgtggccgatcctactcgatctcgatgatggcgcccgccttggacagtgcctccttgagtttctcggcctcctccttggggatgtcctccttaacgatggtcggtgcgctctcgacgaactttttggcctgcaccaggttcatgccctcgagtaggttcttcacctccttgatcagcgccaccttctgcttttcgtcgaacttgaccagcttgaccttgaaggaggtctgtaccttcttgggcgctgcctcctcctcatcctcggcgggagcagcacgtgccggcccagcggcgaattgtggggcaaatgcggtctcgggcaggttcagtttctgtttgagcagggtgctcagctcggccacctcgaggagattgagcgcggcaatgttgttgacaatcgagtccagtttgggattgggtggcttggcggctccttccggcgcgggaggcaccagtttttccgcacccgagactgcggcggccggagccgctgcactgtacatgcgatgcagctgcacttggcgcgaaatctggcgaagggcgaggcgtgtgatgtgcatcttattggtatctgcaagtcttaagttagaaaagcgttcaactatcatttaatatccatttacttacggttttcgggtgacaaaataaattctttgggccgcagcagcaggttatgtgagcagtttatcgataaacagccagggctgcattcaacatatttggttgaacggcagtgccatgcttaaataaaaccatatggttggaaaagtaacgtttaaataccgctaaataaataatttaatttacaattgttttttgcttgtttttgcttgttttgcatggaaatttatttaaaaaataaacaggtaagaacctttgaacttgattttcatttaagaaagttcttccattttctagcataattttagatgtaaatgtataaaatgtattgtataaatgttaattatatttgttttatttcctatgcttgtaattcgattacagagtttacaaagagtacacctttacgtagtcgatcttcatgtggccctcgtccagccagtggtccctgatcttcttgacttccttccaaaaggctttctgcgcctgcggcgccctctcgttccagggtttgatctcgtgctggtactcgttaaaaccgcccacgctgagtccgaaggtcaagtagaactcctgatcgaagggtgccagtccagtgccctcctccagtttctgggcctgcggtaaactctttccggcggcagtcgtctcgctgaaagaccctttagcacttccctggacacaccactccttgccgtccaccagccagcgaagttccctgggtgtccattcgagggtgtaattgtggaaactatcgctccagtcctcggagttatttccagtacctggcttcaggcaattcttgaccgatcgcagcggctcatctgcaaagagcacggcggcgccatacaaatccagattacctccattcggacgggtataagcgattctcagctgtcccgaccgataatcatccactccgtagatcggacgcctgggctgcagccagatttgtggagtcacccactgtgcccgcggcattttggctcgcacctccacgcgaccatacttgaaggagaaatccttggaggagaac

SEQ ID NO: 10352 - DNA, 642 bp, DROSOPHILA
ccaaagaatttattttgtcacccgaaaaccataccaataagatgcacatcacacgcctcgcccttcgccagatttcgcgccaagtgcagctgcatcgcatgtacagtgcagcggctccggccgccgcagtctcgggtgcggaaaaactggtgcctcccgcgccggaaggagccgccaagccacccaatcccaaactggactcgattgtcaacaacattgccgcgctcaatctcctcgaggtggccgagctgagcaccctgctcaaacagaaactgaacctgcccgagaccgcatttgccccacaattcgccgctgggccggcacgtgctgctcccgccgaggatgaggaggaggcagcgcccaagaaggtacagacctccttcaaggtcaagctggtcaagttcgacgaaaagcagaaggtggcgctgatcaaggaggtgaagaacctactcgagggcatgaacctggtgcaggccaaaaagttcgtcgagagcgcaccgaccatcgttaaggaggacatccccaaggaggaggccgagaaactcaaggaggcactgtccaaggcgggcgccatcatcgagatcgagtaggatcggccacggtgccttcgtttatccactttgcgtttagctgctagttact

SEQ ID NO: 10353 - protein, 182 aa, DROSOPHILA
MHITRLALRQISRQVQLHRMYSAAAPAAAVSGAEKLVPPAPEGAAKPPNPKLDSIVNNIAALNLLEVAELSTLLKQKLNLPETAFAPQFAAGPARAAPAEDEEEAAPKKVQTSFKVKLVKFDEKQKVALIKEVKNLLEGMNLVQAKKFVESAPTIVKEDIPKEEAEKLKEALSKAGAIIEIE

SEQ ID NO: 10354 - DNA, 4451 bp, DROSOPHILA
tggggatgcttataaggaacttggaccaaatatggtatattctcaccttgaactccttcgccgccgccggatacttggtacaatctaggcgacccactcgaacgttggtggcatgcaaagcctgagccaccagagcaaaaatgggctccgttttcttgcagtagccgcaccacggggcatagaacatgaccaaccattggccctcgtgtcgcacatcgatgaaccggtcactgagctccaaaaccttcgaggatagccccgtcgaacccagagtcagaagcagagctgttggttttgtaaatcatttagcatcagcttggattttttctattgttcgtaatttatttaccacttatgaggccgaaaatccacatagaatttggcgacatccttgcagcaggtttaatttgtacttccaagtgtaatttacgtgccccttatttgctatatcatgctttccgttattttaatagcttctttacttaatttaattagttgattggtttaattttcagttccaaattattttccttcggaccacagcaacaacaaaagaaaacatttgcaaaaaccaccccctttagactgaccagatgtggaaaatatccaaaatacttaaggagatactctttagtccaatgcgtaaattgaacaagtttatttattaattttgtagttgtttggattatgtttttaaaagattattgaactcaagattttcattctactataaccttaaaactaaaatgaattcgaaataaaaactaattaaatttttttatatgcatctctaagaatttatctttaataatgacatagttaataattacatttataaaagaatttttaattttgaaaataagtttttgagcggccatagagcggctgcctaagggttaatctggtatatttttagtcagatggcaactcttcagctttgtttacctcacaaaatagactatctggcaactcttaggcacacacgtgcatctccagaggaattttgtttcagttgttgttccttatttcttcttaactaaataattgtattaactaaataaaatgacgaataatgcgaagaaggaaccccagcaaaggggcaagcatcaggtgcataatgtgcgcttctacactataaagccgcgtgaaattgtcagcttggcgtatagtaaatcgagcaagtgcctcgctctgagtcggtaaattattgaaaattaaaaaaaacctaataattactgtgcagtaaactaataagtacactctttgcagtgcaacacccgtcattgagctatggaacctggagcacgccccgtatttggatcgtgtaatccacctgcccaccgattctcatgtggaatctatagcctgggcgggaaaccgcttattttccgtggatttaagtggtaaactgatcgagtgggatgtgattaagctaaaacaacgatatgagcactcgcccactggcaatgctctctggagtatcgatgtgaatcccgcggaaacggatattgccattggctcagaggaagggcacatcaacatcctgagtattgagaatgacgaaatcacctataaatccctatttaacaagcaaaaaggtcgcgttctctgcatcaagtttgataagactggaactaaactggtgaccggcactgagggatttgttcgcatttggaacgtcctcaagggaaccactctgcacacgatgaccctatccgaaaagaacgtaatagtttggtccctgcaggtgctatccgataatacgattattgccggtgattcagcgggatttgttaccgtttgggatgcggataacgcgacacagatagattccacacgagttctggataaaaacgtatttgccctggctgtgaataataaggaggatcgattagtttgcagtggaatgcagccgccgctcatccggattttcagcaaaaccaagataaagcgggaagagtccaccagcgagcgttggattaaattcctacagcgcgatgcccacaaacactatgtgaaatccctgttggttatcgacgatcaaatttattcgggaggcagggatggcatattgaccattacgtccagtgaacgaatgcaggcacatttgtcgcagcatgctccctttctgaaaggttccgtagcttccatggcaatcagtaaaaagcttttgcttttgcgatatcccaacagcgtgcacctgtggcgcttgggttctgtggccccgcaaggcgaggacaagaagaaaccctgggcactgcccgtcggccacacggaggaacaacttctggagctgccaccccagaaacttctccaactaaatgtcaaagagcacaactttatacagtctgctgccatttcatcagatgcaaactggatttgctactctaccttaaaggaactccgaatcagtcgtttgaaaagtgatcccctgcaggtggagcgtctggtagacgatcttcccgaggaacttcaaccagccagtcatataattttcacaaagcagggagatctagtgctgctcaacccgcagaacaatcatctaagttggtttactttagaggaagatctggttacattcaaatataccatcgatttgagtgagaagtgtaagaatacgattagccacgtggttatctcttcgcatggcgaatacattgtggctgcgagctcagaccacataatatcagtttggaaactacatggaaaacaatacaagcacctgctgaacctaccaagacaccgagcaggtaccaccgccctatccatgcacgaggattacccacgcgtggtggtcgcctacgccaatggccagctggtggagtacgatttggtcaatcggatattcacctgtgaaactaatgagtacctgatacccgagaccaggcgccattgcatcaatggaatcagcctggatccacaaaatcgtaatatatttattgttcacaccgagggcaatttgtatgtgttggagagggatcagcatctggatcccaaagagcttgtgagcaacagcaagtctaaaaagttatcaaatggaaaccgctcttcagttgatggcggctcaaaaggcctgagcctcaagacgactctgtcacgacaggtaagattggtaggtctgtttacgcacaagactttcattttgtaacactttggctcacaaggtaatcttaattcatccatgaaataagaatgagaggattaaaatctccttttaggcttaccgactacccactttaacgttttccgtcctttctatagctgccacaaatcccaaacccgccccttattacttgcaaacactttcacacctcaatttttttccttgcagcacctggtgcacgtgtctcgcctgagccctaacgaacttgtcaacgtcagcatttcgacaaacaatctgttggctccgctgccgccgccgtaccagcggaagaagttcggtgcctcgtaaatggagcgccgcaggatgaagttgaagtggagtggagtggcgaagctccagcatcactttggcttacccagtagtttccacttagttaccaaataaaatcaaaagtataaaacaatggtggagtggatttttcgcaggcttgtgcggctcgcactctgcattcgcacggaaatttgtcaaatgtattgccaaaaatttgtctccggccgtctcgtcgacgactacaatgtctctcgttcccattcccattcctgtgatttcttgcaggcgcttctacgtggattgtgcaacatttcgcttcgttttgtgtcgccggcatttactgtaattgttgttgctgttattttttggttttacactgtctagccaatgtctagacaagtgcataccacacagacagtcgaaaacacacgcacacagtggcggcaagcggcggtcgagggggtcttttggtggagtcctggggggacgtcgatgcacaattcaacttttagctcaaaaactcattggccggctgggtccgctaccccgccgctccaccatttccaccattgtggccgaatggtttgggtgggcgttctgtttctgattctcggcaaaaaagtccgagtatcccgcagccatattcgaatgccagcagaggcctggacttgggctgggtcatgaccactttgggatcaaaaaggtgattaaaactttacaatcgcagctcggggtggtgattcgtatcagacggcttgctgcatcgccggaattaaaatggatggaaagtattaaacaaaactaatttagaaatcgcttcgcttataaactaactttataagccaaggctgcaggactttcctccaattgcatgcatatcgcacatactgaaagggatataaccatttacatattataagttattaggttcctcaaatattgtgttcaaatttgattttaaggtattcaaaattcggtttggccttgtcagtcgttttccatcttgttatgtgcattg

SEQ ID NO: 10355 - DNA, 2153 bp, DROSOPHILA
attttgtttcagttgttgttccttatttcttcttaactaaataattgtattaactaaataaaatgacgaataatgcgaagaaggaaccccagcaaaggggcaagcatcaggtgcataatgtgcgcttctacactataaagccgcgtgaaattgtcagcttggcgtatagtaaatcgagcaagtgcctcgctctgagtcgtgcaacacccgtcattgagctatggaacctggagcacgccccgtatttggatcgtgtaatccacctgcccaccgattctcatgtggaatctatagcctgggcgggaaaccgcttattttccgtggatttaagtggtaaactgatcgagtgggatgtgattaagctaaaacaacgatatgagcactcgcccactggcaatgctctctggagtatcgatgtgaatcccgcggaaacggatattgccattggctcagaggaagggcacatcaacatcctgagtattgagaatgacgaaatcacctataaatccctatttaacaagcaaaaaggtcgcgttctctgcatcaagtttgataagactggaactaaactggtgaccggcactgagggatttgttcgcatttggaacgtcctcaagggaaccactctgcacacgatgaccctatccgaaaagaacgtaatagtttggtccctgcaggtgctatccgataatacgattattgccggtgattcagcgggatttgttaccgtttgggatgcggataacgcgacacagatagattccacacgagttctggataaaaacgtatttgccctggctgtgaataataaggaggatcgattagtttgcagtggaatgcagccgccgctcatccggattttcagcaaaaccaagataaagcgggaagagtccaccagcgagcgttggattaaattcctacagcgcgatgcccacaaacactatgtgaaatccctgttggttatcgacgatcaaatttattcgggaggcagggatggcatattgaccattacgtccagtgaacgaatgcaggcacatttgtcgcagcatgctccctttctgaaaggttccgtagcttccatggcaatcagtaaaaagcttttgcttttgcgatatcccaacagcgtgcacctgtggcgcttgggttctgtggccccgcaaggcgaggacaagaagaaaccctgggcactgcccgtcggccacacggaggaacaacttctggagctgccaccccagaaacttctccaactaaatgtcaaagagcacaactttatacagtctgctgccatttcatcagatgcaaactggatttgctactctaccttaaaggaactccgaatcagtcgtttgaaaagtgatcccctgcaggtggagcgtctggtagacgatcttcccgaggaacttcaaccagccagtcatataattttcacaaagcagggagatctagtgctgctcaacccgcagaacaatcatctaagttggtttactttagaggaagatctggttacattcaaatataccatcgatttgagtgagaagtgtaagaatacgattagccacgtggttatctcttcgcatggcgaatacattgtggctgcgagctcagaccacataatatcagtttggaaactacatggaaaacaatacaagcacctgctgaacctaccaagacaccgagcaggtaccaccgccctatccatgcacgaggattacccacgcgtggtggtcgcctacgccaatggccagctggtggagtacgatttggtcaatcggatattcacctgtgaaactaatgagtacctgatacccgagaccaggcgccattgcatcaatggaatcagcctggatccacaaaatcgtaatatatttattgttcacaccgagggcaatttgtatgtgttggagagggatcagcatctggatcccaaagagcttgtgagcaacagcaagtctaaaaagttatcaaatggaaaccgctcttcagttgatggcggctcaaaaggcctgagcctcaagacgactctgtcacgacagcacctggtgcacgtgtctcgcctgagccctaacgaacttgtcaacgtcagcatttcgacaaacaatctgttggctccgctgccgccgccgtaccagcggaagaagttcggtgcctcgtaa

SEQ ID NO: 10356 - protein, 696 aa, DROSOPHILA
MTNNAKKEPQQRGKHQVHNVRFYTIKPREIVSLAYSKSSKCLALSRATPVIELWNLEHAPYLDRVIHLPTDSHVESIAWAGNRLFSVDLSGKLIEWDVIKLKQRYEHSPTGNALWSIDVNPAETDIAIGSEEGHINILSIENDEITYKSLFNKQKGRVLCIKFDKTGTKLVTGTEGFVRIWNVLKGTTLHTMTLSEKNVIVWSLQVLSDNTIIAGDSAGFVTVWDADNATQIDSTRVLDKNVFALAVNNKEDRLVCSGMQPPLIRIFSKTKIKREESTSERWIKFLQRDAHKHYVKSLLVIDDQIYSGGRDGILTITSSERMQAHLSQHAPFLKGSVASMAISKKLLLLRYPNSVHLWRLGSVAPQGEDKKKPWALPVGHTEEQLLELPPQKLLQLNVKEHNFIQSAAISSDANWICYSTLKELRISRLKSDPLQVERLVDDLPEELQPASHIIFTKQGDLVLLNPQNNHLSWFTLEEDLVTFKYTIDLSEKCKNTISHVVISSHGEYIVAASSDHIISVWKLHGKQYKHLLNLPRHRAGTTALSMHEDYPRVVVAYANGQLVEYDLVNRIFTCETNEYLIPETRRHCINGISLDPQNRNIFIVHTEGNLYVLERDQHLDPKELVSNSKSKKLSNGNRSSVDGGSKGLSLKTTLSRQHLVHVSRLSPNELVNVSISTNNLLAPLPPPYQRKKFGAS

SEQ ID NO: 10357 - DNA, 3479 bp, DROSOPHILA
cggagagttcgatgctgtgcaagacgcttttcagaatgatgtgcgctgctaatactctaaataattttggaattaattaattctatttgtatacaggcacaaaaggtgaatgaggaaatcaagggccgttttccagtacactatgcagcagattttggacaactgaatgtcctggagtttcttataagcttaggagcagacataaatgtaagtagctcacaatgccaaattactcggccatgaatcattaatgtttcgtcagttactggtttcatatattagtgtacatatatacacgtctgcaccaccttcatttgtttagtcatagtctcaagctaaacaaatgaaccaggtgtgcacctaagacatgccggtcttcgtataataatagaacttaattgtaattaactaatatttattgaagagaaaggacaaacatggtattacccccattctggctgccatttgggaaggacatacgagctgtgtggaattacttctaaaaatggtttgtgcttccttgtttctacatatacgccaaataaacatgttttcgattgcagggagctgataaaaatggttctactccagatggccaaagctacctcgaggcggcggaaaaagacgagattaagaaactccttgcataatatgtacatgtcattttaggatacaaaccttatgtttcagtatcaagtacacttttaaatacagtcgtgtatagcttttaaaaatgtcaactatttatttcgatgctttggaaaaattgatacaaaaatattccacttttatataaacaaaatattgcgttttttattatttttgagtatatacactttatttaatataaaagttttctgatttaatcaaagtcagctgatatcagctgatctttgccttaaaaactgatatggaatctcctatctggaatactaggaatatcgataagtgttgaagtgccgtcactagccaagaacacgatattttctattctcagctgtttctaaaaccggtgcgtagaaattcgcgcacaatgtttcaacccgaaaaacatgggcttgagcccgactttcagcttactaagtttaccacccacaccgggtgaagttgcaaaatcccccaaaaagtactggagaagtacctaaggggaacagaaatagaaaataagaataatgatggataccttatcggtgagagatattactttgtataatcagcagatctcgagattagcctaatcatatttttaggctctggaatggactgtgcagttataccactcaagcggcacaaggactatttgcttattcaaaccgttgacttcttctatcccatggttaatgatcccgaattactgggtcgtattgcgctagctaatgtcttgagtgatgtctatgcggttggggtgacgcagtttgatacagtggagatgatcgtcagcacttccacaagtttcagtgagaaggaacgcgacgttgtgattggattggtgatgaagggtttccaaaactccctgaaggcaaatggctatcgtaataccccgctgattattaggcaattgaagatcaatccgtggtgcattattggtggcatagccacatctgtctgccgtagcgaggaaataatactgtaagtatttgcttacgatcatattgtttatttattaaaatatcatgaccatttagaccgtcaaacgcgcagcccggcgatgtattggtcctcacgaaacctttgggcggtcaaatggcgatggatgctcacctttggcagcttaaccagaccgaaaagtacaagaaactgctgtctgaatgtagtgatgctgatataaaagaaacctttgaaatagcagtgaaatctatgacctatttgaacaaaaatggttagtacttccttggtattctttgtatttaagactaaccaatacttatttcagccgccctcttaatgcacaaatatcaagcgcactgtgccactgatatcaccggatttggtttactgggtcacgccaataatctagcacaattccaaaaggaaaaggttttattccaaatcaacaagttgcccatcatcaaaaatgttcttaaattcagcaccttggtgggccaaagcacaaagtttcgttctggcagatcggtggaaacctctggaggccttttaatatgccttcctgctgatgccgctgataaattttgccgcgactttgaagaagctaccaacggagagcagaaatcctttcaaattggacatgttacagccgcaaatgagtctgatgcagttctgtgcgaagatgtagagtttatcgaagttagcctttagttaagtggtggtaattaatcattcaacttatgaggattatttcttaaaggcctctggctcggaaatagtctgaaccttattgtacacgcgataattttgatgattaacgaaaccatttaatcgagtttggttatcgcgataataaaatcgtttgtcgatttacaaatcatcgaatcttatcgaacaatgttttctaactcggtagttaacgcatattttggtgttttcctcccttcccacatcgcttttcacgtttatatttaatttatgcagacttttccagtatatggcacccatgggctacgatataccaacagtcacatctgaacaaacacatgttcgcgaggcagttgtccttatttggtgctttataccgttagtagcctccccacgcgaaaaacacccctaacgtgaaccactaaaggacggcaaaggacacggccaaagccgaaatatttggatatctaaaataacgaatagaatgccaagcattcggaatttggctctaaaataagctggcgcaatcaaaaatcgcccaattcatttagtgacttttgtttcgagtgaaagttgccgtgaaagtgtcgcagtcaacacaatccaatccacaaaatgttcaggagcaaaaatgaggggaacattgtgtacaaatgcactgtgcgactcctcgatgactccgatgtcctagagtgtgaatttcaggtttgtgctgctcttgaactctgtcaatgttaacctaattggaccggtcattggatgaatcagttgctgaactcgaaaatcactgctcatctgcaatcgatggagtatttctttctatccgaatttgtgctaaaattaaagatactgctattttagataacccagtgcacaaatataatgttaaatttaatgggattccgttgtttttatttttccgtccattcgcgagtgtctcaagtaaatacataaaaacatactaacttattaatatattttggtaccttgcgttcggctgtaaacagatgggtggctaacgccctttctgcttgccggcaaaaatattgatgtagtaatccccaaaaagcatgctattaaagctgaaaatgaaatcttcgaaatttgtggtcaattcgcatacttctaagtatttgtacttatagtaatttattaagctttgaaat

SEQ ID NO: 10358 - DNA, 1309 bp, DROSOPHILA
tttctaaaaccggtgcgtagaaattcgcgcacaatgtttcaacccgaaaaacatgggcttgagcccgactttcagcttactaagtttaccacccacaccgggtgaagttgcaaaatcccccaaaaagtactggagaagtacctaaggggaacagaaatagaaaataagaataatgatggataccttatcggctctggaatggactgtgcagttataccactcaagcggcacaaggactatttgcttattcaaaccgttgacttcttctatcccatggttaatgatcccgaattactgggtcgtattgcgctagctaatgtcttgagtgatgtctatgcggttggggtgacgcagtttgatacagtggagatgatcgtcagcacttccacaagtttcagtgagaaggaacgcgacgttgtgattggattggtgatgaagggtttccaaaactccctgaaggcaaatggctatcgtaataccccgctgattattaggcaattgaagatcaatccgtggtgcattattggtggcatagccacatctgtctgccgtagcgaggaaataatactaccgtcaaacgcgcagcccggcgatgtattggtcctcacgaaacctttgggcggtcaaatggcgatggatgctcacctttggcagcttaaccagaccgaaaagtacaagaaactgctgtctgaatgtagtgatgctgatataaaagaaacctttgaaatagcagtgaaatctatgacctatttgaacaaaaatgccgccctcttaatgcacaaatatcaagcgcactgtgccactgatatcaccggatttggtttactgggtcacgccaataatctagcacaattccaaaaggaaaaggttttattccaaatcaacaagttgcccatcatcaaaaatgttcttaaattcagcaccttggtgggccaaagcacaaagtttcgttctggcagatcggtggaaacctctggaggccttttaatatgccttcctgctgatgccgctgataaattttgccgcgactttgaagaagctaccaacggagagcagaaatcctttcaaattggacatgttacagccgcaaatgagtctgatgcagttctgtgcgaagatgtagagtttatcgaagttagcctttagttaagtggtggtaattaatcattcaacttatgaggattatttcttaaaggcctctggctcggaaatagtctgaaccttattgtacacgcgataattttgatgattaacgaaaccatttaatcgagtttggttatcgcgataataaaatcgtttgtcgatttac

SEQ ID NO: 10359 - protein, 315 aa, DROSOPHILA
MDCAVIPLKRHKDYLLIQTVDFFYPMVNDPELLGRIALANVLSDVYAVGVTQFDTVEMIVSTSTSFSEKERDVVIGLVMKGFQNSLKANGYRNTPLIIRQLKINPWCIIGGIATSVCRSEEIILPSNAQPGDVLVLTKPLGGQMAMDAHLWQLNQTEKYKKLLSECSDADIKETFEIAVKSMTYLNKNAALLMHKYQAHCATDITGFGLLGHANNLAQFQKEKVLFQINKLPIIKNVLKFSTLVGQSTKFRSGRSVETSGGLLICLPADAADKFCRDFEEATNGEQKSFQIGHVTAANESDAVLCEDVEFIEVSL

SEQ ID NO: 10360 - DNA, 4920 bp, DROSOPHILA
tttaagactaaccaatacttatttcagccgccctcttaatgcacaaatatcaagcgcactgtgccactgatatcaccggatttggtttactgggtcacgccaataatctagcacaattccaaaaggaaaaggttttattccaaatcaacaagttgcccatcatcaaaaatgttcttaaattcagcaccttggtgggccaaagcacaaagtttcgttctggcagatcggtggaaacctctggaggccttttaatatgccttcctgctgatgccgctgataaattttgccgcgactttgaagaagctaccaacggagagcagaaatcctttcaaattggacatgttacagccgcaaatgagtctgatgcagttctgtgcgaagatgtagagtttatcgaagttagcctttagttaagtggtggtaattaatcattcaacttatgaggattatttcttaaaggcctctggctcggaaatagtctgaaccttattgtacacgcgataattttgatgattaacgaaaccatttaatcgagtttggttatcgcgataataaaatcgtttgtcgatttacaaatcatcgaatcttatcgaacaatgttttctaactcggtagttaacgcatattttggtgttttcctcccttcccacatcgcttttcacgtttatatttaatttatgcagacttttccagtatatggcacccatgggctacgatataccaacagtcacatctgaacaaacacatgttcgcgaggcagttgtccttatttggtgctttataccgttagtagcctccccacgcgaaaaacacccctaacgtgaaccactaaaggacggcaaaggacacggccaaagccgaaatatttggatatctaaaataacgaatagaatgccaagcattcggaatttggctctaaaataagctggcgcaatcaaaaatcgcccaattcatttagtgacttttgtttcgagtgaaagttgccgtgaaagtgtcgcagtcaacacaatccaatccacaaaatgttcaggagcaaaaatgaggggaacattgtgtacaaatgcactgtgcgactcctcgatgactccgatgtcctagagtgtgaatttcaggtttgtgctgctcttgaactctgtcaatgttaacctaattggaccggtcattggatgaatcagttgctgaactcgaaaatcactgctcatctgcaatcgatggagtatttctttctatccgaatttgtgctaaaattaaagatactgctattttagataacccagtgcacaaatataatgttaaatttaatgggattccgttgtttttatttttccgtccattcgcgagtgtctcaagtaaatacataaaaacatactaacttattaatatattttggtaccttgcgttcggctgtaaacagatgggtggctaacgccctttctgcttgccggcaaaaatattgatgtagtaatccccaaaaagcatgctattaaagctgaaaatgaaatcttcgaaatttgtggtcaattcgcatacttctaagtatttgtacttatagtaatttattaagctttgaaattacttttagccaactggtacactttgtggttgtttctatgtagttctaacccccatttcacttccttgagggtgtaaacaagtcatacaaattaccattttttgggaggtgagagtatttggaaagtgaaaataagtaggaaagactaatgactaggacatatttaacctctaaagtatgcaatcattttcaggagtttaaatatatcatatatataaaacgtataataaacaaaatataatatcaaaatatcccatattttacagcccttccataagggaatatacctattggagtacttgtgcggtgagttggagatcaaggagaaggattacttcggtttgcgatatgttgactcctccaaacagagggtaggtataactatatataatataaatatttgtctaattaacataaacgtttgtgaataaattataaacagcactggctcgacctgtccaaatcaattattaagcaatgcaaaggtgagcaatgtttaaaaacgtattagctttataaactacaacttttatcttgtcttcagaaatggatccactattgttttcgctgagagtaaagttctaccctgcggatccatttcgactgaccggaaatgcacggattatgctctatcagcagttaaagagggaccttcgacatggtcgcttgtactgctccttgggcgaggcggctgcactgggcgctctaatagttcaaggtcgggatgaacacctcttaaatgaattaacttgctaactatatatatactatttcctgtgcagaggagctgggcgactataacgaagacgtgcatgtgggcagttacgtatcttccatagaattagcactgcggcagacggagtgtctggagaagaagataatcgagctgcataagaagcgagagcccggacagaatctctccctggccatggatgagttcctgggcatagctcgcggcctggagacctacggcatagatccgcatccggtcaaggatcaccgcggatcgcagcagtacgtcggcataaataatacgggcattagcacatttgtggccggcaaaagatctcaacattttcgctggaacgaaatacacaaaatcaatttcgagggcaaaatgtttatagcgcatctcagctatacggacgctagtcgtgaaccagtaagttgttgaatcatgattccataaaaaatgattgcctattttgtatattccagaaaaaacatactgttggcttcaagtgtccaactggcgcagcttgtcgatacttgtggcgatgtgccattgaacaaatgctgttctttacgtgagaatatattgtatatacttaatacagattcaaattaacttagtagcttcatttgcagattacccaatagccaaagtgcagctgtgatttcgggcggaggcttcttctcctggggcaccaaattccgatacaccggaagaactgagcgtgaaattttgactgaaaacataaatgcgttgcgggaacaaaagaataactcgaactcgagcaagcgaaaggcgagcagtgtgccagccacgccgtccagtccacaaggggatttagcacaaataagtaagttctttctagttaaattgagtattagccactcatattgcttctattttgaagaatataaacgaatatgtctgtagaattcgcgttcatatgctaagtttatcattatttacacattcattattattatattttcaggatatagcagcttgccgagatccacgatgtcggagcctttgggctacggcatgccaaatggccatttctatgggcacgaccatgggatgagcgatgcaaatgggggcatccaaatctccagcctggagccagtctgcgaggaggcacgcctgcgatcgtcgaacatagatggggtcaactatttggccagccagatcggtggctatgcctatcgggactccgtcgagcattcttccactgagagcggcctgaccgtaaatggttacgatcatccgaggaaacacaatgaggccagacagcacggctcctactcgcccaatctgtactacggacaatcggatggcgccgtgaactccagttcgccagccgatagcttcctgcacgcggatccatccacgcgaaaggttaagaagttccgcaaattccacctactgcacgccttcgttccgtccgtgatttttgttgctttcgcgatggccggaacggctgtgttcatcatggaatccgaatcggaggccttcgagcagctgcgcaactcacccgaaatgctttgtctgcgctatcagtactatcagccactgaaggagttcgttctggagaagttgggtcgaagtgggaagtaggagcttctacctatggaagatccacctaactaactatggtcccagttactccagctgcatcgggtattttaatagtgtacttaaggcaattctttaatatttatgctataatgattccatattaaaaccaaagcctgaaatttaattttaacattaatacaatttgttttgattgggtgaaataaaactttggtattgaaccatcatttgaaaaatcatttggaaaacaaaaatttaagaatgagatgatcaattgaagcattagatgatccacgatcacgttcaaaaacagttcttttatttgtcgatattggttttaagtcattcttattcattagatttattaagtaagactttaattaaataaataaatgtggctatcctttttattactttggtgctagacgcaattccaccgcaccatcgattgaatgtacatgtctacgttctactaccaggtggtcactagagcaccatgtccgcctgcagacccaacgattccgagtgcttcttggccttcatccggagatcggctatcgaagagctcttgctgtgggcggcggcgaaggcggccagatttatggagtactggggcacagaaaacaatccagccggcacggttccattagttatagcagctgcgtactgaaatcagcaaaagaatagatatatagatacatatacattaaattgtatctattttgcttaactcgtattgggaccattagaaataaagattatattcaatatttagaagaattttcttggcaaggattcttcagaatctcatatttttatgctcttagtacatacaaacttcaatgtgaaatatttcaaatgaaaaacggcttttttccaaactttgtcgtataagttagttatcataaaaacgatacgcattattataagtaattaagcttttaagctttgcactaatgaataacttttcgatggtttaaataaataaaatctttaaaattttgtcgagattataaaattg

SEQ ID NO: 10361 - DNA, 1741 bp, DROSOPHILA
tcaacacaatccaatccacaaaatgttcaggagcaaaaatgaggggaacattgtgtacaaatgcactgtgcgactcctcgatgactccgatgtcctagagtgtgaatttcagcccttccataagggaatatacctattggagtacttgtgcggtgagttggagatcaaggagaaggattacttcggtttgcgatatgttgactcctccaaacagaggcactggctcgacctgtccaaatcaattattaagcaatgcaaagaaatggatccactattgttttcgctgagagtaaagttctaccctgcggatccatttcgactgaccggaaatgcacggattatgctctatcagcagttaaagagggaccttcgacatggtcgcttgtactgctccttgggcgaggcggctgcactgggcgctctaatagttcaagaggagctgggcgactataacgaagacgtgcatgtgggcagttacgtatcttccatagaattagcactgcggcagacggagtgtctggagaagaagataatcgagctgcataagaagcgagagcccggacagaatctctccctggccatggatgagttcctgggcatagctcgcggcctggagacctacggcatagatccgcatccggtcaaggatcaccgcggatcgcagcagtacgtcggcataaataatacgggcattagcacatttgtggccggcaaaagatctcaacattttcgctggaacgaaatacacaaaatcaatttcgagggcaaaatgtttatagcgcatctcagctatacggacgctagtcgtgaaccaaaaaaacatactgttggcttcaagtgtccaactggcgcagcttgtcgatacttgtggcgatgtgccattgaacaaatgctgttctttacattacccaatagccaaagtgcagctgtgatttcgggcggaggcttcttctcctggggcaccaaattccgatacaccggaagaactgagcgtgaaattttgactgaaaacataaatgcgttgcgggaacaaaagaataactcgaactcgagcaagcgaaaggcgagcagtgtgccagccacgccgtccagtccacaaggggatttagcacaaataagatatagcagcttgccgagatccacgatgtcggagcctttgggctacggcatgccaaatggccatttctatgggcacgaccatgggatgagcgatgcaaatgggggcatccaaatctccagcctggagccagtctgcgaggaggcacgcctgcgatcgtcgaacatagatggggtcaactatttggccagccagatcggtggctatgcctatcgggactccgtcgagcattcttccactgagagcggcctgaccgtaaatggttacgatcatccgaggaaacacaatgaggccagacagcacggctcctactcgcccaatctgtactacggacaatcggatggcgccgtgaactccagttcgccagccgatagcttcctgcacgcggatccatccacgcgaaaggttaagaagttccgcaaattccacctactgcacgccttcgttccgtccgtgatttttgttgctttcgcgatggccggaacggctgtgttcatcatggaatccgaatcggaggccttcgagcagctgcgcaactcacccgaaatgctttgtctgcgctatcagtactatcagccactgaaggagttcgttctggagaagttgggtcgaagtgggaagtag

SEQ ID NO: 10362 - protein, 572 aa, DROSOPHILA
MFRSKNEGNIVYKCTVRLLDDSDVLECEFQPFHKGIYLLEYLCGELEIKEKDYFGLRYVDSSKQRHWLDLSKSIIKQCKEMDPLLFSLRVKFYPADPFRLTGNARIMLYQQLKRDLRHGRLYCSLGEAAALGALIVQEELGDYNEDVHVGSYVSSIELALRQTECLEKKIIELHKKREPGQNLSLAMDEFLGIARGLETYGIDPHPVKDHRGSQQYVGINNTGISTFVAGKRSQHFRWNEIHKINFEGKMFIAHLSYTDASREPKKHTVGFKCPTGAACRYLWRCAIEQMLFFTLPNSQSAAVISGGGFFSWGTKFRYTGRTEREILTENINALREQKNNSNSSKRKASSVPATPSSPQGDLAQIRYSSLPRSTMSEPLGYGMPNGHFYGHDHGMSDANGGIQISSLEPVCEEARLRSSNIDGVNYLASQIGGYAYRDSVEHSSTESGLTVNGYDHPRKHNEARQHGSYSPNLYYGQSDGAVNSSSPADSFLHADPSTRKVKKFRKFHLLHAFVPSVIFVAFAMAGTAVFIMESESEAFEQLRNSPEMLCLRYQYYQPLKEFVLEKLGRSGK

SEQ ID NO: 10363 - DNA, 7356 bp, DROSOPHILA
ctgaggtttatcaaagattctgcgattcactcggtaattgtaaaattgtaaaatgcaattaattaaaccaaagtggatttatgctttgaagcgaataatttgctaagctgagcattcatcacttatgctatggaagaatttaaaaaagaaaatcacagatttatgtgtgccaggtgtgaaaagatatgcacattcacgccctttaaaatttgtttatgtttattttgagtagattttatggagcaccttgcctgaaaacttaaacttgaacttggccaaatgtctgactggataattaaattactctatcgcagagtgcagcgaaataaacaaatgaaagcctttaaactttgttgtgtttgcttttagccaaattatctggtgctaaaactttgtcatatgggaaaaagttttaatgtaattgcaaaatgattttagtttcactagattttcggctgaaataaaaaaaatgaaatggctttattgaaagtttgggaatatttttgagagtgatccgcacttattgccagtgggattaggtggagcccacacaaatatgtatctttgggatacaagtatgcgcttttgactaagcataattgctggcaaattgcttgaaatttgttctgccaaccatgaaagcgaaagggaaacgacttcaataccagatatctggcacacttctgtctgagataattctcaatctttttttttatttccctccacttttcacgcggtgacgtcacaaagagtttccgccgggcatccgcggtttgcatctaaatttgcttttcccgctccttccctgcgtcaccatggttttatttcgggcgattttggcatcgggcaaatctatatctgcccgctgacgtcgacgtcgacagaagcggcagcggcagcggcattagcctaacctaaaatcgttttcagcattttcgtaaattatcttaggccaaatggaaaactgtttcaacaaacctgcgtcagttgaaatttgtgtctcaaacgcgccacacgctaatttgcatttgcatttcactttcaaatctaataattcacaatggctgtaagttccacaagcttcgtaaaggataattaagtgtcctgggtgtattaaattaaatcgagcaaattattattataatttgtattattgagtatttgatacattttggatttttctctaagaatgtccgagtatcaggcttaattgaattgccaatttcctcattttggatttttcgtttccgatttctctttcaaagtgaaaaaagcctgaaaaaggctgcctcacaaaaaaaaaaaaaattgagctgatataattgtttatgaaataaaattattcaaccgttgatagtagaaaagtcacgtagttgtgaatatacccattcaattaatatgcacactcgttcacagagaggtatcaaataaaacgaaacaaataaggaaatcaacaaattaaagtgaagcgaaaaaagtgcgaagtaaatacaaaatacatttttgaaaaagtgccaaatatcagcatattcatttgtatgaaaatgcttattaaaacaatatattgcccgttgatttatgcctttatatacatttacgtacgtttataagcagtaatcagctcacacaaatgcataaagcaatcagtgtttgtatgtatttataattaaataagcaattaaaagacaaaatatttaattgcaaacagcgcgagcgatttaattaaaaatttcttaaattggttaaatatttaaatagtcaattaacatttggcccagacatatattgtgtggattatatacatattatcctacttattatcctacattgtataaccagatcctgatgccagaggctcatgtagagttttctggccaagtgatttcagctacgcccactcgcagcagctgccagatcataattcattctcatatatcgcgtatttgtgctatttatttcccctatatattaaaataaaaaatcacttagttgacagtctggccgggggatgacaaatgcccttgggccattgggccattgggatgcccggtagttaaccagccattaattcccatcgaatcgatggaaaagagtggcctccatttggtcgcaaatcactcaggacgcaggactttacaattcaatacaaacaaattacgcatttcatgcatcattcggtattcggcattccttttgcactttcgattcataattaatttgcgaattttccgctgttgacatttgtctctcaataatgctgacaagtttttgcgacagacagtcaaagccactgggccataactttgttcttaattgaacttaattatttgctgaattatgcggagtgatggcacagatgcataaaaaaacatttggcgaccggtgtctttgggggccattggattttttttttgtttctttgctctttgactgattttactttttataattaattcccgccgacctggtgacagtttgtgttgcaaaaactttcaatttatgaatacaaattacgatgtgatacattttttagcagcagtgtgcatttattatgaatgttcagtatttttttttttttgaacgaacgccatatgcttataatatattttttaagtccccttttctgtgtagtatagttataatcatgaccttttttggtcactccggactatgacatattttaattaatgcatatatatttgcgggttttgatttattgcatttttaaggaaaaattctgtaatgatgacttcatgctttaaacaaaatttggaatttcgaacaatttcaatgtttattgctgcgaaaaggcaaactgttgagccaaaatatcgccactaatgatcagccaaaaacccaaacaattcgttgacgagcgtctgccgctttcttggcaacaatgcaaaggccataaccataaagtccaagggaagacgcgaaattttaatgcacttttgcatagcttagctcgtcttttacaatcccctcaaggccacgaggcggcgtctgtaaaaaataaacttttcataagaaataaatgatataaaacagcaaacaaaaagagaccgtctgattgtcagcccccttgtgtttgggcaaaatgctcgtttcacttggttaatattggccagcatccgccaattggcagctggccaaatgacaaattgaaataacagcagcaaaatgagcgtttatcttcatgtgcaaatgaaaatttttatttatgccagcagccggaaaaaggcaactaaaaagagggcgccattcagccaaacaaaaaatcaccgcccaagtcgagggttatttgaaggtcaatttaaagcaacaaaataaatacatgttttgaaaaaatttcataaaaattaatacttgtttaaggacgaagatacatttcattttcttacttttagtcttacttttttctagtaagttcaacgcatttctgaatatttttcaaatcaatttgattaaactcacggaactactaatactaaaaataagtcaagttgtattgattgccatgataccaattaggaaatagcttattaaataataatactaataaaataatttatatttgaatagatatctataaaaataaataataataataataagtataatttatataagtataaataaattactgaattacagatactgaaacatccgtatagggtcgagctataaatcgtccttctagtgcatcctagtaaatcattgtactctaagaataacggatgtattcgccacatgtccttaaagtattaaaggtctcgatagtatttcccctacgtgacttttattcccagattgtcggtctgaaatgaactggcagtattggcactggctgaccacaatcgatatcacttagctgttcatcacctataaaatgatttttttatgcagcgacctggacatggggggtatacagagagaaaagaaccaactgccaagcggccaaccagataaaccaattaataatgagaaaacagagccaagagccaaacgtgaaatgcaattctatcagaagatcaacagcaacaacaacgctctctggtttgtttgtacattcaattaaaaaaacacctgaaaatatattgaaataaaaaaaaaaaaaaagacgagaaataaactcgtcttcgaaatcgaattggaattaaagcaattgcgaatgcaaattgacgtacaattcattaaaatccccttggctcattggttgccattaaagcgtgccgatggctcggttgccgtccaagctcgatttttatactcgaaaatatacacatactcgtatttacgcataaatacatactttaaataaataaataatttccctccctggaaatatgaaaatgccgttgccatgagcttggatgtgcaacagactgttgtgcagctctcaaataataacaataaataaaatggcaaaagtaacgaatatttaaaatgcaaaaagaaggaaaagttcaaattcgttataacccgtgtaatcatggctagaattaaaatataaccaggtctatcaaacttattttctttttctatcccagtattgaacaagcttctttaacacctttttcgctgggtagaacaaaaacatgcattatgttagtaaaattaaatggcatatattgtatgttcggctacaatgttattggtattgaatgttattattttttaatgtttgcactttgtgtgaaatttgacattttgcgggcattttggtttcgaccaaaaaatttatacgattcagaacgcctggccacaaatcaaatgacagcttaaaacgtacaaacaaaaagccgcaattggccggcaaagcaataaaaataaaataaaaatcgccacgaacaatggacgataaattagcagaaatgggcgaaatattaatgagcctagatgcatataagcatcggatttcaattacgaaaatatttcagtttggtaattgttgcacataagcactgctgaacacgggataaatattttatgcgcgaatatacaatagcattgtttttaattagcaatacttgttctggggtcaattagatttgtgttggcgctgccaagagggcacaacaatatggaagttggttgaaatttctttgacaataatcaaatttaaagaccacaattcagtttgtttgaatgaactgtgcgacggcaattgaccccagagtgaatttattgccttcacgtaaatttcaattaaacagttagtggctttccctgtcaactgtcccataaaatgctcgaatgaacggacaggactcgcggtgtcggaatcaaaattaattaattggaaaatgaatctatttctggccggcgctcttccagtgccgcctctgttccgctttgtttgtatctgccttgatttgggcattttccaaatggaatcacacggacgtaggacactaagccctcatgctgacccttgaactctgtccaatctgcgccggggatttggcctgttcgctactcgacaatttcatgaccctcctggctggccttgtttgtgccgcaattgtctactattacagcaaattgatttgcctggcacttagcagcagctatcttgtttcaaccgcctacgtccacttttccacgttctaatttcccattttccgccgtagccacgcaacaaggaacaggaacaggaagtgctcaactgggtgttcgccgtgattggcgagaaggtccccagcgggcagtacgaggacattctcaaggacggcatctggctgtgcaagctggccaacaaactggcccccggatcggtgaagaagatccaggagcgcggcaccaacttccaactgatggagaacatccagcgtttccaggcagcggtcaagaagtacggtgtgcccgaggaggagatcttccaaaccgccgatcttttcgagcgtcgcaacatcccccaggtcaccctctccctgtacgcccttggacgcatcgtaagtattacccaatggatggattgattataaatctcttttttcaaaataatctgaataattttttccctatccgcagacgcaaaagcaccccgagtacactggccccacactgggacccaagatggccgacaagaacgagcgcagcttcaccgaggagcagctccgtgcccacgagggtgagctcaacctgcagatgggcttcaacaagggcgcctcgcaggctggacacggtggtatgggcaacacccgccacatgtaaggcaccaccatcccaaccgatcccggaaagaaaaacaccacaacacactcaaccacacaaacaccgaaatctaattagttcaaacaaaaagtgggttttgtatctcgtgcgtcatggcgcatgatttaagcagtgccaagctctaaatgtaatttatataatatgaaacaaataaattaattaattttaatataaatatcaagttgttatgttccgccagtctgcgtggattagcattatgctgttgttaattagcggccagagttgtgcgattgccggcagttagtcgagcggtttaagtggttttcccaccgcattctattcccccatctcctcatcaattccatccaggtggggggccatttccatttgctcacctcgcatgagacacctttatttctctgtcagcgactgtggctccttcggatgccgaggctgttgctcttccgttgcctggtccaccagagattacacaaattacaatttcaacgcctgcactgacagcgataagcataagaaatgtcaaggccatttgtatttccatctgggctggtgtgtgtccatagggtatgaaagacaaagactcaggtgagttggcgaaaaaagggccttgaaagtctgtttgattttctgtgcacggggagaaaatatgtggattgatcctatgaaattatggaataatagacaatagtatacactattttaaacattttctgataaatactcagaagccattatttacattaaaggtaaatctattattttacaaatcttgagatattttttggaaataaaacaacatatttgagaaaaaccattgcgtatttatagttttaaataatattctttaacgagaccgatacgagtattctccaatcattttttgaatgtgtcgttacctttggcatccttaagctgcaggcaagcaacgaactgcgaatataatgacggccactgaacaaacattcgagcaaccgaagaaaaaggaaaaacttatcagacagacagtcaaaatggcgaatggctttctgtacgtaagtgtgtgcgtatctgaatacttgctagtgtttgtgagtatgccaatgatcagacaaaacggaaataggatgtgaggtggtatgggtgtgtattgggggt

SEQ ID NO: 10364 - DNA, 707 bp, DROSOPHILA
ctcaaacgcgccacacgctaatttgcatttgcatttcactttcaaatctaataattcacaatggctccacgcaacaaggaacaggaacaggaagtgctcaactgggtgttcgccgtgattggcgagaaggtccccagcgggcagtacgaggacattctcaaggacggcatctggctgtgcaagctggccaacaaactggcccccggatcggtgaagaagatccaggagcgcggcaccaacttccaactgatggagaacatccagcgtttccaggcagcggtcaagaagtacggtgtgcccgaggaggagatcttccaaaccgccgatcttttcgagcgtcgcaacatcccccaggtcaccctctccctgtacgcccttggacgcatcacgcaaaagcaccccgagtacactggccccacactgggacccaagatggccgacaagaacgagcgcagcttcaccgaggagcagctccgtgcccacgagggtgagctcaacctgcagatgggcttcaacaagggcgcctcgcaggctggacacggtggtatgggcaacacccgccacatgtaaggcaccaccatcccaaccgatcccggaaagaaaaacaccacaacacactcaaccacacaaacaccgaaatctaattagttcaaacaaaaagtgggttttgtatctcgtgcgtcatggcgcatgatttaagcagtgcc

SEQ ID NO: 10365 - protein, 169 aa, DROSOPHILA
MAPRNKEQEQEVLNWVFAVIGEKVPSGQYEDILKDGIWLCKLANKLAPGSVKKIQERGTNFQLMENIQRFQAAVKKYGVPEEEIFQTADLFERRNIPQVTLSLYALGRITQKHPEYTGPTLGPKMADKNERSFTEEQLRAHEGELNLQMGFNKGASQAGHGGMGNTRHM

SEQ ID NO: 10366 - DNA, 3205 bp, DROSOPHILA
agagccgtcatcatcagatgcctggctgccttacactatttgcgttatgatttctttttaatttcccagcggtatttagggaaaaaatttaataatatcaaatatgagagcagcgagtggtggatgtcctgtggagactggacaagtgcatgtgccgtgtgtcgtgtgtgtttgtatttgtgggcaaacattcaacagcgcacaacaatgcgatctcccgcttttcccgcttatcctctgcggctttcatttggcggatgtgtgtgtgcgttgttgtgtgtgtgtgtgtgtgtctggacttccgcttggctgaatttgtttacacttttttttcgcccgccgccactggcccactcataatttcattttgaaatgtttgcctaagcgacaatttcactcttttttttcacttttttctgttgtttttcacagccggacatatggcactaagcctggcccacattattaaaaccagcgacaaaagacaagcgactctcggatagaccagaaactgggtccacggtccatttaacagactccaggaggcgatggcgatggcgatggcgatggcaatggctgaacctgaacccttggcggcacagcactcagcacgtgatttgcatacacttaggccaggctggcggcacccagtccaagcttttggcccacacttaattacatgccaaatgaaaagttggcggaagcaaacaaaaaattttggggaaaccaaaaatatataaacaggaaaagagcaggaattaaatgtgcgttaaattgccaataaacatggcctgcatctcaatgggcaaagtaaggcgaaaggggtgactaaaacagcaataacacgagggtttaaaaatgtagcttaaaaaaaaagaataataaattgcttaatattttctagtacatctagttagttccagcactttagtgaaaagcgggccttgccttttgtgctgggagttttgggaaactgatagagctacttttcattcccacaacggcagtcacagcgaaaacgcacacgtccaaattttatacttgaacaaaaccaaatcacttcaagaaatattttttttatttttcttttgattatcgtgtcgaaacataaatggaaactgtgcgaaatcgaaaccctccgcggatgaagtacaccgctccaccgaagatggaatcggatttaaacttcaccgagaaggagaagaaaactcttaccgaactgaagcagctctatttggagaccattaacctggatgtggctctgcagcgcgacatttacaatatcgagaagaagtacgaggataagcacaatatcatatttgataagcgcaagaagattctagagtaagtccattaatggtgtttggttaaacaagatctcaattcccccaaaaatcccatcggtgcagtgagtttagaaagcaaaaccacggcgacgtggaaaccaatcagagcgtgcccaacttttggctgagggttctcaaagcatcgtacaccgagttcatcagcaagagggatgagaaaatattagaggtatgttatggatagatccgatttgaaggatatttaaattttaattgaaatttttcccgcgcagtgcttaagcgacatccgttctcggctgtacaacgaacccgtggtgaagtttgatatcgaattccacttcgatcccaatgattactttaccaacacggtgctgaccaagacatatttcctcaactgcctgccggatccagacgatccgctcgcatatgatggcgccgagatctacaagtgcgaaggctgcgtcatcgactggaagcagaccaaggaccagaccaaaaccggtaagccatctgggagcatcaaatttcacagatgttagttgaattcactcattgaccagaaaatcaagagccgtcgttctttgagttcttctcgccgccgcttttgccagaagatacccttgaccccaactactgtgacgtcaatgtaagattgaatatcagcgatctgcgatcctttcacatgcatctcctcccacaggctatgctgcaaaacgattttgaggtgggcttctatctaaaggagcgcgtgattcccaaggcggtgatcttcttcaccggcgagattgccgattgtcagagctccagcggatcggagaccgagtcggaagataccgaggacgagtcggatgccgaagaggaggatggcgtcgacaagtaaacattttacaccgcttatatacagtttacatacatttttaactcgagtcaccgaactattggcctgtccttacccactacataccaaccaaataaacatttcattatacatatttaccaaaaggatctcgcgcgctctttttaatgcctagctaaaggaattgaattgtggttttgatttatacagtgcgtttagcctggcgtgtatatattacaaggactcgaatagtcaaacgtaatactagatggctgagctacagcactcgcttgtagccagcgttgtggatccatcggcttggccatgtcgtcttttttcttaaaaaaaaataaaataatccagcacggcccacttcgacggaatctttacaaacaatattctaaggagccaccacctcctgtggcggtggcgatttcggtggctgctcgtcgtcggcgcgcggcggtggctgcagcatcaccaccaccgtgtcatcctcttcctgtgtctccagctccggaagtctttcaaactcctccaagtgattggcgaccacttcgcatttcggtttggagatcttgaagcgccgaattgccggaagcgtaatgctggtgccactaacatcgatatacaccagattcggagagcactgcaccaggtgctccagggtatgatttgtgatgagatggtagtttcgcaacgacagtcgctccagtttattgtctggcgagcgattgatgttccggatccagacaacgtccggttgcaccggtcgatcagctcggccaaagctatacatcgcccgatcggtgacatagtattgaggtgttgtctgacaggaaggcggacgtgggcgcactcgtcgagcatagtcgcgatccagtggctcgagcatgttccaaaacatcggatgctgaacaacctgatcgtagttcggacgcggatgcgtacgatggcgtcgcgtcggcatcagaacattcatcgggagtgagaattgttgattgacatagatataccgttgctc

SEQ ID NO: 10367 - DNA, 963 bp, DROSOPHILA
acggcagtcacagcgaaaacgcacacgtccaaattttatacttgaacaaaaccaaatcacttcaagaaatattttttttatttttcttttgattatcgtgtcgaaacataaatggaaactgtgcgaaatcgaaaccctccgcggatgaagtacaccgctccaccgaagatggaatcggatttaaacttcaccgagaaggagaagaaaactcttaccgaactgaagcagctctatttggagaccattaacctggatgtggctctgcagcgcgacatttacaatatcgagaagaagtacgaggataagcacaatatcatatttgataagcgcaagaagattctagatgagtttagaaagcaaaaccacggcgacgtggaaaccaatcagagcgtgcccaacttttggctgagggttctcaaagcatcgtacaccgagttcatcagcaagagggatgagaaaatattagagtgcttaagcgacatccgttctcggctgtacaacgaacccgtggtgaagtttgatatcgaattccacttcgatcccaatgattactttaccaacacggtgctgaccaagacatatttcctcaactgcctgccggatccagacgatccgctcgcatatgatggcgccgagatctacaagtgcgaaggctgcgtcatcgactggaagcagaccaaggaccagaccaaaaccgaaaatcaagagccgtcgttctttgagttcttctcgccgccgcttttgccagaagatacccttgaccccaactactgtgacgtcaatgctatgctgcaaaacgattttgaggtgggcttctatctaaaggagcgcgtgattcccaaggcggtgatcttcttcaccggcgagattgccgattgtcagagctccagcggatcggagaccgagtcggaagataccgaggacgagtcggatgccgaagaggaggatggcgtcgacaagtaa

SEQ ID NO: 10368 - protein, 272 aa, DROSOPHILA
MKYTAPPKMESDLNFTEKEKKTLTELKQLYLETINLDVALQRDIYNIEKKYEDKHNIIFDKRKKILDEFRKQNHGDVETNQSVPNFWLRVLKASYTEFISKRDEKILECLSDIRSRLYNEPVVKFDIEFHFDPNDYFTNTVLTKTYFLNCLPDPDDPLAYDGAEIYKCEGCVIDWKQTKDQTKTENQEPSFFEFFSPPLLPEDTLDPNYCDVNAMLQNDFEVGFYLKERVIPKAVIFFTGEIADCQSSSGSETESEDTEDESDAEEEDGVDK

SEQ ID NO: 10369 - DNA, 3042 bp, DROSOPHILA
tgtccgatttgatttggcccccactaattaactttttgcattttgccccggctatctcctgttgccacttgattgcttctgtcgacgccgccttccacctccgcccttcttcgccacggttatcccgcctttcgagtccccttttttgaacccacagcagtgcgtacgtcaccggttctggcggggatttggcggacttacggcactgctgctctgcagctaacaatgaaactcgttccgggctgcaaaaacttttgttccacgcccccgcttacggcacagattgcatttctttctttcttttcgattccgtttccgaccgactgttctgttttgtgctttgtgccagtgtgcccgtcgctcactgagccggaaagctttgttgtggcgtccactaccacactgcgttttgcctatgaaccgttattgccactaacaaagaactaaaaaattatcaggttttttaatatgtaaaaatatttttaaattgttttgcaatttcatttagtttagttttgcaggaatgattatatttacgcttcatttttaaatatatgtttacgacagtttcatatatgaaactaaaatgacaaaaaagaaaataaactaaataatttatagtaatctaacagtaatgaaaattatttgcttcacgtctttcgtactcagattaagatgcagagaataaaaataaaacacatttcgctatatctgaatcccttttaataactattcttaaatttgtagttaaaccattcgaaataaaaccatgtggcatactggttgcatgtcacacgcacatgcggtcctttaatccgagtaaaagtaagaaatgattatggtagattgcagtatggctaaattaagttttacatatggtacacagacagcgatgccaatcgaaggtcgtggtccgcgccagaagaagcgtcgaatactctttggaatgcgctgcagcagacggtggcaaggtgacttagtagatggcgtctccaccagctcaaacgactcccgtcgggcgtacatttgttggcggtggggcgccactgggccttgtcatgatgtccacggcattcttgaagaactgcgttttcacaaagtctgtggcggcggaattcagatccttattggcaccatagttacacttgacgtagccatacagattggcggcattcagcgcaatggcgatcattaccagcagtagccatttgaacttcaggccgaatagggcgaacaggaagaagaggccccagaagacgggacagaggatgagtcccagccagaagatgcgctgctcgttcttgttgacccgactctggtaggattcagactgcgtttcattatcaagggcaatctagttagctatgctcgtgactcacgttctttgactcaaacacccagtgcgatacgccatcgtcgtcgacgtagttccaccagcggagaccgaccagcaatctgcccgagatgttcttcaccgtccagaagtcggcggacaggaagagcaccacgaaaacgaagctggtgatgaaggagtcgctgaaccaaccgcagaacatatagatcaggatggcggcgcccctgaagaacaggtggaagaaggtgacgtacgggtgcctgtggagtacacgcgttgggttgggttggggtaaatggaattgatcaacaaacattatggttctgcatacgtgtatttctgacccgcgcgactgggatcccgcatctcgtcctcctcgccaaagggtatcgtgtcatcgtcgagcagcggcacctgtgtaacacgtatgtgggattagtttggcttgcctcgttgtaaaatatgagttttcgtggaaaacctcggatcgtattgtcagaatggcaccccaatcaagcagcttgttaggtgttagtgcggcatacatacatttcttaccgtagcggatgccatgctggtgtagggagtgacttctaattcctagttgggtgcaattttcatggattttcgtggtttttcaggggatttaatatattttcttcgcctgggacgttgttgttgtttctgcctgcgtagccttctatcgttttcgcactgagtcgatagctcgcaggggtgaagcacttcttcgacttcgattgggttggcagcaccataagtaatcgagcttaaacctatcgtatttgaaaattttgcaaacattttttattgagctccccttcattttgtttgtggaattgttatttgcaatagcagcgccaaatgagaaaaaaatgccacttttaagttatttatgaaacataattttttacgcatcatattaagtaataaaagccgaagcaatattatctaagacgacttttatgttctgtgacccggattctcaatgttacatggttgtggctgaaaaccagcagagtgtgcaaaaagttgtactccaaccgcagtggaagccattgaaatgcagcatccatcacttgccaagttagcccacaaacttcatcagtagctcgttgatcgtctgctctttctgtcgaacttaactaccaacgtttcaaaatggaaaaatgccgtgcctcctctaggataatcataatcggagcaggagtttcgggcatagccgccgccactcgactcctgcaaaacaatttccagaatgttcagatcctggaggcggaggatcgcattggcgggcggatcaacaccgtgtattttggtgacaacgtcatcgatttgggagcccagtggtgtcatggaaagcagcaaaattgtgtatacgacatggtcaaggatatgggtatcctgcacgagacaggcgactattacagtcccataaagagggtgagatccaacaaggaggtggttccacatgagttggcctgcaggattcacgacattgctgtgaagagcatgccgagtggacctcacccggttgtgggatcctttggcacccacctgactcagaccttctggcgcaagatcgagtccgagctaccccaagtgaatagggatgtggctagtgaggccttgaatacatttgcgaagcatgaaagctctattattggtgc

SEQ ID NO: 10370 - DNA, 763 bp, DROSOPHILA
gcagaaacaacaacaacgtcccaggcgaagaaaatatattaaatcccctgaaaaaccacgaaaatccatgaaaattgcacccaactaggaattagaagtcactccctacaccagcatggcatccgctacggtgccgctgctcgacgatgacacgataccctttggcgaggaggacgagatgcgggatcccagtcgcgcgggtcagaaatacacgcacccgtacgtcaccttcttccacctgttcttcaggggcgccgccatcctgatctatatgttctgcggttggttcagcgactccttcatcaccagcttcgttttcgtggtgctcttcctgtccgccgacttctggacggtgaagaacatctcgggcagattgctggtcggtctccgctggtggaactacgtcgacgacgatggcgtatcgcactgggtgtttgagtcaaagaacagtcgggtcaacaagaacgagcagcgcatcttctggctgggactcatcctctgtcccgtcttctggggcctcttcttcctgttcgccctattcggcctgaagttcaaatggctactgctggtaatgatcgccattgcgctgaatgccgccaatctgtatggctacgtcaagtgtaactatggtgccaataaggatctgaattccgccgccacagactttgtgaaaacgcagttcttcaagaatgccgtggacatcatgacaaggcccagtggcgccccaccgccaacaaatgtacgcccgacgggagtcgtttga

SEQ ID NO: 10371 - protein, 215 aa, DROSOPHILA
MASATVPLLDDDTIPFGEEDEMRDPSRAGQKYTHPYVTFFHLFFRGAAILIYMFCGWFSDSFITSFVFVVLFLSADFWTVKNISGRLLVGLRWWNYVDDDGVSHWVFESKNSRVNKNEQRIFWLGLILCPVFWGLFFLFALFGLKFKWLLLVMIAIALNAANLYGYVKCNYGANKDLNSAATDFVKTQFFKNAVDIMTRPSGAPPPTNVRPTGVV

SEQ ID NO: 10372 - DNA, 1807 bp, DROSOPHILA
ggttgtagatgtggacctggtacataatataatatatatatatatatatattggatttgaagataagagatttgaactcacctgctgtgagagattgacaaagtcctggaagcgagccgcgcggtagtgcaggaggacctggaagatagacttctcgcgccatttcttggcaaacggacggataaagtcggcggtgttctcgtttagttggccggacttctcgttgaccagcggagggaggcggacgcggtcgcggaatcccctgaaggaactctgaggatccaccattcaacttcaaggctatgctgcgcaagactaactatccgaggggatccgagaccaacacctatgactttaacaatcgccgcggatcggacagtggtgaccaacacacgttccagccgcccaagctacgctcgacaggtcgccggtaccaagacgatgagggctataattcatcatcgggaaactatggtgtgtctaggaagtttggccagcagcagagggctccgaccttgagacaatctccagccagcgtgggtcgcagcttcgaagatagcaatgctagatccttcgaggaggcaggatcctatgtagaagaggagattgcacctggaatcactctttcaggctatgccgtcgatatctaaaactagtgattaagagtaaaaatattaaaattaattgttatgcaaaccataagacaatttagctaaaacccacctaaaattccaaaataatgattgaagttttcttcatcactttctcaaaaacgtttcacacaatggaataaataaaatgtcttgggataaatcgttatttaaattttcacttttttcttaccgcatttcatttttctatctctataaaccacttaattatttaggttatttgtaggtaaatgctaccttggcatactcaaacatttaactttaaagacattgatataaattcagcaattaatttgcattttattgacgtaggataaaaatgggaaaaattcgacgaattaacattgcttattatgcttgcttctttgttacatcatttaaatgatttacttttctcactttaagatctaaaacgcaacaacaatactctcagtatttcataaactatatccattatacattgtatatataaacattaatacctaaacaaaaacgtttataggaatggattgaacaaatactcttttgttcgcaggactttttttgtgtgttcgatagggattgcaaaaaagctaaggaaactgaattgaatcattaactgcacacccatatcgggcatggtctcacaaattctcgatgataaaacaaaactttttccttaaatagtttcacataatatcaatcatccatgttgggctcacgcaatccatccgagtgcattttcttgcccgcaatttccaacatggcccgatcttccaaattgccatccagcacagaacgtttctatgggttaaagatatgattatttatttaatataatattgagtttaatttgacatacgtgaccgtcgccttcttcgtcttcttctttaactggtaagtctcctacggcccaaacttccatgtttcgtattttgaactgtttccgtttacttgggtacgataaataattggtagattaaccacaattgtttaaaataatgttgaattaaaatatagaatctagtggtctgtaaggtgaaacataatcaagattttaatttacactcacctcaactgcacgtagtctcgatatgtagtgcaactttcaacgctttgtccatcgccgaaactgcagtcaatccaaaggccccaaa

SEQ ID NO: 10373 - DNA, 4827 bp, DROSOPHILA
ctccgattgcattggcccatcatttagttggctaacggcagcggtacgtgctgcatgcgtgcggtcggttcgaagttccacacaagtacatccttgcaaccaaaaatacacagctgcaggataagtgtgccaatctgcggcagcgaagaataagcatctaagtcatgatgtatttaccgtacgcgcaattgccggatcctacggataaattcgagatctacgaggagatagcccaaggcgtcaatgccaaggtttttcgggccaaggagctcgacaatgatcggatcgttgccctgaagattcagcactacgatgaggagcaccaggtttccatcgaggaggagtatcgcactctgcgggactactgcgaccatcccaatcttcccgagttctatggcgtctacaagctgtcgaagccaaacggacctgatgagatctggtttgtcatggagtactgcgctgggggaacagcagtggacatggttaacaagcttttgaaactggatcgtcgaatgcgagaggagcacatcgcctacattatccgggagacttgccgtgctgccatcgagctgaaccgtaatcatgtcctgcatcgggacattcggggagataacatattgttgaccaaaaatggacgggtcaagctgtgcgatttcggtttatcccgtcaggtggattccactctgggcaagaggggcacctgcattggatctccctgctggatggctcccgaagtggtgtccgccatggaatcccgcgaaccggacatcaccgttcgtgccgatgtctgggccttgggaatcactaccattgagttggccgatggaaagccaccgttcgctgacatgcatcccactagggccatgttccagatcattcgcaatccaccgccgaccttaatgcgacccactaattggtcgcagcagatcaatgattttatatccgagagtttggagaaaaatgccgaaaatcggcccatgatggttgagatggtggagcatccattcctcacggagctcatcgaaaacgaggacgagatgcgatcggacatcgcagaaatgttggaactctctagggatgtaaagactttgtacaaggagccggaattgttcgtggaccgcggctatgtgaagaggttcgatgagaagccggaaaagatgtatccggaggacttggctgccttggaaaatcccgtggatgaaaacataatcgagtcactgcgtcatcgcattttgatgggggaatcgtacagtttcattggcgatatccttttatccttgaattccaatgaaatcaagcaggaatttccgcaggagttccatgccaagtatcgcttcaagtcgcgttcggaaaaccagccgcatattttctcggtggccgatatcgcctaccaggatatgctgcatcataaggagccgcaacacatcgtgctctccggagagagctactcgggcaagtccacaaatgcccggctgctaatcaagcatctgtgctacttgggtgatggaaatcgtggggccaccgggcgcgtggagagctccatcaaggccatcctgatgttggtgaatgcaggaactccggtaaacaacgactccacaagatgtgtcctacaatattgcttgacctttggaaaaaccggcaaaatgagtggggccgtttttaatatgtatatgctggagaaactacgagtggccactacggacggaacccagcacaacttccacatcttctactacttctacgactttattaatcagcaaaatcagcttaaggagtacaatctgaaggctgatcgcaattatcgttatctgcgagttccgccagaggttccgccatcgaaactcaagtatcgtcgtgatgatcccgagggcaatgtggagaggtacagggagttcgagaacatcctgcgggacattgatttcaatcacaagcaattggagaccgttcgcaaagttttggctgccattttgaacattggcaacatccgtttccggcagaacggaaagtatgcggaagtggagaacacggacattgtgtcccggatcgccgagctcctccgtgtggatgagaaaaagttcatgtggtctctgaccaacttcattatggtcaagggcgggatcgccgagaggcgacagtacaccactgaagaagctagggatgcacgcgatgcggtggccagcacgctctactctcgattggtggactttatcatcaacaggattaacatgaacatgtccttcccacgggctgtgttcggagacacaaatgccatcattattcacgacatgtttggatttgagtgctttaatcgaaatggtctggagcaactaatgatcaatactctaaacgagcaaatgcaatatcactacaatcaacgtatttttatcagcgaaatgctggaaatggaagctgaagacattgacaccatcaacttgaatttctatgacaacaagacagctctggataatctgctaaccaaaccggatggcctgttctacatcattgacgatgcctcacgctcctgtcaagatcaggatttgattatggatcgcgtttcggagaagcacagccagtttgtgaagaagcacactgccactgaaatatccgtggctcattacacgggccgcatcatctatgatacgcgcgccttcaccgacatcaaccgggactttgtgccgccggaaatgatcgagaccttccgctcctcgctggatgagagcatcatgctcatgttcaccaatcaactgaccaaggctggcaatctcaccatgccattcgaggcagtgcagcataaggatgaatctgaacggaagtcatatgccttgaataccctaagtgccggatgcatctcccaagtgaacaatctacgtaccctggcggccaacttccgcttcacctgcctgaccctgctcaaaatgctaagccagaatgcaaatctcggcgtgcacttcgttcgctgcattcgcgctgatctggagtacaagcccagatccttccactcggatgtcgtccagcaacagatgaaggccttgggagttctggacactgttattgctcgccagaagggattcagctcgcgtctgccattcgacgagttcctaaggcgataccaattccttgcctttgactttgatgagcccgtggaaatgaccaaggataactgtcgtctattattcttgcgcctcaagatggaaggctgggccttgggcaagaccaaggtgtttttgcgctactataacgatgagttcttagccagattgtatgagctgcaggtgaagaaggtcatcaaagtgcagtccatgatgcgagctttgctagcacggaaacgagttaagggcggcaaagttttcaaattgggcaaaaagggaccggagcatcatgatgtggccgcgtccaaaatacaaaaagccttcaggggattccgcgaccgcgtccgcctccctccgctggtcaacgagaagtccggccaactaaacgagaacaccgccgactttatccgtccgtttgccaagaaatggcgcgagaagtctatcttccaggtcctcctgcactaccgcgcggctcgcttccaggactttgtcaatctctcacagcaggtccacatctacaaccaacgaatggtggctggcttgaataaatgtactcgggctgtgcccttcgagaggatcaatatgcgcgaagtgaactcctcgcagctaggaccactgccagtgcccataaaaaagatgccattccgcctggatcagatacccttctatgacacccagtatatggtggacccggccaattccatttcccgccaagccttccccaatcagctactaacgcagcacatggaggacgatgagccttgggacagccctctgcaacgcaatccttcgatgacttcttgtgccctgacctacaatgcctataagaaggagcaggcttgccagaccaactgggatcgcatgggcgagagcgacaatatctacaatcagggctacttccgagatccccaacagctgaggagaaatcaaatgcagatgaacatgaatgcctataacaatgcctacaacagctataacagcaactataacaaccagaactggggcgtacatcgatccggatccaggcgcaactccttgaagggctatgcggcgcctccacctcctcctccaccaatgccctcatccaactattatcgcaataatccgaaccagcagcaacgcaactatcagcaaagatcctcgtatcctccgtcggatccagttagagaacttcagaacatggctcgcaacgagggtgataactctgaggatccaccattcaacttcaaggctatgctgcgcaagactaactatccgaggggatccgagaccaacacctatgactttaacaatcgccgcggatcggacagtggtgaccaacacacgttccagccgcccaagctacgctcgacaggtcgccggtaccaagacgatgagggctataattcatcatcgggaaactatggtgtgtctaggaagtttggccagcagcagagggctccgaccttgagacaatctccagccagcgtgggtcgcagcttcgaagatagcaatgctagatccttcgaggaggcaggatcctatgtagaagaggagattgcacctggaatcactctttcaggctatgccgtcgatatctaaaactagtgattaagagtaaaaatattaaaattaattgttatgcaaaccataagacaatttagctaaaacccacctaaaattccaaaataatgattgaagttttcttcatcactttctcaaaaacgtttcacacaatggaataaataaaatgtcttgg

SEQ ID NO: 10374 - protein, 1501 aa, DROSOPHILA
MMYLPYAQLPDPTDKFEIYEEIAQGVNAKVFRAKELDNDRIVALKIQHYDEEHQVSIEEEYRTLRDYCDHPNLPEFYGVYKLSKPNGPDEIWFVMEYCAGGTAVDMVNKLLKLDRRMREEHIAYIIRETCRAAIELNRNHVLHRDIRGDNILLTKNGRVKLCDFGLSRQVDSTLGKRGTCIGSPCWMAPEVVSAMESREPDITVRADVWALGITTIELADGKPPFADMHPTRAMFQIIRNPPPTLMRPTNWSQQINDFISESLEKNAENRPMMVEMVEHPFLTELIENEDEMRSDIAEMLELSRDVKTLYKEPELFVDRGYVKRFDEKPEKMYPEDLAALENPVDENIIESLRHRILMGESYSFIGDILLSLNSNEIKQEFPQEFHAKYRFKSRSENQPHIFSVADIAYQDMLHHKEPQHIVLSGESYSGKSTNARLLIKHLCYLGDGNRGATGRVESSIKAILMLVNAGTPVNNDSTRCVLQYCLTFGKTGKMSGAVFNMYMLEKLRVATTDGTQHNFHIFYYFYDFINQQNQLKEYNLKADRNYRYLRVPPEVPPSKLKYRRDDPEGNVERYREFENILRDIDFNHKQLETVRKVLAAILNIGNIRFRQNGKYAEVENTDIVSRIAELLRVDEKKFMWSLTNFIMVKGGIAERRQYTTEEARDARDAVASTLYSRLVDFIINRINMNMSFPRAVFGDTNAIIIHDMFGFECFNRNGLEQLMINTLNEQMQYHYNQRIFISEMLEMEAEDIDTINLNFYDNKTALDNLLTKPDGLFYIIDDASRSCQDQDLIMDRVSEKHSQFVKKHTATEISVAHYTGRIIYDTRAFTDINRDFVPPEMIETFRSSLDESIMLMFTNQLTKAGNLTMPFEAVQHKDESERKSYALNTLSAGCISQVNNLRTLAANFRFTCLTLLKMLSQNANLGVHFVRCIRADLEYKPRSFHSDVVQQQMKALGVLDTVIARQKGFSSRLPFDEFLRRYQFLAFDFDEPVEMTKDNCRLLFLRLKMEGWALGKTKVFLRYYNDEFLARLYELQVKKVIKVQSMMRALLARKRVKGGKVFKLGKKGPEHHDVAASKIQKAFRGFRDRVRLPPLVNEKSGQLNENTADFIRPFAKKWREKSIFQVLLHYRAARFQDFVNLSQQVHIYNQRMVAGLNKCTRAVPFERINMREVNSSQLGPLPVPIKKMPFRLDQIPFYDTQYMVDPANSISRQAFPNQLLTQHMEDDEPWDSPLQRNPSMTSCALTYNAYKKEQACQTNWDRMGESDNIYNQGYFRDPQQLRRNQMQMNMNAYNNAYNSYNSNYNNQNWGVHRSGSRRNSLKGYAAPPPPPPPMPSSNYYRNNPNQQQRNYQQRSSYPPSDPVRELQNMARNEGDNSEDPPFNFKAMLRKTNYPRGSETNTYDFNNRRGSDSGDQHTFQPPKLRSTGRRYQDDEGYNSSSGNYGVSRKFGQQQRAPTLRQSPASVGRSFEDSNARSFEEAGSYVEEEIAPGITLSGYAVDI

SEQ ID NO: 10375 - DNA, 4512 bp, DROSOPHILA
tgatacagactgggaattgctggtaagtaagagtacagaatatggaattctaaaaactataattaactcaacttctagggtgaactggactacgagctgcagcccaacgacaatgtgttgtttatatcaactttacacggtggttaaaaaacgttctggaatctaaattataggagaaaagtttatttttatactacaacccattaaattgtattcaaaaaacaaacaaaaacagtttttgactgaatcagaattacgtccctttaccagaggcaaaggcccacacgatggttcgggtagtaaagttttcatcatatcatctagagattgtaagctagcaggttttcgctatttataaaagcacagcattgaacaagcacttgggaattgtagggaagttaaaaatagaacaatccagatgcggtttggcgggtaattcgaagtaaggacaacacgttagttttacattgaagcaacatttattgaatttaaattttcgcttaaaattatttatcgagttattatgaagtatagatatatttttttaatgttcgtttacgattattttaactataggcacttaggttacatatcaactaactgtacgtaatgaagttcgattcagatatgttgggcatcggccacgcccctttttcgggtgctgctcatggctcccatcgatttctgtgtgtgtgtggtgcggatcgttcgattgtgtggactaagaactagatatgtatgaaacttgcttcgacattgacacgctgaattcaataatttcgactgatttttccgataaacaaggcaaaacgaaaagcagcgactatgacaaattaacgaaaactaaaaatgtaataaataataaataacaaaaataatgaaataaaattagcgatcgaacgtaatacgatgatactacatgggatccgatgaaaccgttctgctaaagctattaatggggatttatactatatctagatgcgatgctccaggagctcctctatttgccgctttccggactggcggactccgctgcgtgggcgtaggatcgatatcgccgcaggattaccgtggatgcactcgtcgttgaagctccggatgctccagtcgttgatgtggaccaactgcttcggctgctctccgccgccgattgttcctgatccggggtaacgcacatgtccgagacaatgccgctctctgaatggggggatatttacacatattggatattatatttcggattcgaacaggtggcgccaaagcgccaacaacatataacatggatctaaaaacatgcagcacacggacaggcacggattacgggttaggttttggtgtttgtgttggtgttggtgggggattatatacagtaatactggggtgttcttcgagattatgtacagggatcaactactagctacgggatgcatctgggggcctagaagaagtagcacagttcaagctctatacccatggacagttggctgacaatggtcgtcgatcgtttgtggtttcgtttgctgctcctgaatgcgtttccgttgccatttccgtttccggaagtgttgcctccgtcggcggccgtatccgcccccttgattccacctccactcggggatttggccaacttcagggcctgagtttcgttgatcagctccaaagtggcactgcagttggtggaacttgcgctgtgtgctccaggcagcttgccaaagtgcaggctgtgcctgccaccgccatcattgtgacccgaggaggagccaccgctgatggaggagccactggtagtgctggtgccgctggacaaggagctctctgatatcagtgaattgggacgccgcatgctgccctttccaggctcagagtgtcgcagtttgggagctacgcaaagatcatcgaggaagagattgtaatgaaattttcaccataagttataaatgttttagcttaagagggacttactcttgtttagctgtgccaagggaatcgagcgatcgctgatctggttgttgctgggtcgaatatctagacagggcttgctgccaatgcccattgaggacatctccgccaggcgaacttctacaaagtgataggtattagtttatatatctgaaagatattgtaagtcaaacgcacctcggtttcgtttcgcctgcttccagagcagtttggagatctcctcggtccaggcgttcttaatgtcctccgacatgcactgtagcatccacgtatcatcgggctttcgtttccggaaccaaatctcgaacttggtagccgaatcacctgtgtgcgctgtgaggccgatatctgaagttttaatgctgttcttgtagatgtagatatccagattctgttaagaaaatatgaaaatatttaagagcagttctgattattttgaaaacattttatgaagtaccttaagcctttcatatgttgccttttaatgcgtgagagttaaacataaaaggtgtttatattcgtttcttaacttattaagactacttattgacttataataagttcttcaaacttttgctatatatttttaaatgcttaccttatgatcgggaaagcgacgagctttgctgaagagcaccagttcttcgaagagaaacacctgtcgcagagttttcttgccaccgcgtccttgccaaacgaggaattcattttggcgcagtagtcgtccctgctccttgacattcacatcgcaatcgcgcaaggagtccatggccagcagatcatttccatggcgtagctgaaacttgaccatttcttctgctcgctgcagctcttctacatccgctgcgatttcctgtagagctgctccttccacacctttgcaggctttgaccaactgctgcaggagcaatgcatattttcccattctctgcacgggtttcaggaggtaagaggctagatctagcttatcctgaagctgcatttgcttgggcttgaaaaatgagctaccatattcgcttagtaaagtatcgcttttgggtttattcttgttgtaaagcgcatataggtagaatttggactccatctccagaaaggcagctcccacttttaatggattcctctcgtagcgttccagttcgcccaggaagtgcgagttatggaattcgaagatcttctcgatattaccgaagatcacatttctctggcccctcagtggctgagggatatcctcgcgaagcagttcatctatatagttctcgatcacgtagtacagggagcggacatagtcgcgttcggtaccaatcatctcacgcatgatcaatagaagcgttctaaggggtttaacatattattgaagggtcttaataagtgtggctgatagaactcacttttgtatcttgggatccaggcagctgagctcctccagcttgggcagctctagactggagccatggcactgcagatgggcattcgcctccatgggcgagtgcatgatgtccatgtatctcttagagggtcgatcgaagcactcgtcctcgagcagctcatcgtgactgaaatggattagttttatttattatcccataaagtaaagtattgtttcccaagtactcacctcttttcgttaaggctttggcaggagcaaatcctggccagcttgggattacgttcgcaattgtcgcaaacgcccaaaccagaatcggcgatcttggactgttgttcctctccatcaccaccgtcgcaatcgtgatcctgctcctcttcctcctcttccatttgatccatgtcctccaggttgcgactttcccgccagcaactgcaattgctgctcgatggacctccctcaaaggaactcctactggccgagctgcagcgatagctaacccgttttccagcagctgcagccggtgtgctactggccactggcaacgtatgggtcttccgcatcaccggccagtgcttctccagcagcgaggtggcgcccagttgctcagccaaacgctgcagttcctccctggcggcgttttcccgctgatgctgggtgagcaagtgcagcagacgcccggcagcatcatagcgttcgtgggccagctccagtttctgggcgaattgatccagggcggactttagattattggcgctttcacttaggacagaaactttaagggcagcagcatgcaagtcgcgtcctttggccaagtgtttctatgggattagaaatgaaaacaaagattaaagaagagtcttagatttctaatcatgcaccacttaccatggctatgaagtagtacttttcaaactcctgttcctgagtcctcaactgcgactcgttgtcccagtgcagctgagaaaacttttgcaaattctctgctccatcgctgcccatccatgaggtgaccttaaaaaataggacatcaaagcaagaaaatcagtgggaaaccttcaactcgctgtaaacaagcccacgcgccaggccaaggttccccattgccatgttccacttcatcataatcacaatcatgatcgtcatcgacgtctcctccccaatttcca

SEQ ID NO: 10376 - DNA, 1837 bp, DROSOPHILA
tcacgatgagctgctcgaggacgagtgcttcgatcgaccctctaagagatacatggacatcatgcactcgcccatggaggcgaatgcccatctgcagtgccatggctccagtctagagctgcccaagctggaggagctcagctgcctggatcccaagatacaaaaaacgcttctattgatcatgcgtgagatgattggtaccgaacgcgactatgtccgctccctgtactacgtgatcgagaactatatagatgaactgcttcgcgaggatatccctcagccactgaggggccagagaaatgtgatcttcggtaatatcgagaagatcttcgaattccataactcgcacttcctgggcgaactggaacgctacgagaggaatccattaaaagtgggagctgcctttctggagatggagtccaaattctacctatatgcgctttacaacaagaataaacccaaaagcgatactttactaagcgaatatggtagctcatttttcaagcccaagcaaatgcagcttcaggataagctagatctagcctcttacctcctgaaacccgtgcagagaatgggaaaatatgcattgctcctgcagcagttggtcaaagcctgcaaaggtgtggaaggagcagctctacaggaaatcgcagcggatgtagaagagctgcagcgagcagaagaaatggtcaagtttcagctacgccatggaaatgatctgctggccatggactccttgcgcgattgcgatgtgaatgtcaaggagcagggacgactactgcgccaaaatgaattcctcgtttggcaaggacgcggtggcaagaaaactctgcgacaggtgtttctcttcgaagaactggtgctcttcagcaaagctcgtcgctttcccgatcataagaatctggatatctacatctacaagaacagcattaaaacttcagatatcggcctcacagcgcacacaggtgattcggctaccaagttcgagatttggttccggaaacgaaagcccgatgatacgtggatgctacagtgcatgtcggaggacattaagaacgcctggaccgaggagatctccaaactgctctggaagcaggcgaaacgaaaccgagaagttcgcctggcggagatgtcctcaatgggcattggcagcaagccctgtctagatattcgacccagcaacaaccagatcagcgatcgctcgattcccttggcacagctaaacaagactcccaaactgcgacactctgagcctggaaagggcagcatgcggcgtcccaattcactgatatcagagagctccttgtccagcggcaccagcactaccagtggctcctccatcagcggtggctcctcctcgggtcacaatgatggcggtggcaggcacagcctgcactttggcaagctgcctggagcacacagcgcaagttccaccaactgcagtgccactttggagctgatcaacgaaactcaggccctgaagttggccaaatccccgagtggaggtggaatcaagggggcggatacggccgccgacggaggcaacacttccggaaacggaaatggcaacggaaacgcattcaggagcagcaaacgaaaccacaaacgatcgacgaccattgtcagccaactgtccatggagagcggcattgtctcggacatgtgcgttaccccggatcaggaacaatcggcggcggagagcagccgaagcagttggtccacatcaacgactggagcatccggagcttcaacgacgagtgcatccacggtaatcctgcggcgatatcgatcctacgcccacgcagcggagtccgccagtccggaaagcggcaaatag

SEQ ID NO: 10377 - protein, 594 aa, DROSOPHILA
MDIMHSPMEANAHLQCHGSSLELPKLEELSCLDPKIQKTLLLIMREMIGTERDYVRSLYYVIENYIDELLREDIPQPLRGQRNVIFGNIEKIFEFHNSHFLGELERYERNPLKVGAAFLEMESKFYLYALYNKNKPKSDTLLSEYGSSFFKPKQMQLQDKLDLASYLLKPVQRMGKYALLLQQLVKACKGVEGAALQEIAADVEELQRAEEMVKFQLRHGNDLLAMDSLRDCDVNVKEQGRLLRQNEFLVWQGRGGKKTLRQVFLFEELVLFSKARRFPDHKNLDIYIYKNSIKTSDIGLTAHTGDSATKFEIWFRKRKPDDTWMLQCMSEDIKNAWTEEISKLLWKQAKRNREVRLAEMSSMGIGSKPCLDIRPSNNQISDRSIPLAQLNKTPKLRHSEPGKGSMRRPNSLISESSLSSGTSTTSGSSISGGSSSGHNDGGGRHSLHFGKLPGAHSASSTNCSATLELINETQALKLAKSPSGGGIKGADTAADGGNTSGNGNGNGNAFRSSKRNHKRSTTIVSQLSMESGIVSDMCVTPDQEQSAAESSRSSWSTSTTGASGASTTSASTVILRRYRSYAHAAESASPESGK

SEQ ID NO: 10378 - DNA, 3548 bp, DROSOPHILA
cactgttgctcagtagcgttgccgtatcgcagccatgcgcttgcccattcgaatcaaacaatcaatttcgggtcaatttaagcattttaccacctaaatggatgatccatccgccacgctcttgcccgaacactcggaagatttgcggctggctcgcgatgcggagctgaagaaggtgctcaagctgaagctagtgctggacgagctaagacgcctggatgtgggcccaaatccgagtgatgaaatcaaaagagccctcaaattggtttccattggaagttatgcgcgactcggcgagatggagggagctggtcaggagcaggtgcttggtaggcgcgttacaagtttattccaaaagcagtgaataaccattggaaatctaacaggtctaccgagcggcagcagttttccgcccttgaattacacggatcgcaagacggtgcgtaccaaattgtccgctcaattacgcacaactctgcaacccattgccgaattgtgcgacaggatacgcgaggagttcccggacgcctttggccaggaggcggacttaagctgcgaccaaaaggagattctgcgcctggaggaggagcatcgcagcggtctggagaaattggttgcgcttctcactcgtaagtgcacgcttctcaaggagaccgccgaattgaaattggggccgcagttggcaaacgaactaaaattgcaacaggcgcaggcgcaacttgttcaaacaaaagcagaactactgcgcggatttttcgtccacgaggccgcctctcgcaccgaacatagcgtcaaggcacataaggaggtggaggcgcacctggacgagctgctcgccgccaagaagtagatttaagcaaactagtattatgtaaattagatttttaaatacattataattgtgatttaaacagggttgttcgtttaggtcttttcgctctagaatggcaacactgttttgcactgcagtatttgcagacggtcactctagggataaacaatttgtaaacaaaagaagcttttaagtttgccggaataaaacagatatgaccgaaacgaatcccagtgaaatatctcctccgagcgaagagccaccggcagaggacgaatccactgaccactctccagcggaggcagtgctgagcaataattcctcgagtgtctgcaatgttgtggagccggatgatgagcacgaagttaattccgtggatcgggaggacaccgccagtttgttcagcactactacgaccaccaccagaagcaaatcgccaaatacacgaaaattgaaccgcctgtgtcggcggatcaaggcacccaaaatggttcagcccttgtacaaatataggtgtgatttttccaggcagaacataagtcataatgtttatatcccggatgcattgcagctcccatgtccgcgaggaccacaaccatcagatcttcggagtgcagttcaatccgttcctggacagaggccagccgcaggtgttcgccaccgttggcaaggatcgggtttccatttatgagtgcgagaggagcaccggacaggagtcctgcgaaggcattcgactgctgcaagtctacgcagacccagatgtaagtactcatcatatgctattacttacatacatcatcgttacgccctcgttagaccgatgaaagtttctacacatgcgcttggtcctacgactctgtgaccggcgatcctgtgcttgccgcggctggttaccgcggcgtcattcgcatattcaatccggttaagcaccagtgcagcaaaaactacattggtcacgggcacgccattaacgagctgaagtttcatccgactagaccgcagttacttctgtccggcagcaaggatcactccctgcgcctttggaacattcagtcggacgtgtgtgtggcggttttcggcggcgtagaaggacaccgcgacgaagtgttgtctgtggactttgatttgcgcggtgatcgcatcatgtccagtggaatggatcactcactgaagctctggcgactggataagcccgatataaaagaggccatcgagctgagctctggttttagtcccaacaagaatacgggtccgtttcccacgatcaaggagcactttccggacttctcgacaagggatatacatcgaaattatgtggattgcgttcagtggttcggcgactttgtcttttcgaaatcctgcgagaactcaattgtttgctggaagccgggcaaactttcagaatcgtggcatgagattaagccacaggagtcggccaccacggtgctgcatcactttgactacaagatgtgcgagatctggttcgtacgcttcgccttcaacgcctggcaaaagattctggccttgggcaatcaactgggcacaacatttgtctgggaattggactgcaatgatcccaatttaacaaagtgtagccagctggttcatcccaaaagcaactccaccatccgacagacttccttctccaaagacggttccattttagtttgcgtgtgcgacgacagcaccgtgtggcgatgggatcgcgtcaattaggatgagtgtttctaggctaaaagaattttccttatccttctaaatccgataccatatttatgtaaccatagttattttcagtgtaatgtttaccttcaatattaagtatgttattatgcgtagcatttatatacaatactcattgtattgacaatttatgttaaattatgttaaattttttaacattaaccaagatatttattctattctattacttttttaatgatcaaatagcttcgcaaatattatcatcttatgttgtgtgaatggcgtgggctctatctttaatgtttatattttaactaactaacttgtacacaataaaaactgtgaacactaaagattaaaaccaatatttttttaaagggttcttcaaaaataacggtttttatctcaaatgtatctggtattttcagccgttctttgaacggtcactcgaatcagctgcattcatttgtttatatagcaattcgcaaacagttggattttcctgtttagttgttattcccattactaaaatgcttaccgacagagttctggccaccaaggaggcgctagtggtggctctgggcgacaactgggagcgttaccgggccaacatgaagaattggtttcggagccgttggactaaggaggaattcgatgcggagtcgcggaaaatcctaacacctgacaaactgcacctgcacaatcagttcctgctcgccctgctcaacaagatcgacgcctttgctcccctggagaatcctccggccgtccagaccagcagcagtagtggcaaccgaagcaaacggcgcaaaagaagttcccgcaccttcgccgaacgccttaattttgagctcagcgacgtcctggactttgtagccgaggacaacatgcaaatcattcgtccgccaaccacgatcggtattccgtcggaccagcaacagcaacagcttcagtcgcagcggtactgcgcgcaggaacttttcctgcccgacgcgggattcattatgggacg

SEQ ID NO: 10379 - DNA, 1435 bp, DROSOPHILA
atttgtaaacaaaagaagcttttaagtttgccggaataaaacagatatgaccgaaacgaatcccagtgaaatatctcctccgagcgaagagccaccggcagaggacgaatccactgaccactctccagcggaggcagtgctgagcaataattcctcgagtgtctgcaatgttgtggagccggatgatgagcacgaagttaattccgtggatcgggaggacaccgccagtttgttcagcactactacgaccaccaccagaagcaaatcgccaaatacacgaaaattgaaccgcctgtgtcggcggatcaaggcacccaaaatggttcagcccttgtacaaatatagctcccatgtccgcgaggaccacaaccatcagatcttcggagtgcagttcaatccgttcctggacagaggccagccgcaggtgttcgccaccgttggcaaggatcgggtttccatttatgagtgcgagaggagcaccggacaggagtcctgcgaaggcattcgactgctgcaagtctacgcagacccagataccgatgaaagtttctacacatgcgcttggtcctacgactctgtgaccggcgatcctgtgcttgccgcggctggttaccgcggcgtcattcgcatattcaatccggttaagcaccagtgcagcaaaaactacattggtcacgggcacgccattaacgagctgaagtttcatccgactagaccgcagttacttctgtccggcagcaaggatcactccctgcgcctttggaacattcagtcggacgtgtgtgtggcggttttcggcggcgtagaaggacaccgcgacgaagtgttgtctgtggactttgatttgcgcggtgatcgcatcatgtccagtggaatggatcactcactgaagctctggcgactggataagcccgatataaaagaggccatcgagctgagctctggttttagtcccaacaagaatacgggtccgtttcccacgatcaaggagcactttccggacttctcgacaagggatatacatcgaaattatgtggattgcgttcagtggttcggcgactttgtcttttcgaaatcctgcgagaactcaattgtttgctggaagccgggcaaactttcagaatcgtggcatgagattaagccacaggagtcggccaccacggtgctgcatcactttgactacaagatgtgcgagatctggttcgtacgcttcgccttcaacgcctggcaaaagattctggccttgggcaatcaactgggcacaacatttgtctgggaattggactgcaatgatcccaatttaacaaagtgtagccagctggttcatcccaaaagcaactccaccatccgacagacttccttctccaaagacggttccattttagtttgcgtgtgcgacgacagcaccgtgtggcgatgggatcgcgtcaattag

SEQ ID NO: 10380 - protein, 462 aa, DROSOPHILA
MTETNPSEISPPSEEPPAEDESTDHSPAEAVLSNNSSSVCNVVEPDDEHEVNSVDREDTASLFSTTTTTTRSKSPNTRKLNRLCRRIKAPKMVQPLYKYSSHVREDHNHQIFGVQFNPFLDRGQPQVFATVGKDRVSIYECERSTGQESCEGIRLLQVYADPDTDESFYTCAWSYDSVTGDPVLAAAGYRGVIRIFNPVKHQCSKNYIGHGHAINELKFHPTRPQLLLSGSKDHSLRLWNIQSDVCVAVFGGVEGHRDEVLSVDFDLRGDRIMSSGMDHSLKLWRLDKPDIKEAIELSSGFSPNKNTGPFPTIKEHFPDFSTRDIHRNYVDCVQWFGDFVFSKSCENSIVCWKPGKLSESWHEIKPQESATTVLHHFDYKMCEIWFVRFAFNAWQKILALGNQLGTTFVWELDCNDPNLTKCSQLVHPKSNSTIRQTSFSKDGSILVCVCDDSTVWRWDRVN

SEQ ID NO: 10381 - DNA, 3228 bp, DROSOPHILA
gtccaagaatctcttctaggatgcccataggcaggggcccgttgcttaagtctatgtgatgatagaagcggtgatccagcaggaggttttcaaagcgcggcgagcaactggaatattacggaatgttataatatggaaaggacatggaaatctcagcgacgcagagatctttgttgatagcggactacttactgcatcaccgccagaatggaggacgtgtccaggtactggaagatctcgaagagcagctcatcacagaagtccatgaggttgcactccgtttcccggtcgagggattccttatgctccttctcccttttgcgctgttttatctccggctcctcctcggtagggatttgtggcagcactggctgcacgggcacggcggccagctcccgcccacaacgttcgttgtccgggaagcggcgcttaggcgctgcaaggcacgtactgcccaattcggcctgttccatgcttgggctgctcctgcactttattgccaattttcgccagcagctttttttccagctaaatgcaattggtcaagtgtgaccgcagtcagatcccgagataagccgctagtaggggtattcctatgtcgaagagatgaaactggcttccgaatttcccggtaatttttaatgtcgtttttattattatattattttttttcttgattattacgatttgatactaaaggcggtggcactagctgctcatagttatacaattgagtcgtctggtaaaatgggaacaataacaagtagttaataatcgtttaattcttatgtagataataaagttgcctattttgctattttcctatttcaaacaaatattgcatattatgaatgaaatttaaaaataaggcgcattacgcatgtgcatgtgcattaaaaaagttattatacaaatagaataaacacattaaattaaataagattcctgttgtcattactagcaagcagtgttggaaaacaccgtgctgccctcactaatttctacacccgtctcgtgtatttttgtgcctgatttactgactgaaaatgcacctgctgcggagcctgcgccagctgaatggcctccaaggagtgcgccaagctatccggcaggtgtcctcggcgcccaccaagcccgccgccctgcagtacgagcgcgatccgcagccgcttttcacggatgccgaaacccagcggctgctccagtccatgacgcaactgaacttggacaaggtgtatcggaagcgcacggtgccggacaacagcagcgaaacgaagttcatgagcaacgagcagctggacaacgagttccagaacttggtggtgcgggctcagcaaattctgcaaatgccacccattgtgcagatcaaaaaagatgtggagcgggtgatagccaaggatacggcgctgaaggacttcgccaactccaagttcgtattcacggacatcaccttcggccgacggcagtcggaacgcaaggtaatcgtccgggatatggacggaaccttggcctacgccactcttgataccacgaagcgcatgaaccagttgtatttcccgctggagggtcgccagtcatatactccacgaatgttcgcgctggaggagctgctggccaagtgcttggcggagcacaagtacgagttcatcctggatcgactcttggtgcagtacgagccacatgagccggagttccacaacatttcagcgcgtgtgttcgagcatctcaacgagtccaaggagttcgatcttctgcgctccacccgccactttggacccatggccttcttctacgcttggcaccgctgcatcgacgacctgctgtatgacatgatccgtcgggattatctgcacaatgccgtggagctgattgctctgagctacaagctacacaacatcccagtggagtatcaggcaacgctgaccgaactgggcaaactgcatgccacgccggcggaaagtgccctggcggagctaagaagcgtcttccgacgacatgacaataagcagaacattgagcaggagatccatacggccattggcaagacggagcacgatttcgccgccgatgagatcagcctgaagttcattgagcagtacatcgccagcgaacatgcgctgaagaaggtgcaactggagctggcggtgcagacgcttaaggaagttaaccgggagaaactgatgctgttccagggactgaaaaaggctcacggcgtccaggcttcgtaggatctattcgctttattgttatcgatttctatgtactaataaataccagctaggtcaagatttctatacgctgttcatagctccttcttgaggaccctggacagccgtctaaaatggccaaggatgcactgtctccggtgccgcaggcatacccgctcgctgctgaaacgcttcaagcaaactgagcaacgtctgggatcacctcttccattgggcaacccgttgtgttcgcgaaataggacgaccactttcgccttggcacaactctgttctttttttcggtgtaccaaaagagaggtggtggtcttgaagtaacgtttgcactgaagacatctgtagcacttcctgccgctatggtttctcaggtgcctgagcaactgcatctctgagtggctcatggcgttgcagagtagatgtgggcatttaaagagcatcgatgacttcctgggcgctagagcgggacagctcagactgtgttgcttcaattgtttctggtggtccagacgctgaccacagcgaaagcacagagcaccaggtccatagtgcgcggtcatgtggctctggtgctccagcaaggttttggccacatcgccgcacaccgcgcactccatcatgccgttgggaaatatgaatgtgttctcgctcacgtaggtgagaaatttgtcggaattggaggcctcagaaccggtatcctttggccgttcctctggtaaataccactcctccgaatcgcgacggcattgaatgcccgcatccttagtgcccgcattctctgtttgaatggcgcgctctctgcgcggcaccatagcctcgttcgcaaacattccagtgacctcgttgagtctcttctgctgtacggatttcttgggagactctgtagcgcctccattggtgatcggggcatgcagttctttcactggaatgccattctctatcgcgtacttgcgtgtcacccacttggtctccacgcacacgtattccggcagctcgaagacgggca

SEQ ID NO: 10382 - DNA, 1228 bp, DROSOPHILA
tctacacccgtctcgtgtatttttgtgcctgatttactgactgaaaatgcacctgctgcggagcctgcgccagctgaatggcctccaaggagtgcgccaagctatccggcaggtgtcctcggcgcccaccaagcccgccgccctgcagtacgagcgcgatccgcagccgcttttcacggatgccgaaacccagcggctgctccagtccatgacgcaactgaacttggacaaggtgtatcggaagcgcacggtgccggacaacagcagcgaaacgaagttcatgagcaacgagcagctggacaacgagttccagaacttggtggtgcgggctcagcaaattctgcaaatgccacccattgtgcagatcaaaaaagatgtggagcgggtgatagccaaggatacggcgctgaaggacttcgccaactccaagttcgtattcacggacatcaccttcggccgacggcagtcggaacgcaaggtaatcgtccgggatatggacggaaccttggcctacgccactcttgataccacgaagcgcatgaaccagttgtatttcccgctggagggtcgccagtcatatactccacgaatgttcgcgctggaggagctgctggccaagtgcttggcggagcacaagtacgagttcatcctggatcgactcttggtgcagtacgagccacatgagccggagttccacaacatttcagcgcgtgtgttcgagcatctcaacgagtccaaggagttcgatcttctgcgctccacccgccactttggacccatggccttcttctacgcttggcaccgctgcatcgacgacctgctgtatgacatgatccgtcgggattatctgcacaatgccgtggagctgattgctctgagctacaagctacacaacatcccagtggagtatcaggcaacgctgaccgaactgggcaaactgcatgccacgccggcggaaagtgccctggcggagctaagaagcgtcttccgacgacatgacaataagcagaacattgagcaggagatccatacggccattggcaagacggagcacgatttcgccgccgatgagatcagcctgaagttcattgagcagtacatcgccagcgaacatgcgctgaagaaggtgcaactggagctggcggtgcagacgcttaaggaagttaaccgggagaaactgatgctgttccagggactgaaaaaggctcacggcgtccaggcttcgtag

SEQ ID NO: 10383 - protein, 393 aa, DROSOPHILA
MHLLRSLRQLNGLQGVRQAIRQVSSAPTKPAALQYERDPQPLFTDAETQRLLQSMTQLNLDKVYRKRTVPDNSSETKFMSNEQLDNEFQNLVVRAQQILQMPPIVQIKKDVERVIAKDTALKDFANSKFVFTDITFGRRQSERKVIVRDMDGTLAYATLDTTKRMNQLYFPLEGRQSYTPRMFALEELLAKCLAEHKYEFILDRLLVQYEPHEPEFHNISARVFEHLNESKEFDLLRSTRHFGPMAFFYAWHRCIDDLLYDMIRRDYLHNAVELIALSYKLHNIPVEYQATLTELGKLHATPAESALAELRSVFRRHDNKQNIEQEIHTAIGKTEHDFAADEISLKFIEQYIASEHALKKVQLELAVQTLKEVNREKLMLFQGLKKAHGVQAS

SEQ ID NO: 10384 - DNA, 4577 bp, DROSOPHILA
gtatgcccattgtctgaagctgctgctgagtacagaacactgcctgggcatccttggtggaaagccaaagcattcgctgtactttgtcggcttccaggaggacaggctcatccacttggatccgcactattgccaggagatggtggatgtgaaccaagagaacttctccctgcactcgtttcactgcaagtcgccgcggaagcttaaggccagcaaaatggatcctagttgttgtatcggcttttactgtgccaccaaaagtgatttcgacaattttatggagagcgtacagttggtaagcaaaagccaaacatttcgttttccaacgtcctattaaatatcttaatttcaacagtatttgcatcctatgcgttgcgcctcaggggcaactgtggataaggcggccgggagccatcatacgacgcctcagtcatcccatcaaaccgagcaaacagagatgaactatccattgttctcattttcccgcggtcgttgcatggatcacgagcgggacgaaatgagcgattcgctgtacaagccgctcataaaacaggtggcttctctggcccaggaattgggcgctcaactggcgccgccacagcacggcgatgagcacgaccaagatgatagtgaaagcgaagagtttgtgctgctgtagatcgttgccgccaccaccacataaccctgttgctgtgctagctgtgttatttgctcattattatttgatttagttgccagccgctgctgcttgcttgctcgcccagaaaaacccaacagacccgtatctcaaacacaaagactttgttgtacctttacgcctacgcatatagtacatagacgcatgcatgtatcttgaatatttactgatgtccacgttaatctctcttttgttcgacctgtcgtctcgcattctgccaaagtttttcagctatttccatgttcgagcagcccgatctgtttatatgtgttatatataaacctatgtaatttgcggtattattattttaaaatcatgaatctttaatggaattgaattattttacaatggtgccacaattgtcactattctttgaagtatttcatgtagcgcttagttctagagtttagttaaattatgtaagtcgtcttgtaattgttcgatcattatttagttttaacattaattgtatataccctcgagtaaatgaataaactatcctaacttatactaaatacaattagggtgtcatgagattttagctgatgggatatgaatgtatgatatagatacaatattgcacggaattaaaattaaattagactaactagttttaatgtcttttatgaataagtaatttaacccacaacctcgtctttcgtttgggattattacagcttgcgaagtgtacatacctcttattatttgcaaacaaccaagattttggttggatccatatttggatggtgggacttgaaacgcttatctctgcatgacttgcgcctccctttccaggcgttttaagagcttgctgagattctcccgggctgtcgttgctctagccgcactaatacttattgcagtccgataagcctctatagcctcctgcgtcttgtcccagcgatgatagagaactccgagattcgtgtggtacaatgtgttgtggggctccagctcaataacgcgcttgtagatcgcctccgcctccgtataatgttttaatttgccaagcacgtttgctcgaatgaaaaggatactgacatcgttgggtagatgttggagagcctgattagagatgcgcaaggcgtcatcctgcaaccccttgttgtccagcattgtcagaatgttagcccaggcttttggctggcggggatttagtgccacagcatgctgccaatgatgaagcgcttcggcgtaacgtttctgctccagatacagattgcccatgttgtagtagcagacggcgaaattggctctgtacttcagggccttctcatagctggccagagccttgtcgtactttccctgagccgactgcacaatgccgagattcatccaagccgctggaaatgcgggatacgcctgcaaagccaatcgaatgtattcctcggcggtggatagttgaccgtgctcccgatacaggttgccgaggttcataagagctgactcatagttcggatacaattcaatggccctgtggtagtgctgaaaggctttcgtattgtttcccatatcagtggccagtcgggctatgttatagtgtaccttggcattgtcaggacacacctgtagcgcggacttgaacaactgctcctcgttaagccagtcagtagctcgctgccgagtccgtaccatcataaccgaaaagagcagcattaaaagaatccgtagagcagtgcgccagtgggtgttttccgtactgctgtcataccaatataagaatccatagatggacagcaggcaaaagccaatggagggtacatagagcgtccgttcggcaatcacgaatcctacgcaaatgattcccgacgcgggcaggaacgggacgatcattaaacccagagctaacatcattccgggcagccgtcggaagttcatcagagccaccaatacgatggagtagaatccgatgacgccctgcagtctcagatcccagatgttggtcaccaacttgacgcaacccaatgcccagtcgtagcatagccagtgggggcacagcatcagccagatgttcatgaccagcagatactgctgggagagcccacgggtcagcacgtgctcattgtgcgcaacggggttgtcaacttccttgaaggtaggcgtctcaaagtcctgccaccaaaggcgagccgtcagcagacccaaggtacccagcaagtagaacaagtagctgatccgggtgcgcaaaagactccactgatccttgaatcgcagatgatagtagccgttttgaaagtaatccaatagtacacacgacatggggatggtcacagcggactccttgaacagcattcccacagcggtgagcagcatgattagaccgccagtctgtggaccaagtcttccggtattggccacggtcagcagaagacacaacaagtgaatcatgccgaacatgagctcggcccttccaaccacaccagaaaccgcctctgtgtgaattggatgggcggcaaatagagcagcggagaggatggcccatcttgccgtgctgacctccggaacatagagagagcgaatcaatcgccacatgagcagcgtgttgacgcagtgtagcaggaggtttaggaacttcatgtgggcggcacttagccccagaagggcatactcgcaatggaacatcagggtggtcagtggccgaaatgatttgtgggaatcggaactgagcaaggaagcaccccagaagtcgtgcgtgaagatcgccgtccagttggtgggcagtgagttgacatcccggttcttgacgatggccaccgtatcatcgaagacaaacttcgctccactgaggccaccgcatccgtagcatagcaaacagattaacactaggattgcctgacagaccatgctatgcagcgtggctttgtgaacgaggtctagcatactggattatttactaattgtcaattgttcaagtttaattcacttattctgcgaattttaatcggaattgttttgtatacattttttgttgtgtttttgtccaaacaccccctcactgaatagtgatgccagatcagcgatagaaatgtgtgcagcttagctaaatatatgcatcgaaaaatatatggttataaaatgatttgaaattacgctaaatagatctatcaaatctgctcattttagagtattcatattaaaataattatacatactcttgatattaaagtataaataatagtaataacaataaaccactaaaagcaaacaagacattcgcccgttaacgcttgcaacagctgtttaaatctagatcaaaacaaatccgaggaaaaatttgttgaactcacaaagaaaaattaaatcctcgaaaatgtctgaagaaatccttttcgattgcctccatgcagagatagtcaattattgtctggatagcaataaggtaggaacacgagggacgcaaaaaaaaatcagtcatacaaccgattttgatttggttccgcctattaggagcacgacctggccactttggagtatataggcttcaccaccggctaccgcctgattgagcggctcacccgtgaagtttcgcgttttaaggacgagttggagactatgaagtttatatgcaccgacttctggatgcttatatacaagaagcaagtggacaacctgaggacgaacaaccacggaatgtacgttgtgcaggacaaggctttccgctttctgactcgcatctcgccgggcaccaagcagctggagcacgcgcccaagttcgtggccttcacgtgcgggctggtgcgaggagctctcagcaatctaggcattaacagcaccgtgacggccgaagtgcaaagcatacccgcctgcaagtttcacatagaagtgaacaggaactaattaggatgtaaggcaatggtttattactacaattatagagata

SEQ ID NO: 10385 - DNA, 2577 bp, DROSOPHILA
atgctagacctcgttcacaaagccacgctgcatagcatggtctgtcaggcaatcctagtgttaatctgtttgctatgctacggatgcggtggcctcagtggagcgaagtttgtcttcgatgatacggtggccatcgtcaagaaccgggatgtcaactcactgcccaccaactggacggcgatcttcacgcacgacttctggggtgcttccttgctcagttccgattcccacaaatcatttcggccactgaccaccctgatgttccattgcgagtatgcccttctggggctaagtgccgcccacatgaagttcctaaacctcctgctacactgcgtcaacacgctgctcatgtggcgattgattcgctctctctatgttccggaggtcagcacggcaagatgggccatcctctccgctgctctatttgccgcccatccaattcacacagaggcggtttctggtgtggttggaagggccgagctcatgttcggcatgattcacttgttgtgtcttctgctgaccgtggccaataccggaagacttggtccacagactggcggtctaatcatgctgctcaccgctgtgggaatgctgttcaaggagtccgctgtgaccatccccatgtcgtgtgtactattggattactttcaaaacggctactatcatctgcgattcaaggatcagtggagtcttttgcgcacccggatcagctacttgttctacttgctgggtaccttgggtctgctgacggctcgcctttggtggcaggactttgagacgcctaccttcaaggaagttgacaaccccgttgcgcacaatgagcacgtgctgacccgtgggctctcccagcagtatctgctggtcatgaacatctggctgatgctgtgcccccactggctatgctacgactgggcattgggttgcgtcaagttggtgaccaacatctgggatctgagactgcagggcgtcatcggattctactccatcgtattggtggctctgatgaacttccgacggctgcccggaatgatgttagctctgggtttaatgatcgtcccgttcctgcccgcgtcgggaatcatttgcgtaggattcgtgattgccgaacggacgctctatgtaccctccattggcttttgcctgctgtccatctatggattcttatattggtatgacagcagtacggaaaacacccactggcgcactgctctacggattcttttaatgctgctcttttcggttatgatggtacggactcggcagcgagctactgactggcttaacgaggagcagttgttcaagtccgcgctacaggtgtgtcctgacaatgccaaggtacactataacatagcccgactggccactgatatgggaaacaatacgaaagcctttcagcactaccacagggccattgaattgtatccgaactatgagtcagctcttatgaacctcggcaacctgtatcgggagcacggtcaactatccaccgccgaggaatacattcgattggctttgcaggcgtatcccgcatttccagcggcttggatgaatctcggcattgtgcagtcggctcagggaaagtacgacaaggctctggccagctatgagaaggccctgaagtacagagccaatttcgccgtctgctactacaacatgggcaatctgtatctggagcagaaacgttacgccgaagcgcttcatcattggcagcatgctgtggcactaaatccccgccagccaaaagcctgggctaacattctgacaatgctggacaacaaggggttgcaggatgacgccttgcgcatctctaatcaggctctccaacatctacccaacgatgtcagtatccttttcattcgagcaaacgtgcttggcaaattaaaacattatacggaggcggaggcgatctacaagcgcgttattgagctggagccccacaacacattgtaccacacgaatctcggagttctctatcatcgctgggacaagacgcaggaggctatagaggcttatcggactgcaataagtattagtgcggctagagcaacgacagcccgggagaatctcagcaagctcttaaaacgcctggaaagggaggcgcaagtcatgcagagataagcgtttcaagtcccaccatccaaatatggatccaaccaaaatcttggttgtttgcaaataataagaggtatgtacacttcgcaagctgtaataatcccaaacgaaagacgaggttgtgggttaaattacttattcataaaagacattaaaactagttagtctaatttaattttaattccgtgcaatattgtatctatatcatacattcatatcccatcagctaaaatctcatgacaccctaattgtatttagtataagttaggatagtttattcatttactcgagggtatatacaattaatgttaaaactaaataatgatcgaacaattacaagacgacttacataatttaactaaactctagaactaagcgctacatgaaatacttcaaagaatagtgacaattgtggcaccattgtaaaataattcaattccattaaagattcatgattttaaaata

SEQ ID NO: 10386 - protein, 705 aa, DROSOPHILA
MLDLVHKATLHSMVCQAILVLICLLCYGCGGLSGAKFVFDDTVAIVKNRDVNSLPTNWTAIFTHDFWGASLLSSDSHKSFRPLTTLMFHCEYALLGLSAAHMKFLNLLLHCVNTLLMWRLIRSLYVPEVSTARWAILSAALFAAHPIHTEAVSGVVGRAELMFGMIHLLCLLLTVANTGRLGPQTGGLIMLLTAVGMLFKESAVTIPMSCVLLDYFQNGYYHLRFKDQWSLLRTRISYLFYLLGTLGLLTARLWWQDFETPTFKEVDNPVAHNEHVLTRGLSQQYLLVMNIWLMLCPHWLCYDWALGCVKLVTNIWDLRLQGVIGFYSIVLVALMNFRRLPGMMLALGLMIVPFLPASGIICVGFVIAERTLYVPSIGFCLLSIYGFLYWYDSSTENTHWRTALRILLMLLFSVMMVRTRQRATDWLNEEQLFKSALQVCPDNAKVHYNIARLATDMGNNTKAFQHYHRAIELYPNYESALMNLGNLYREHGQLSTAEEYIRLALQAYPAFPAAWMNLGIVQSAQGKYDKALASYEKALKYRANFAVCYYNMGNLYLEQKRYAEALHHWQHAVALNPRQPKAWANILTMLDNKGLQDDALRISNQALQHLPNDVSILFIRANVLGKLKHYTEAEAIYKRVIELEPHNTLYHTNLGVLYHRWDKTQEAIEAYRTAISISAARATTARENLSKLLKRLEREAQVMQR

SEQ ID NO: 10387 - DNA, 36336 bp, DROSOPHILA
ataccgcgaagaagccaagctgctgttccgatagtatcgatgagcctgccatccccagaattttggtcatttgttgttgctcgccagggcgaattcgaactcgaagcgcagtaatcaacgcgctgctcgtggattttttttgcatttttttgagttcaaatagttcgttaataagagtggcggtcaacgatactattccacttgcaatcgaaatatgaatagttgaaagtgataaacaacaagaaagaagcgacgccaacgggcgaaaaaggagataaccgaaaacgaaaaacacgacaaaagcaacgttaaaagagagtaacagaaaagatataaaaacgatgatcgaaccgtaaatttaaaaccatgcaatctacagcgcataatatataataatttgaccaaaacaaatgccaagtttgcgagcgagagcgaagaacgttaaaaaaagaagtaaataaatgatcttggcccgctgtttgttgttcttgttattatggttgccgttgttgtaactcgttttttttaatgcgcgcgtgtatgaatcacacaaacacaacaaaacaaacaataacaacgatgccttacggtgaaatatgctaagtaaatagcaaaagagagttccagtttccagagagcgacagagagggagagcgcgcgagagcgactacaagtacatactggaaagcgatcccgatcctttttccaggcacgcagccatctcgctcgcacccatgccgccctagaccaacttttgttgcagctgcctaacaaccaacaatacagcaacaacaagcgcactgtgcacgcgaaaggagcaacaaggatggcgatagctggaaagcgacgacgatgatgatgatgcggtcgtaacaacaacagcaacaagaacaacaaaaagctgctgcaggcagacgagcatagcgttaaaaaaaagtagctgcatacaaaatagtaataggaaaaaatccgaaaaattcgagaaaaaaataagttaaagaaacgatcgcccaatttaatcaagtgcatatatgtgtgtgcaaaataaaaagtgcattgcagcagtcaaaaatacatacttattatcgcagatcgaagacgataatagttattgttaacacgaaaagtacgaaatgaaggtcaccgtctgcttcggcgacgttcgcattctggttccctgtggttccggcgaactcctcgtccgcgatctcgtcaaggaggccacgcgacgctacatcaaggcggccggcaaggtaaggggatatacctgatatatatgatatagtattataaagtattactttacccatcgatagtaattttgatggataacacttctggagttacgggaggtactatgtaactgatataataaatacattaattataaagaaggttatctcaaaatatattatatatacatacaaaggacatttacttcatacatatgtatgacttataaaaataccaatggattccaatattatactaattttctttaattgtatcattattatattcatacaaaaaaaacccaattaacttagaattctagacaataatgttaggcccaatattatttatgattatattaatgatatacatatagacaaccgttatctctcccaattcgtttgaatatttgcattcaaaagtataaaaactaatagatatcgtaaaataccccgaagctctcaaatatatattattatacacagataatggtagaaactggtaaaaaaaaatcaaatggctcttatggaataaacaaatacaaataaataaaatgatatcttttcatgtagaaattagtgctcctacatttatttatgttggttaccaacccatttcagaaagtgctgacaaaatataataaaatattaccattttacttattacttattacttctctgtgacatccagttgaaatgttgatatgatatggttatcggggtcataaacgttattaaaaagaaaagtgtcgctaatgagcgttattataatcgtatatttggttggccattaacttataattataggattttgtttcttagcatgcactttcaattagttaagtccgaagagttaagttaagttttaagttttgcacactatttgaaaagattttgaaaggaatctatcaattgctacgtatcttacatacgtatctttgtaagccatgccgcgaccggtaattgtatcttttgactgttttcctcgagtgattcccgaaaaatacccttcgtcatttctcccgcagttccgtaaacaattttctcaagagcggaaacgttgcacttgagagtgatgtaattacacgagaaaagaacccaaaaataaaaaaaaaactagaattaaaccgaacaagaaaaggttcttcagcggcgcttatctggggaaaagatatacacacatatagtacacacatatggcagagatcgaggcaaaaaggaacagggcctaggtaaaatatttgaataatgataagcccctgacgaagccataataacaagctgaaaccccccaaaaaagtgagtttcagagtgaaaaaaggcagagagaacaaggcgcaagatgataacaacaaccaacaaatcggagaagaaagcgaagaactcaaacaagcaacaacagagcagaagactcgaattataataaaagtcagtccggaatcaaaagaacatttttatttcattttgaactcgcttgaacccgattccgatcgagtcaacaggtaaccccaaaaagaagacgggaaaaagggtcaagaaatgcactttacagggcgagaaatgccaagaagggagaccccttaattaatcagaaataacatctgaaattcgttggggtcctctataattaatcaaaagttcaagggaagggtacgcccgattccgccggaattttccagggaaaattctgattcgaaatcaatttgggtgtgcgggggatacccttcttccttttttttattttgttgtttttccccccctttattttcataatgattatgagttgtgtttttctttgctggccgaaacgattaagtcataatttagatgggaagagcgccctgggaatcttgaacttcctataagaagttattattcttacaggaattttgtaaattaaaccatagttatattggaaaatgtagcctattattttatagaggtatgttggttgcagagcctgaatagattcttaaggtagaaagtgtaaggcaatggaaaggccataatttgtttattgccgctgagaggaaaagctcaactaattaggcgtttttccaaaccacaaatagtccgaaaccaaagtcttcttcattgcatttccggcgaggatttggattctcgcggcgattggtggggggtctggaaatggcaatggggggcctgtgtgcagaccgatctgttgcaacgtgtgtgaatttttgtttgctttcattgtctggccaaaagacgaaactgtgtcagctgcaattaagtgcaagagccaaaagagagaaaagaaagggggaaatgaacagatcggaggggctgcagtggtgctaccaacagataagacgctttccatttcgcgatcacgtgcgccgtccaattgcagaccaaaaatgcaacctgctaattatgcaattgcatgcaaatgcaatataagtttcctacaccaacttgtatatcaaccctcttagcagatcccaaaagtagtgtaccacaaatcactatattgggaatatgctaatattttaaaagtagaatactgacgatagtgcttcatataacaattcctattcctttacccccgattgtttactcattttgttttttgcaagataaacgaaatcgaatgacttgcagctatgtagctgcacttcaaattcttcggcacatgagatactattgtattttttatatatacttttgctaaaccgaatccgtattttttttgcagctgtgtgatcgcagtttttagtttctagtgctctgttttgcttttcgcctttcgtttcattatcttctgctgccaacatgtgcaaaactcacattgtgtgtgaggtgtgaagtggaataggggggaaatagagccagaaaatgaaaaaaaagtgcagtgatagagtgttaccaactgacctatagcaatggaattttttttcgtcatatgcggttccaagtgttagataattgggttcttcaccatactgttccattgtaactcggaatttaatgaaggaatatagatgaaaattggtatatgaactaattgaatggggaaatagataattatgattgaaaatcataatcccatgcaagctgttccattgtaacttggaagaaattagaagaatctaaattgagatacgtaattaaatattataatcatggcttatcctcgaaatatcaaaactcaaagggtacacgtgctgataaataattcgtttgtgtaaagccgttacattattagtaatgaacttgaaactgacttttaaggagtcagctataattgtacgaatttgatacatatggcaactcgattcgcaacctattaaattgcataaagaatagtttgccagttggtttaggagcaatatgatatggccgctttcgattcctttgttcgaactggactttagtgggcgttacgtgttatcaaagctcaactctgttgtcgtctgtttattttgtttggctggaaaaccagagatatgagtgtacaaaaaatacagacaaatacagcgtaacagacccaagatgaagaaaaaaaaattcattgagcatttttcttgtcgctgttgctgaattcttggcattaagcggcaacaacggcggcagaaaaaccagttttgcacaatttgtaaattatttagtcataaaaaaatatatccagctctcttctttcgctctctcgctcgctcctgtgctgccatctcgcttgcacattgtttgcggttaaattttttgatttttctactcacgctactaattgttagcgtattttaagtgcgctctaattggtttaagtcaataattacaatgaaaatatggtagcaacaccacaatgagtggaaaagcggaaggggcattatggggttttatgttggggccaggctttgacaatggcaaataatcgataaatccaagcgtcaaacaccttggtcagtttctttttatggccaatggaatttcgttagaatttcgctggcattcggctgaacggcgaaatgtcggttgtagctatggactgaaggtcggaaatgtccggaattccatatagaaatgaagtgaaatacgaataaatgaagtaatgggattttaataaagattttaattcattcgaaatttgttattacatgtcatgatgcaaagataactcttcagaatttgtattacaaatatatataggaactaaactattttctcttaatttagtcaattttattgtttggcattatcattgtttccaaccgcgatctttcccccttaacaatgtatataaaacgtttttgcagctgttggtcgaacagaaaaatgcaagccaattatgagaggctatgtgagaggccttccaccaggctgaccaaaaaaaaaaaagtagaaaccatttaaggtggaccttccgcacgtacacgtacggtccacctcacccattccgtagataatctccattggcatctgcatttcccacttgcccatgggaaactaaaagaaaatgtgatcagaatgaaaagggaaaagggagagaaatcaattgcattttaactgttttctttgcgagaacgtgttggtttaattaacattaaaacgttcgttctaaaaatataatatgtattttcaataaaacttaataactctcattaggaagttgcttggagtagcgaagtaaaatgctgacaaaacaaacaactgcaatcaaaattccagatcgtaaacaagtcagtgcaatataatgaaatgcctgagttcaccagaacccctgccactggccacgcccccaaaaccttgccgcctttcgtcgggcgtcaggtagcactgtactacgtatatcgtatatgtggtatagtatgtaggctcgaacccgaacccaaacccctacccatacccatacccaaactcagactcaaactcggtaaaactcgactcttgggggttgtgactgcagctataatagtttctgttttgtcggttggcatgacaacaacctgattacacgtctgtacgtttctccattctgtatatatacatttatatgtatatatatatagttagttatatggcaaaaacaacaggctacaacaaaatagcagttgactgcgtcattttcaatatagccaggccataatatccaagccatagatatgtattattattgcagtgcattgtgggctgattcacttggccacgctaccaaattgggagcgagaaattcaattgaattatcgtttctccactcacaatatatccagtatttagtttctagctcgatttgtttgtaattgaaattggaaataatttcaagtgacacccactcaccaggcgagatatcgccgacatgcttcgcctacgggttctccgattaattttattattctacaaactgcagcgatcgatcggatatggaattactattccaattgtcagttggttttcccagaagagaactagctgaatatcggttcgattgcagagggttccatgaactaaaacgattgggtttcagtttcaactggaaaggaaatcgaatgtaatctttacattactgctgcttatataataatacatactttcttatgtaatacatggccacagtgtttgatctctgcattagtcacaagaattcgccgctgatttggaatttatttcagcttttgtctatcgatttattgagctattgttttttaacccccttatttttcgcgcactatgtctctcgattgtttacattgtattgcatgccaaattgtttcccctttatggacacaaaaactcaaatttggattcaaaaatggtgctaagaaaaggggttacgagggagaagtcggggtgtaaatgggcatatttgagttacatttgcatgcctggcacgagtgcacgattttttgatgcctttttgaaagtagctgcgtcgagttgcattctctatgaaagttctttctctttcctgtctataatgtcatctatatcaatctgcttgcatttgaacttgttctttagactattagggtggaccaagctttcattttagatgtgatatacgtatattatttgaactctccatttaaagtacatttttttttaagtgtagcctagaatgcacttttagttatcatatcgtgtagaattacaaagcattttattgccacactaattgagtatctatttttggtcacgcacgtgtgtgtgcacccaccgccccattgctgccacgcccctgacctccggccacgcccccattcgtgccgcccccttcccttgtgggtatttgttttatatacccgttactcgtagagtaatattgaaatttctcgttcacactttcagttaagtagggggtatctgatagtcggggaagtcgactatagcattctccctcgttttttgctatttcggtggttcacttcccaattgcgggaatgggtgtgtgctccagatgggtttggtttggtgccgcttccgttttcatgtacacttcgggatgcatttcaggatacgagggttaatacccattaatgggtagcgggggaaaaaagggagtagcagctgctgtttgctgtttgctgcaacgacgcctttcattgtcaaaaccaacaggccaaaggcaaattaaatggttaatattattagtggacaagctaacggtggcggaaacatcgaaacacacctaacgaaaataatgcgatcgacatctagcccacccatcaaccccactctgactttagcccatttttttttattattattatatcattcgaattaatgagaagtaaagagagttcaaggtggggagcaccactctacgtcatattcatgcttggttaggtcgccaaggtggctcaaaagatcataaaaaagtaaaatagaattgggaggtggcggtgcgtgtgtgtcgacaagctccattgaaggggaaccccggggtcaagtgcataatattggtcaaatagttcaagatcaagctgaagtagttcaaaaagatattacgaagtaattgtttaaggttaaatttattgcgccctaaatttcctatgattttccatatattaatcaagatgataacgaaatgaaaagtattttctaattttctcgaaattatcacaccgttttttttttaacacgtaaccaaactaaaagttaactgattatcattttcagatacatttacatttctaataattttatccaatttctcccattggaaaatctctttttatcccataatattatgaagtggttcccgttccgtgctttttaataaaatacgaacaacaaagcacggccatttagtttgtgttttgtttatttatttcatttttttttataattgggctttgttcaaactagcttggttttgttttgccatctacaaaaaaaaaaaaacgtggcaacaagatgaaaacaaataaagcgacaacgcttaacaatgcaacgatctgctggtcagtggagctcgtgtgggcgtggcaccttccgaccaccgccgccgccctcttcccggtctaattttttttatatattttttttttaattgcacaaaagcattttctgtgcagcaacgtgacgttttcgggcaatgagtaagcgcgaaataaacacggtctctaaaacactgataaaaacttttaaaataaaaaggagataataaataaaacttatattcgaaaatggtgtaagaagcaaattagagtaccgaaaatattaagttggttaatttgtaattcatttcaggattgaatccatatttatattggtcattgttgtaaatgaattgttttgaaattaccaatacacaagcatttccatttaaatgccttccattaattttggcgtgattcattgctcattattttgtatcctttcgatcggacctctttatcgtgtaaatatagcatgttgtgtaccatataccttaccccaaaaagcgttcaaccgatggcgatcgcacatgcctgatataggcacgtatcggaatgtatctttgttgtttgtttattttttgcgagtgtttggcaaaggggttggcttgggtcaactacccaaacccgtaccgtaaccatatccgtgcccatcgccagtcatcgacactagcagcgtcaccattcatcagccataaagtacccacgactacatttgaacacactcgcaaacggttgtttggttggtcaacttttgcacttcattccccgggttctcttccattgcattcgaatcaattccgctgaatgcccagccaactcaatcgccgggtaacaaaaaacccagacgaactctattgcaattctcaagcactccatactctcggttgagatgagcactaggttattctacttataggtttcaaactgactaagattactagaaaataaaagttaccaactgtgaactgtgaacaattattacgaaatgtatatatattctataatacccgcttcgtagggcattatcatcatcatctcggcagctcctgtgcttgttttcttaaagtttttatttcaatttcaatttgtgtaataaccaaaaacgtaagactcaaagcagaacgtcgctcacgtttcggtgataaagacaaaaatgagcaagtagtagaaatcgacaaaaaccgcatttttttctcgatgatgcaaagtaacaaataatacaaaaaaaccaagcctgactggctggaatgccgactgaattggcagccaacggttattgagttcaaaaaaaagaggcgaaaagctgcgtttgccccgtttttttttttttttgggataggtcagttttagtatagctttggcgggcaatgaaaggcgatacttttagaaatcaaataaacgtagccattcattttggaacagcttttcttcggctccaattaataaacgttattgtagatgtatttagacatatgtcagtccgaaattaacatttggccgactgtgagtcacaaatttgtatatttccccctaaataaaactacctatcgcttttatctccctatatttgtatttgtccaggtgtttcctctatataaatacaaaaaaaaaagagacgtgaaatttgtacatgattcatccaaagagagaaataagaggcactgccaaagaatgtcgatgatgaaggccacttcgcaaaaggctgtaaagatagtctagtctcgactttggcttcttttgggttttttattttgcttttatttcgtgaccgcttttcgtaggcgctgcacgtgcaaatgcttttgaatgaaaatgaaaaataggcaggaaggtgagccaaaccgcaaaaggcaacggcgatagctaaaacccctttaaaagcccccgcaattgggccacgcccaatccaaattgcgcacttgcctcccctacgtgtttaattaattatagacagtcggtgctcgataaggtgaattttttgttaagtgagcaagcttgaactcgcggtacagaaaatatatatttaatattttttataatataatatattatgtacatatatatatatatttattatagtaattttgtattttactactatttctgtttattgccattaaggtaccactgtaccttaagcgggggcgatgctctttgcccagctagagagggagagagagagagcaacgccgctcttttttgcatgcctgtcgcacattttgctctcgtatttgctcacatgctcactgtgttctcgcaaaacgaaagactgaggcgacaaactcgacgactggcggcaaatggcggacgaagagaaagagtcgttccaattgagcaggctatcgcacatttatttatgtgcatgtaccttgtatgtatggcaataaaggtgtgtgtacaatgcacccacatgccacaacaataaaactaacaacaactctggcttggccttgaaattgcttagcaacaacaacgctacttttttgcacgcgctgactttaagtcggtgggcaaataacaaggaaacaccagaaaatcttctttggcttgaacaaattacatttaatattaacaaatacatttatattatgttcagtttgactgtagtgttctttttctttttctttccaatgggaattaccattctaatatcagaaatccaatctataacaaacatacgctttttccttatggttatcttcggaaaaaattcatttcagggaattgttactcttgcttttcattcgacattatttatgaccaaaaagccacccaaacactttccatttatttttgtggaattcagagacaaacgcttccactctgcgcccctcataatttctaagcatttttgggcatttaatttcacttccatgaacaataaaaaactacgagaaaagagtaaatttaatttctatatgaaacctatttttatttaacccaaaaaaaaggaaagcataaaaaagatttgtcatcgcgctgtagttgcttttgtgtatggtttatatattttcatagtattactttatttttgactgtgtttctttatgataattgttatttgtgttgaaatatttgtgtatttttgttggtctgcgttggccagcttatgaaatgatgtgaacttttgcacagggttgtcttggttcagggtttcttgtggttgatcattcctttgcgagttttaggaagacggaattctagccgaaaaatgtgtatttgcccacacagtaacattattatgtttatgattccaaagcacagaaaccaagcccataaatgtatcttcttgttttggtttaatgttgtgtcccctgtcgttgggaaaaattcctggaatcgggaatcgttagacctgaggcggaattctctcatctattgcaatgcaggtctctacaattcacagataaaaagagggtgtgccagggaataatatatctgtatacggacatataaaatggtgtggtgtgggtatgatagaaaggggctttgttgtagttctgtttgaagtacgtatttaagtggcatttagcatgaaattgcgatccttttgtttgctggctggcatgtcttgggtttgtttagtttctgaaaaaggaagctttcatttaacgctttcaacggtgctacagtgggacctctggaatggcagaaattcttgaaaagtcttatttaatgtgtatattgttgtaccatatcttaaaagttgaaattcggcttatagtttgaaaacagaacggaggaacgaaacataaagtgaccaaaaatcgtttttcctggcaataaacaaattagtttatcttgtcagtccccattaactgttactcactgtaccaccgcgttctgtgtcatgcgacacacatgaatgtaaatctcgacttactcttttttcctttgtgcgtgtgtggtgtgtcgtctcctttttcaattccgcaaacaataaattatattgtttttggataccccagcgatatggagaataagaataagaggaagcctttcttcatcttgcatttctccacacgatctttgcttttgtttggccagaagaagaataaagataatacgaacagtcagaaaaaatcccccaaagcggcattcagttaccaaatacagtaagcactcgtcaatttaaataaactaaatttttgtaatatttttaaatattattttggttaagaaaaaatttaataaatattaaatattgataaaaatgtaatatttataagtaagtagaacacttacttgctttgtatcttaaagatacgattttatagttcaccctgttaaaatgaggatcggttttctcagcgctttgttgttcggctttttctttgtggttttggtaggggacccagttgatgggattaccttaccttattcacttgattgattggatgattgattgattgactgattgagtgaagttgcagctacatctccaacttttatctcaagctggtttgccttgaaataaatgcgtttccgtcgtttcttttctttgtcgctgtcttggctttttcattttcttcatcacctgttgccatctcactttcactcgaattgactatctctttctgccgtggcttttgcataaccacgatcgaacgagcttttgtaatgaactctgacccctgacgactcccctcccactttcatcgccccttaaaacattttgatggcattgcggaaattcacacacattaaaaataacaaaaaaaaagatacaaaaaactacgcaggccaaaatgaaaacaacaatttaagcttgcgcaatatccgattggtttattgctgtcttgttttagttttacaatgttttttcttaatttttttgttttgttagctatagaggaagaagtgacccaaaccaagccgcttagacaattacaattaggagcgacaactattttctagatatttttttcgttgcctctctgggtcagtttttgtattacttcgatttgtttcactggcgctaagtgacttggctaaaaagtggaggaaaatacaagataagtgctgtaaatgggacaaataatgatgaatcattagatcatgttgctaatgggaagaattactcatcagataagtgttataagctaaccaaaatgctttacaacgttattcaaaacttaaaaccaaactaatgtgttatagatctgctttcaattcactcataagtattcggttaacgtgccttgtatatggcttaaatttcatgggttttcccagaattatatcgccgcatttcctaggtacacatctccattagttaaatagtttctcaaaccgaatatccatccccagcaatccaggatactcggcacattttaaaattcagagcaagcagatgcataaataaacgtcaggcagtcgctcaaaaatgtcaggggtttggcttggcttgccttggttcttgggtttggtttggcttggttttggttttggttttggtttagttttggtcctacccattcccgttcccattcctctcgagctccctggtcggtgacactgccattcctctcacgtttccctcgctcactgcgtgtcaaatcaaagtgcgacttgagtgcggctccccaaagatttgccctgcaacccgctccctcgtaatcccatccatatggaggccccacctccaacacatgacaacaacggtcgcgtacagtggaacgtttaattatgcaattatacagttctattacacaaggaatttcagctaaatctagcttaacgctcaatgttttaataaataatataattataaatttacaagtattactgaaatgtattgttaaagaatgttataataaggaacattacaaaatctgtcatgatgtactcccaaaaattgttttcactgtgctacagtaaccacacaaccgcagcaacagcagcaggcagtcacgagccgccgactttaagccgcttgtaattgatcgtgtctttgacattagaaaaacattttctttctttccgccccgctcccaattttcctcctcccaatattcccctagttttcccctccgtgtcttgttgttgctgcgcttgttgcatgaaaatgtaacgcaagcacgagacatcgtcatccgccgaccaactggtgcacggtggctaataaagcgcacgcagcgacagtaaatccacttagcggtgggtggtgggcgttagatggcagaaggtggtaggagtgggagtgagtggagtggagcggtgaaaaacagaagggaagccgcacaaatggtccaaaagattcagagagtgtcaaatgaaatgagacgtggccggagcaacaggcgaagaaaaaaaacaaggggagttcactgccgatacagtaaacatacgataaaaacatttcataaattactttaatggaatttaacataattgaaatcgggccatatatatacatatatataggagattcaaaatgcatgactaatttacttttaatagaagagtgccaaacgcttggcaaagaatacgtaaatacgtttcaacttcatttgatagttaatttatggaatatgattttttataaaaaagaaatagaatttcgaaaggaatttcaattttgaagaccaaatatttccgcgttgattcaacgcttttcattttaacatctaactagagcacgtatgaaacctagttttgtaaacatatcaatgggcttattatcactgttccaatttattgcctaccccaaaaataaacaaataacaagtgtcggtaatctgaaactaattttcttttccatttttatctacttgcaggtaagataacagctagttaattgaaacaaaagttggtggggcactgcgaacaggtatgccgtatggatgacccacttgaacgagcatttatttccactgacaaatgaaatgcaagcaccgagctgacacatgccatgggtgcagtgagtcgtagttgagtactagtttcagaatgcagagattccagtctaaatgtatgcttgcaccaaactaaactaggcagggctcccaatcttatcagcccaaccaacccaaccaatcgatgcatgttgcaagcgcaacaacctcccgaaaaaaaaaaaacaaaatcaacaaaatacctaacactcgagggggaaacaacaaacgttattggggtaaatgggacagcggggaaaccaaacaaatgccaaaaactaataaattatttataattatttatgtccggggacgaggagcagaaacaacaaaaaacaaaggtcaaagacaatagattcagaactaatatgtttcataggaaaagaaaagtacgaacgatctgtctacagaaacttacattttatacatacatacattttactcactattttacacagttcaccaacacgccaactggtttcggcggatgtttcttgaatgtagttcgatagttaggtgtctagatgtcgctgttaacttgagcactgtacgatcatcaaagtatatttgcaaaatcaaacaaaagtatcgcaggtcgaataatattgatttaattgatgtcgctttgttttttttattattttataatattgctgcaactgttatcgttcgtaagctacagttttatggcgattgtatgatcatttccgttaaaggtcgttctcgaagtaaaattataaactagatggcgccaattgagtgactgatttgagttgaaattaaaattgaaatcaattggtaagaacttcttactcctcttactaagaagagatggcgaccttggggtcatcgaagcgcaacaattacaacctgctacccacttctgcacctcttttgattttgaccgactgcagaacaaaacaaaaccgaaataatcgaaacggaacgggaaacaaatcaaaacactcgaaaagccatcgaaaattgggtgaaatggtgaacgaacttaacatttttttgcgcctgcatctgtgttcgtctaaatctattgtttaaacacacactcgcgccataaagcccagatgctgaagacaatggaccagtcgagcaactttgtcttaagcacgcaaaactgtgaaaaaataacaaaaaaaaaaaaaaaaaaaaaaaaaaaacgagaccagctgctcgaaaacagctgagaagttttcaataacgaaaccacacacttttcagttacagagaaaaaagttttaagcattggataaacattggattatggtgctcttcctatgaatttcgtcgagctaatcctaatatcttgcaaatgtatcagattatatttcgtgttttattataacattaagtttttctctgtgcacctcgttatatattttcccaactcccggcgacttattgctcattagttgttgtgtgctcgcattttggctgatgacaacgtttttttttgtttgttttgtttaaagccaaacggaagttttggttgcctaaagttttacagtcactggccgaacaatgggaatttgtaaatgaatgaatgatggagccaaagaaaggcaaagatctaattgctcaagaacggaaacttacgacttgattgatgactcacctgattgagtggtgagcggactaagataaacttgtgcgaaatgaattaattaagtgcagccagagcctgatgagcttcaaatcacacaaaactgacaactcactctttctcttcatttggtcagatgcataattatgtcgctaatggtgccaacaaatcgggtacagtgaacactagacagcgagtacaagatctagtacctagagaaatcgaatagaaaataagacattatctatcacattgaaattgaaatgccaaaccaatgcattacaaaatttaaacatacatataagtatgtacctaccatataacttaaaatactgtactataataagtccagcaacaaattgaatttatgtatttattttttccgctctttcgtttctctcattaattatgcgaatgttgtccagtttttccttctcatttgcagttgttgttttgcttgtggaaaaggaagctttccagttcgtttggtttcatagcgcgagaatttcagctgaaaagcggaataaatgcctagctaactaacaattgcaaatgcacttgaaggccaggccattgtggtagttgttgttgttgctgatggtgatgtggtgatgttttggtcccagaataagtggaaaaaggaaacagctaatgatgatgattaccatccgaccatcgtcattatcaggcgtcgccgacatcgtcgtcaatcgttggcatggcattctgtgtctagttcgccttgcctcaccttcctgccaccaacaacaacagcaagtacaccgcttaacaatgccaacgacgtcctggcgtcaactctgcgtttccctgccttttgtttgaagtcaacccctcctcacactcctcccgcccattccacttaaatttgcattcagcgccgcccaggaagggcgggtatatggactatggcatcgcacaggttacttcgctggatataactgaaatatctgtaatttcggggttttagcttgaagatccgtttttgcaacacactgaacgtcctatacgtaaatttgctatttttccaagaaatatggtatcgtcccataatgtattagggcctagcatgaaaacgtaaataatattggaatttatgtatttaatccagcagttcttgggaaaaattagtgagagagtttgatgttaatctgatttttaatttaacaatttgtatttgtattattgattaatttttttgatttttctgcgcataggccgtttttataatacgatatatccatccgcattctgggcacttgttgcttctaatttcgttgttgttgatggttgttgcatccccttttcctgctgcttttttttgttctgcgcatttgagtttgcgttccgcttgacaaagttctttgtgtttgttgttgttctccttgcccggtggtcagtcgcaagcagtttgagagccactgcaaccgcctgcacttgccaaagccaaacgcaggtgaaaagggagagagagagatagcgagagagaatggttatgctctctcaacacactgaaaaaatgaatttgaaatgcttatatttttatttcaaaataatgctagttttaattgtattctgctacattgttaatttagttatgtttttgtatatacattttattggcttgtattcttagagatcttttattaatatatgcaacttacttacgcgttattcttccgagtgcacgcgatcttgcgctctctctctcgctctttctcttcagcggctgcgattggtgtgtgagtgccgtgagtgttttgtttttgcggccgcacttcacttcgctttagaaatgcgtcgtcgtcggacgtcgccgtcgctggccgccgccgtcggtaccgcaattgtttaacacaattattttaacggttcgcataaaagtgcaaaaagtataatggaaacataaaaaacaactaaaaaattcgtttttttttgtgttttgttcaagtgccaaaaaaaaaaatagtgaaaatacagagtttgcagaccattgtgctttagttgaaactgcaagaatttgaggtttatctaaagttggctggtagccgataaagaaatagatatatatctaccacgacaaagaacattcgagattaaattccagataatgcaaaagtgtcttatttaaaaatgcgcaaacacttgttgttaggggtgattcttcttaaaaaggttttcttgtgcttagattcccatgacgagcgaggaaatgcaggaaatgtcttgacatgcacacacatacactcgaaaaaacctatgctcaaaagatttagtagttacataaattatgacctgaacaaaatgaaagtttgatagttcaaaaggttctctattaagaaaaaatatttaaatatatcttatatattataaaatggaattaatttcatattgtatagcctcccccaatgccatttcgttaatggcacctgtatttggaaacgatcatgagtagggaatcttcccaccatatggctaatgttcccttccttggcatttttatttttgtaacttttaggtggcttcttttgaagtatcggatcggatcggatcctttgacctttcacatttttctttctttctaccttcgcatttccacatccacatccacatccttgttacgacggctaataaatccattttggtctccaatttcagttggttttacggcaggtaattagaagcaggaattcccacatttgtactggtgtgatgatgatgccaatggaattaactttacgatagggtttcacgaaaatattacgtaccggattaggttgctaagggattattgtatgactttactttgcttatggggaaggttccattcttctaccaatcttatctaaaggtaaattagaaaattgaaatacctgggataccacaacacctaccactaattgatattcttttggttgtgccccaaaagggtttgtagttttatctttgattgaatacctgactttagtttatatcacatcttaagggaatacaatcacttcaatgccctgaaaatgttttgtcctttcatttaaatagatttgttattagttttggaagttgtcatttgtttcatattggcaatattctataatcctaactttgctagttgcgatgatcataaaatatggaactcgaagatatagaacgtgaatctttaagtttaacaactagttaataggcttttatgggttgcaggaagttctgtggcatgtggttaagtatctgaatatatagccttgattccagcgactttcacttggcaggaatgccgcaaagaacaagaatccgcatccgaatgggaacgagaactgaaactgcggctccaacttggtataccggagcaggttggaagccgggaaaaccgggggcgtggccggggaggaggccaactgaagggggtgggtggttccaccagttggagttgccgcttgagttaagcttgtggttggccttcactgactttggcatcgattgggtgggtctgacccactatacatatatagtagagtatgcataatctgtgtgctttcgattcttgaagttaatcttatcgttctgcacagataaaataactttcgggttacggttgtggtttccaattgataaaatattttcgccgttcgctgcgttctttgtttttgctttttttatggtaactaaaaaggtttttccgaacaatttcgattagtgtaatctaaagcgggaaaggtcatataactattttggttgccctctgggtggggctcttaatgattataaatagtaatctttcattcatgatcacccaattgttgcattttcactttaagtgctcacttccgtacattggcaccccatattatttgcattaaagtatttttatagatccaaaatatagcataccttgggtttcaaaataatgtttacaatttaaaactaatgaaaattgaatgttgataatattttaccaagaaatgagtcgttatttaggaatttaacatgtttagttcatagttaagtttgcaattttgcaatacctgtgaattgtaatgttttgtttgatcggttttctccaaaataaaaacgataccagctataaaagccgcaccagtgccgacagaaaaacaaagcataaataccaataaatcgctggttgttggccatcaaacaaaacgattcgaaacaatcgaaatgcacagttaaaagccggctctgcttgattaactgttcgtttatattttgtatttgttgttttggctttgggttgccaagtgtcaccgaagtggctttaaacaaaaataaaagtaaataaatataaacttgttggttacagacgacagtgagtgaaagtgacagtgaactcaattgacctgaaacgaatacgaaatacgagcacgtgttgtatttgtctctctctagcgccatcattctctctttgtccaacaacgcctgcctgtctctttcgctgcgttatcattaccattttttgttagataaaatgcgtataactgagatattaaataatgcttgagtaatgcgggctggtgaagcttactcaagggtttccaaagcacagagcactcattaaaatctttattacactgagaataaagataagagtggaaatatataaccacaattgatatatatatatatatttgtttaattgtctctttaaataaatggcgatgcgtgatatctcaaaagagagcactttcttttatatttacatatatgtatttgtaatacattttctccaagtgtacgcccagcttttacttttctccaccaacttccgtacatcctatgccttttcacgtgcaattaagcacaagtcgcagccgtttaaatcaattaaaatccgtgttactcaatcacaactactcattcgcccaaaaatccgcccttctccctcgccatcgtgggttcagtcaactttttggagtccgaaaagcgaaccggttggggatatttcccttccccctccccccgcccccttttttttgagatattttttcggcaatggcaattacgagcaaacgttaaagttaaagtttgtaagcggcttttgttgttaaccatttgtccgtgcctcactgtattcaactcactgtttctgtcgacgacgctccactttagaaatggctaggaaaaagatgaaagtttttccctgctcagctgcaattaatattaatacgtaacaaacatacaaaaaaaaaaaatgaagaaacgtcaaagaaaaaaggtacattaagcaaacaatttttaagagcacataaagcgtcacgttgtgaggcagctacacaaagtttttcctcgtaagtttctcaatttgtccaaatgtcaacggggggagtaatgttatatgaaaatggtattatctgctttcaaggccctgactcacacacttttgcatttggagctaaaacgggtggggtaatcatttgtttacctatcagcggaaatgtgaaccaagcgcgtgtttgtgaaatataatttgtgattcagctaggtatttacacgagaattaaggggaattgatactccatatatacagaatcgggtaatcaaatgtaaatgccagttttcgcactaaaataagcaatacacatggtttattgttacaaatacagcagctacttttaccaaaacataatctcatagatatatttatatgtaatttctattatagggcttgttaatactcgtacatattacggtttgatcaattccaaactactcagataagtgcttaggattataataatcattttaaaacagatcacttatgtttcttttatttagatattaatataatataatattataatattatgtttgtttatgttcagttttgaaagtttcaatatgttcccgcatcattataatgatgtgttggcatcaacttccgcggttctcaagccattgatcttgactaaagtgtcgcataattacctgggcagtaattaagccagaaggaaaaaggtaaaagctgggaaaagagcaaaagcaaaagttgatgagccgcaatatggtggaaggtttcgtttttacccccgatcttcaaagcacgcatgatgggtgttaaaggtccaagctctttttcttgccagtctttcagttattttttctgttatttttttgtttttttttgagtaattatggcaggctttctttggccatcaacctggaatagagtggggtttacgacggaacttgtgtcacttttgctggcttttctttttccacgtccattgtgaaatattttcccgcgggccagcgacctcggcatatgggaaatacgctgggtgactagatgacacccactcgatcccatatatctctctatcatatcatatcgaagcgattgattataattagagtgcctaatgtgattgggaaagccaaatcgaatggggctgtggccattagaaagcgttacaattgacattaatagacttaaatggcagcgactgcattttcactcgggtttcccgacagcttaagctttaagcttttccacaacagctgttgtttttcccacttttcgtaactggagtgacccatagctgcccttgtcacccccactatgtacatatgcatgtgttttcagctggagatgggtgccaaacaacagaatacaataaacagacggtctggattcaattatctgctaatcatgtgtgcaaatgcccttcatgatgccatattattttgctttcttcgtgttaatcatttgctgatttagctgcctgctaaaaaggtgccgcctctctcctttctctcctttcacttgttttcagttttctgggatcttgaaagtttgcgtttgggcgagaaaaaagttcgatcgtttaactgatctcacctatgaagcaatatttcctgatgtttagttttagtccgtttgaaacgaaaagaaataataattaataaataacttcgagctgaatttcgaataatattgtgttggaaaattctgttttttcgtcgtatttctccccaatgttgctccgttgttaacaataatgtttttttaagtcaacaatagtgtgccacgcctccagacccgttggcccgcctccttgtgcctgcacttagccgtagttatatctaattttattttatttttttttttttgcatacatttttccacttttttctgccgtttgctacacttcattatggtgggaggttttcttcagatttttgcagttttttcccgccctttgctgcatggcatgcataatgacagcgtgtaatttggcctttcttttcttctcctgcatatttcctgcacgtttgtggcactcacatttatccaacccccaccccccctatcatcccatctatccgtagccccaccccaccatttcccccaaccgatggagattggaacctcacggcatctcgtgggttgttaaaggcctgattgcgaattatggccaccagctctttcagaaatctgaaaactgaaaactcgaaaactcgagcggaaagctggctggcaaaggcacaaaggaatcgacaacgggggcggttgcatgtctggggggcgtggcagcgtcagaaaactttatatgatcccattttatgctaatttacgagcatttttcccctttcaattaatttcttcccaagggagggacatcgctgatttcattataatatgcacatgtatttatgatatatatggtcgggggttattataacgccatttctatgcagacagcgtttttattttccgaatcgcagccaacaagggatttcctaattgataattcaatgtggtgcgtgattcgtaatcaaaatggatgctaaatatataacttggcatttacaagtaaattggaaaatcatagttaaataattaattactgtttctttgcaatatgatgatgaagctaaatttaaatatctttgtaatgcttgcagttgtaaagtgcaagtaataaatgatcatttaattaatattatagtatatttactataaagtttaaatgaaattgactcctggccttcattctgctaccaattacttgattatttgttgaatgaatgataaatcaatcaatgaatgcttggctgaatgaatggatggattcactctgcacaatgactacattcgtttgaatggcatgaatggtaatgaatgagttaagcaggtgacctttaaacgatcgtgcgaataacatttacgtttgtttcaagggattatcgattttcgatgtgcccaaatattaatttgaattggatttgggaagatacgcaatgctataaataaaccccaccttatttaaaatgaaattgaatcttacaacacaccttcacttttcgctcagtgtagaacaaaccagtgaattgagcgagtttgttttacttctgcactcagcttgggttttattttcggcttaagtaaatatttgctcggcctggaaaaatgtttatgcgaatttcggggtctagtctatatgcacatatacataaacaaataaatattccgaatgtatctgtatctgcttgtcagttgatttttttgtactaaggagactgccttttgctgtgtctaaaatttctagtaggcaaataaatcgcatttgcgagcggggctgggtggatatgggagatatatcttgtcatgcttcagcgcgttgttggcgcttcaaaaagcaaaaaaaaaaaaatgcgagccattgttgttgtcgttgcgaaccgaacgtcgtacttattacaggtgtgtctcaccatccatctctttcgctcccacggcattgaggcattcgagctgctcaggtgcataatcaaagcgaatttgtgtgcgaaatgggttcaacttgccgccgttgctgccactgcctttttgctgttgcaactgtccgttggcagttgatttatctatatattaatgcattttatatatgtatatatatatatatatattatggaaaaatgcctgaacacgaacacacgatcgtcgtatgtaaagggggaaataaaatggtagccgtgcaagcctgaaaattgcttgggaaaaggcctttgctttcagccaaagagtctcagaatcggaaaactagtttttcgtaaaataattgtaaaccccaatggaaaaattgggttacatttttgttgaatgtgcagaatgtaaaaccgggttgcagacatacatacatatctatataaaccttgattatttgtgactcggctttaatttccacttgtttattttcaatttgataagtgataagtttgtttattatcgctcgacacaacttccattgactgactcgcttagaaatctgatttgcaattatttgctttgcgtttgtcaacaaatctcagaattcataaacaaatctccttcgtataaaagaagttaccattcatatcgttttttttttttttttttggcgtctgtcacaatatcttacttacaatttccaatgtcgtagacgggagtcgagttttatttttgtgtgtgtgccaaagatagcatttccgtgtgccaccgataaggcagccaattcacactgcattttgatagcgtttttgataggacggcactcaacagttgccgcattgcatcaccgataagagcgtagactaaatcaataacaacaatagtaatcatcataataagtacaatggcgcaaacgcagtgactaagctttgtttgaatcacggctaataaataccttttaaatgccacacagcggtgaaatgttcctcaaatcgaaattggtcggcagttagaaggaaaagccaacgaaaagcgaacaataaaacaaaacggagagaatcaatcgaaatatatttaacaaaataaccaatcagcatataccaaagatcgcatttcgatcatgttcgacgtaccgccaaagtgtcctgcgttggccaacaagctgggcggtctctttgggtggcgacacacctacaaggtggccgccaagcaggaggggattccccatgggcagctacacaagtcctactccctcacgctgcccaagcgaccgccttcgccatcgacctattcgtgtgtgaaggtaaagctcgagagatatactatatactatattaagggattgcaaagtttaagatcaaagactggaatcaagatcactgggaaaaatcgtcaaaataaacaaaatatcaaaaaatagagttattcctaagaatatttttgaaaaatcaagcaccaagtatttattactaattatttcaatacaaaaataaataagattatatcttaaaatttttaggcaatacagttgcatatcaaaatatttattactaaaatttcaaaaaaagcagtaattagagatattgtagatacatttttctacgtgccgatatacacacatgccaaattcaatcacaatctcttttggcattcctccagttcgataccacactggttcgccctgcgaccacgcccacatagcattttcaatctttttatgatatatgagatcgagatcatgttgtcgactcgttgccgcataatttccattgacaaatgaccataaagaagtgtaatcaatgaggcacagtgggacaaaagtggttaacatgctatgtgaaatcttgaataaaaagagtctaaataatttatgataaataaatttttgaaataattgattgtttttataaaaatatcgatttaatgacatttttgcaaacagccaatacatattgaacacatttcattctagtgtcattgacataacccactgttccccaactgcatttttaaggctctattctacttgccaaatagcgaaacggtatcccaaaaatcggtgctgcatctgatagatacttagaatgtctgaatgcgcgctctttgacccacaaacaaaaaaagacatcgaagaaaccatgtgaagaaaccaaaaaaaaaaaaaaaaaataacaaagccgaaccgaaaacagaaatcaaggaaaagacgcgaaaaatagccgaaattattgcgccaagttgacgattcgttcgacgttccagttctgcagctcgtctcagtttgctgagcctccaacgcttttgactggttttcaaccatgatgcaattgttttgtttcttatgcaccagaaaaaaatataacaaaaattcccaaaacatctgcaatactttaactataataaaccagcaaaagataaaaatcaatagcatacagataaacagaaactcaggttgaatgaagcaatttagattaattaatccattgagttcctacgctaaagttttcgaaacatttagtaaacccataatgaaatgttgatctaagatttgtaaaatctcctccagttcttgctagaattttctccaagtgagtcgttgttggtggtggtcggcatttggcatttgttgtggaatccatcggaatgccaaaagcaacaccgccagcagctccttggctgcttagctcagctcgacgagaagagtagattgcaatttggggcgctggaggtcgtcgtggtcttattaggcttattaggcgtcgctcagggagttcaagttgatgatgagcccacgtgagcgatggagtgactcaacacgtagcggttgctccatgcggaagcacagatgtgcagatggtgcaaatgggatgtgagaagcgagtccgcgagacgatgcgtcgtctcctctattggcctttccagattgaagatttgcagttacgagatttgggggagggcttgaatggatgttgggaaagagttccgcgacttccacggcccccagtctaatggaaataacagatgcaagagatgcacgtcttactgtttcgttgctggggagatacagtgcatactctataatgtgaactaataaaatatattttaatttgctcagcaataatagatgtaaactcaaaactcattgatattttgtattttttaaacttacagcccgattcctgggtgaccgtgacgcatctccagacacagtcgggcatcctcgatccggatgattgtgtccgcgacgtggccgacgatcgggagcagatattggcgcactttgatgacccaggacccgatccaggagttccgcaaggaggcggagatggagcatcgggcagttcgtccgttggcaccggttcgccggacatctttcgcgatcccaccaacacggaggcgcccacctgtccgcgggatctctccacgccacacatcgaggtcaccagcaccacatcgggaccgatggctggactcggagttggactgatggtgcgtcgcagcagtgatcccaatctgctggcctcgctgaaggcagagggcagtaacaaacgctggtcggcggcggctccccactacgctggcggggattcgccggagcgcctgtttcttgacaaggccggtggccagttatcgccacagtgggaggaggacgacgatcccagtcatcagctaaaggaacagctgctacatcaacagcagccccatgctgctaatggaggctcctcctccggtaaccatcagccgtttgcccgatccggtcgcctgtcgatgcaatttcttggcgatggcaatggctacaagtggatggaggcagccgagaaacttcagaatcagccgccagcccagcagacatatcagcagggttctcatcatgctggtcatggtcaaaacggtgcctactccagcaagtccttgcccagggagagcaagcgaaaggagcccttgggacaggcatatgaatccatcagggagaaggatggtgaaatgctgctgatcatcaacgagtacggcagtccgctgggactaactgctctgccggacaaggagcatggcggtggactgttggtgcaacatgtggagccgggcagccgagccgagagaggacgactgcgtcgtgatgatcgcatcttggagatcaatggaatcaagctaataggactcaccgaatcgcaggttcaggagcaactgcggcgggctttggagagctcagagttgagagttcgagtgctgcgcggtgatcgcaatcgccgccaacagcgtgactctaaggtggccgagatggtggaggtggctacggtgtcacccacccgcaaaccacatgctgctccggtgggcacctcgctgcaggtggccaatacccgtaaactgggcaggaaaatcgaaattatgctcaagaagggacccaacggtctgggcttttcggtcacaacacgcgataatcccgccggtggccactgtcccatctacatcaagaatatcctgccacgaggtgcggccatcgaggatggacgcctgaagcccggcgatcgtttgctcgaggtggatggcactccaatgactggtaaaacacaaacggatgtggtggcaatcttgaggggcatgccagcgggagcaaccgtaaggattgtggtctcccgccagcaggagttggcggagcaggctgaccagccggcggagaaaagtgctggtgtggcggtggcgccctcagttgctccaccagctgttcctgcagctgcagctccagcgcctcccattccggtacaaaaatccagcagcgcacgttctctgttcactcatcagcagcaatcgcagctcaacgaatctcagcactttattgatgcgggcagcgagtcggcggcttcaaatgtaagtttaatcacaatctttgaaggatttggaactatgctaatctttttatgttcttaaacacacaggacagcctgccgcccagcagcaacagttggcactcccgcgaggagctgaccctgcacattcccgtacacgacaccgaaaaggccggactgggtgtcagtgtgaagggaaagacgtgctcgaatctgaacgcttccggatcgagtgcctccagcggcagcaatggactgatgaagcatgacggtgacttgggtatattcgtgaagaatgtaattcatggcggtgctgcatcccgcgatggtcgcttgcggatgaatgatcaactgctgagcgtgaatggagtatcgctgcgtgggcaaaacaatgccgaggccatggagacactacgtcgggcaatggtcaacacgcccggcaaacatccgggaaccataaccctgctggtaggccgcaagatcttgcgatcggccagttccagtgacattctggaccacagtaacagtcacagtcatagccatagcaatagtagcggtggcagcaattcaaatggtagcggcaataacaacaatagcagctcgaatgccagcgataattctggagccacggtcatatatttgagtccggagaagagggagcagcgctgcaatggcggcggaggtggtggcagtgctggcaatgagatgaataggtgggtagattactcgatatatgtagtacaacttagtacaactaagcgtattgtcttacagatggagcaatcccgttttggatcgcctaaccggtggcatttgctcctcgaattcagcgcagccatcctctcagcagtctcaccagcagcagccgcatccttcgcagcagcaacagcagcaacgtcgcctgcctgcagcgcccgtttgcagcagtgcagctctgagaaacgagagctactacatggccaccaatgacaactggtcgccggcgcagatgcacttaatgactgctcatggcaacacggcgctgcttatcgaggacgatgccgagccgatgtctccgtgagtctgatagctagatatctctcaaaggcaccttttaactcactttattccttatttctttcagaacactaccggcacgtccgcatgatgggcagcactgcaacacgagcagtgctaatccatcgcagaacttggccgtcggcaatcaggggccacccataaataccgtgcctggtactccgtcgacatccagcaactttgatgccacctactcctcgcaactgagcttggagacaaactcgggcgtggagcatttctcgcgcgatgctttgggacgacgcagcatctctgagaagcaccatgcggcgctggatgcccgcgaaactggcacctatcagcggaataagaagttacgcgaggagcgcgaacgcgagcgtcgcattcagctgaccaaatcggctgtgtatggtggttccattgagtcccttacggctcgcatagccagtgctaatgcccagttttcgggatataaacatgccaagactgcatccagtatcgagcaaagagagacgcagcagcaattggccgctgcggaggcggaggcaagggatcagctgggcgatctgggtccatcgctgggcatgaagaagtcctcgtcgttggagtcgctccagactatggtgcaggagctgcagatgtcggatgagccgcgtggtcatcaggcgttgcgcgcaccgcgtgggcgtggcagggaggacagtctgcgggcggcggtggtcagcgaaccggatgcgagcagtaagtttttggataataaacagatatttctggaattgtgaataatttgtatgcgcttatcttttttagagccccgcaagacctggcttttggaggatggcgatcacgagggtggttttgcctcgcagcgcaatggaccgttccagagttccctgaacgatggcaaacacggctgcaagtcgtcgcgggccaagaagccaagcatactgcgcggtatcggtcacatgttccgctttggcaagaatcgcaaggatggcgtggtgccagtggataactatgcggtaaacatttcgccccctacatcggtggtttccacagccacatcgccgcagctgcagcagcagcaacagcagcagttgcagcaacatcagcagcaacaacagataccaaccgctgcattggctgctctggagagaaatggcaaaccgccggcgtatcagccaccgccaccgctgcctgctccaaatggagtgggtagcaatggtatccatcagaacgacatcttcaaccatcgctatcagcattatgccaactacgaggacctccaccagcagcaccagcaacaccagattaggtgagagcggtcccgcaccttctttgcatcctttcattttgccggtgtcgggatatttgtttgtttaacccagtttattagccatttaacacaacattgtgtacatatgtgtcgtatatctctttctcgcccttttttctctctctgttccgcgtgtctgtgtatctatgttgttgtcaatgtgttaaccacccatcatcacacgcaaactcacccacacaaacacacacaccacacaataacaattacactggtaaaaacaaatatatcgaagcagtggaggcgattccaccacatcgatttcggaaacgctttcggagtcaacactcgagtgcatgcgacagcaggtcatccgtcagcgcatcaaggtcgaggcggaaaggtaacccacccacctacaccaacacccgcatccacactcacaccccccacccacaacctcacccatcactcagatagcacagtgcagtgcggttcgtagatataaagcgggttttcggtaataggctttttagagcttcagttaattaagtaaaactttaggtgtgctagagattagattttacaaaacagaatattgcaatcaataaataacatttaaaaaaaggttatgggttgaaaatatttaatacaattacaatgacatgatctttatagtgttcgtagatatcataaaatgtaaataaaatattaacatgtagttatagtttaacactcgaattgcactgtatctcatcacaaaacacatgaattttggctggctacttgtaaattttacattttcgtttttgccgacaaaacacaacaatcataatatctgcattttgtaaattactcatggacattcccgcttgctttcgcagtcgccgccatcagcattaccattcgcagcgcagtgcccgctcgcaggatgtgagcatgcactcgacgagctccggatcccagccaggatccctggctcagccgcaagcgcaatcaaacggcgttcgtcccatgagcagttactacgagtacgagacggttcaacagcaacgggtgggcagcatcaagcatagccacagcagcagcgccacgtcgtcctcctcgtcgcccatcaatgtgccgcattggaaggcggcagccatgaatggctactcgccagccagcctgaatagcagtgcccggagtcgaggtccgtttgtgacgcaggtgaccatacgggagcagagcagtggcggcatacccgcccacctgctgcagcaacatcagcagcagcaactccagcagcagcagcccacctaccagactgttcagaagatgtcaggaccatcgcaatatggtagtgccgccggttcccagccacacgcctccaaggtgtgactataggtgttggcgcaagcgcgcgccactcgcgatgtgctggccgaaaatcgggtcgttctcagcgaggtcaacgaggaggtggaagtattctacttcgccaccgagtgctgaacacattgcataatcgagggaattatttgtttaagttagataaagtgtaatttgcactaaaccacatgcataaggggtgggttggttaatgtaatcttgtctattcaacatgcaattaatatgagacaagaggaaatttattttatattatgaggtttaaatttgatttgtaactagctccaagccaaggaatggttgctatataatttaaattctatcctgattaaacaatatatgtatatatatatatatatatttatccgtgatatatgattaagcaaacaaaacctagacgttttcttgctaagcggaaagaaccaggataatatttacattagtattccatcataatttcatggtccaagtggaaaggataaacttgattttatatttgtaaattgctaagaatactacttggtttcattggatttccaacctattgacccaccctgacacacgtctatattaagttcacaattcacaatatataaactaaaaaattgcatatttggcgaaacagaaaccaagagagtaacgattaaggaaagtattcccgtaaagcgctatcaatttgtcgagtgcttagatttaatttaaatgatcgtattaagctttagctctaagtccaagtcaaacgcctttgtacataactagtttacccaaaagccaacaagaaaacagaacaacatcaaatcccaaaagttttggacctacactgcgaaaggtcttaacaatttccattgtcatttatgtaagattgtttattattattgtttattattaatttaattattagtttaattctaaatgcggtaattatataaagtattcttagtttgtgaccgaacgactgctgctgagaactcgactgactgcaacgctgacttccactcgactccactgctgccttgcgatcgttccttcgatgactgattgtcgataacttcgatttccgacaatcatgttgctgctcaacagcgctgccaaccgggttgttgccagccttcagccttactccatgttacattcggccctcctgatcatcatcatccgacccggatgacaataggtctgcattttcggctatgtacttccacaacttcatgttgtcacggctggtggatgtgacattgggtccttcgacgtttgctgcttttttaacgtcatatctgccattgtctttgacccctgtgacttcgtatggacctaaatacccgcttgccatcttgcggccagctacaaattgggtccttttaattgcaaccagatcacctgctttgtatttgtattcagctcggcgctttttgtcgtaattgcgcttgtagtccttctgcgcctgcttcgatggttgcgttttaccagctgtctcatctcatagcggtcctcgttgaattgacagaccacttcttcttggagcagttccagtaaccgatcctcaactcgggtgtacatcttggtgccaaacatgacctcaaatggtgacagcttcagtgatgaatgcacgtgacagttgatcgccttttgtacctcaggcacatatttgtaccacttcgacggttcgtctgaagacagctttgatattattgccaaaattaaacgatttactcgttctatctggccgttgcctctggccactccagtagttgtgcagacgtgttccacgttatggctgctcataaattgttcgaacgcaccactcgtaaaggccgttcctttgtcgctaacaattcgcttagggaaaccaaaaatgtttgaccagtcggtc

SEQ ID NO: 10388 - DNA, 5407 bp, DROSOPHILA
aaacgatcgcccaatttaatcaagtgcatatatgtgtgtgcaaaataaaaagtgcattgcagcagtcaaaaatacatacttattatcgcagatcgaagacgataatagttattgttaacacgaaaagtacgaaatgaaggtcaccgtctgcttcggcgacgttcgcattctggttccctgtggttccggcgaactcctcgtccgcgatctcgtcaaggaggccacgcgacgctacatcaaggcggccggcaagcccgattcctgggtgaccgtgacgcatctccagacacagtcgggcatcctcgatccggatgattgtgtccgcgacgtggccgacgatcgggagcagatattggcgcactttgatgacccaggacccgatccaggagttccgcaaggaggcggagatggagcatcgggcagttcgtccgttggcaccggttcgccggacatctttcgcgatcccaccaacacggaggcgcccacctgtccgcgggatctctccacgccacacatcgaggtcaccagcaccacatcgggaccgatggctggactcggagttggactgatggtgcgtcgcagcagtgatcccaatctgctggcctcgctgaaggcagagggcagtaacaaacgctggtcggcggcggctccccactacgctggcggggattcgccggagcgcctgtttcttgacaaggccggtggccagttatcgccacagtgggaggaggacgacgatcccagtcatcagctaaaggaacagctgctacatcaacagcagccccatgctgctaatggaggctcctcctccggtaaccatcagccgtttgcccgatccggtcgcctgtcgatgcaatttcttggcgatggcaatggctacaagtggatggaggcagccgagaaacttcagaatcagccgccagcccagcagacatatcagcagggttctcatcatgctggtcatggtcaaaacggtgcctactccagcaagtccttgcccagggagagcaagcgaaaggagcccttgggacaggcatatgaatccatcagggagaaggatggtgaaatgctgctgatcatcaacgagtacggcagtccgctgggactaactgctctgccggacaaggagcatggcggtggactgttggtgcaacatgtggagccgggcagccgagccgagagaggacgactgcgtcgtgatgatcgcatcttggagatcaatggaatcaagctaataggactcaccgaatcgcaggttcaggagcaactgcggcgggctttggagagctcagagttgagagttcgagtgctgcgcggtgatcgcaatcgccgccaacagcgtgactctaaggtggccgagatggtggaggtggctacggtgtcacccacccgcaaaccacatgctgctccggtgggcacctcgctgcaggtggccaatacccgtaaactgggcaggaaaatcgaaattatgctcaagaagggacccaacggtctgggcttttcggtcacaacacgcgataatcccgccggtggccactgtcccatctacatcaagaatatcctgccacgaggtgcggccatcgaggatggacgcctgaagcccggcgatcgtttgctcgaggtggatggcactccaatgactggtaaaacacaaacggatgtggtggcaatcttgaggggcatgccagcgggagcaaccgtaaggattgtggtctcccgccagcaggagttggcggagcaggctgaccagccggcggagaaaagtgctggtgtggcggtggcgccctcagttgctccaccagctgttcctgcagctgcagctccagcgcctcccattccggtacaaaaatccagcagcgcacgttctctgttcactcatcagcagcaatcgcagctcaacgaatctcagcactttattgatgcgggcagcgagtcggcggcttcaaatgacagcctgccgcccagcagcaacagttggcactcccgcgaggagctgaccctgcacattcccgtacacgacaccgaaaaggccggactgggtgtcagtgtgaagggaaagacgtgctcgaatctgaacgcttccggatcgagtgcctccagcggcagcaatggactgatgaagcatgacggtgacttgggtatattcgtgaagaatgtaattcatggcggtgctgcatcccgcgatggtcgcttgcggatgaatgatcaactgctgagcgtgaatggagtatcgctgcgtgggcaaaacaatgccgaggccatggagacactacgtcgggcaatggtcaacacgcccggcaaacatccgggaaccataaccctgctggtaggccgcaagatcttgcgatcggccagttccagtgacattctggaccacagtaacagtcacagtcatagccatagcaatagtagcggtggcagcaattcaaatggtagcggcaataacaacaatagcagctcgaatgccagcgataattctggagccacggtcatatatttgagtccggagaagagggagcagcgctgcaatggcggcggaggtggtggcagtgctggcaatgagatgaatagatggagcaatcccgttttggatcgcctaaccggtggcatttgctcctcgaattcagcgcagccatcctctcagcagtctcaccagcagcagccgcatccttcgcagcagcaacagcagcaacgtcgcctgcctgcagcgcccgtttgcagcagtgcagctctgagaaacgagagctactacatggccaccaatgacaactggtcgccggcgcagatgcacttaatgactgctcatggcaacacggcgctgcttatcgaggacgatgccgagccgatgtctccaacactaccggcacgtccgcatgatgggcagcactgcaacacgagcagtgctaatccatcgcagaacttggccgtcggcaatcaggggccacccataaataccgtgcctggtactccgtcgacatccagcaactttgatgccacctactcctcgcaactgagcttggagacaaactcgggcgtggagcatttctcgcgcgatgctttgggacgacgcagcatctctgagaagcaccatgcggcgctggatgcccgcgaaactggcacctatcagcggaataagaagttacgcgaggagcgcgaacgcgagcgtcgcattcagctgaccaaatcggctgtgtatggtggttccattgagtcccttacggctcgcatagccagtgctaatgcccagttttcgggatataaacatgccaagactgcatccagtatcgagcaaagagagacgcagcagcaattggccgctgcggaggcggaggcaagggatcagctgggcgatctgggtccatcgctgggcatgaagaagtcctcgtcgttggagtcgctccagactatggtgcaggagctgcagatgtcggatgagccgcgtggtcatcaggcgttgcgcgcaccgcgtgggcgtggcagggaggacagtctgcgggcggcggtggtcagcgaaccggatgcgagcaagccccgcaagacctggcttttggaggatggcgatcacgagggtggttttgcctcgcagcgcaatggaccgttccagagttccctgaacgatggcaaacacggctgcaagtcgtcgcgggccaagaagccaagcatactgcgcggtatcggtcacatgttccgctttggcaagaatcgcaaggatggcgtggtgccagtggataactatgcggtaaacatttcgccccctacatcggtggtttccacagccacatcgccgcagctgcagcagcagcaacagcagcagttgcagcaacatcagcagcaacaacagataccaaccgctgcattggctgctctggagagaaatggcaaaccgccggcgtatcagccaccgccaccgctgcctgctccaaatggagtgggtagcaatggtatccatcagaacgacatcttcaaccatcgctatcagcattatgccaactacgaggacctccaccagcagcaccagcaacaccagattagtcgccgccatcagcattaccattcgcagcgcagtgcccgctcgcaggatgtgagcatgcactcgacgagctccggatcccagccaggatccctggctcagccgcaagcgcaatcaaacggcgttcgtcccatgagcagttactacgagtacgagacggttcaacagcaacgggtgggcagcatcaagcatagccacagcagcagcgccacgtcgtcctcctcgtcgcccatcaatgtgccgcattggaaggcggcagccatgaatggctactcgccagccagcctgaatagcagtgcccggagtcgaggtccgtttgtgacgcaggtgaccatacgggagcagagcagtggcggcatacccgcccacctgctgcagcaacatcagcagcagcaactccagcagcagcagcccacctaccagactgttcagaagatgtcaggaccatcgcaatatggtagtgccgccggttcccagccacacgcctccaaggtgtgactataggtgttggcgcaagcgcgcgccactcgcgatgtgctggccgaaaatcgggtcgttctcagcgaggtcaacgaggaggtggaagtattctacttcgccaccgagtgctgaacacattgcataatcgagggaattatttgtttaagttagataaagtgtaatttgcactaaaccacatgcataaggggtgggttggttaatgtaatcttgtctattcaacatgcaattaatatgagacaagaggaaatttattttatattatgaggtttaaatttgatttgtaactagctccaagccaaggaatggttgctatataatttaaattctatcctgattaaacaatatatgtatatatatatatatatatttatccgtgatatatgattaagcaaacaaaacctagacgttttcttgctaagcggaaagaaccaggataatatttacattagtattccatcataatttcatggtccaagtggaaaggataaacttgattttatatttgtaaattgctaagaatactacttggtttcattggatttccaacctattgacccaccctgacacacgtctatattaagttcacaattcacaatatataaactaaaaaattgcatatttggcgaaacagaaaccaagagagtaacgattaaggaaagtattcccgtaaagcgctatcaatttgtcgagtgcttagatttaatttaaatgatcgtattaagctttagctctaagtccaagtcaaacgcctttgtacataactagtttacccaaaagccaacaagaaaacagaacaacatcaaatcccaaaagttttggacctacactgcgaaaggtcttaacaatttccattgtcatttatgtaagattgtttat

SEQ ID NO: 10389 - protein, 1464 aa, DROSOPHILA
MKVTVCFGDVRILVPCGSGELLVRDLVKEATRRYIKAAGKPDSWVTVTHLQTQSGILDPDDCVRDVADDREQILAHFDDPGPDPGVPQGGGDGASGSSSVGTGSPDIFRDPTNTEAPTCPRDLSTPHIEVTSTTSGPMAGLGVGLMVRRSSDPNLLASLKAEGSNKRWSAAAPHYAGGDSPERLFLDKAGGQLSPQWEEDDDPSHQLKEQLLHQQQPHAANGGSSSGNHQPFARSGRLSMQFLGDGNGYKWMEAAEKLQNQPPAQQTYQQGSHHAGHGQNGAYSSKSLPRESKRKEPLGQAYESIREKDGEMLLIINEYGSPLGLTALPDKEHGGGLLVQHVEPGSRAERGRLRRDDRILEINGIKLIGLTESQVQEQLRRALESSELRVRVLRGDRNRRQQRDSKVAEMVEVATVSPTRKPHAAPVGTSLQVANTRKLGRKIEIMLKKGPNGLGFSVTTRDNPAGGHCPIYIKNILPRGAAIEDGRLKPGDRLLEVDGTPMTGKTQTDVVAILRGMPAGATVRIVVSRQQELAEQADQPAEKSAGVAVAPSVAPPAVPAAAAPAPPIPVQKSSSARSLFTHQQQSQLNESQHFIDAGSESAASNDSLPPSSNSWHSREELTLHIPVHDTEKAGLGVSVKGKTCSNLNASGSSASSGSNGLMKHDGDLGIFVKNVIHGGAASRDGRLRMNDQLLSVNGVSLRGQNNAEAMETLRRAMVNTPGKHPGTITLLVGRKILRSASSSDILDHSNSHSHSHSNSSGGSNSNGSGNNNNSSSNASDNSGATVIYLSPEKREQRCNGGGGGGSAGNEMNRWSNPVLDRLTGGICSSNSAQPSSQQSHQQQPHPSQQQQQQRRLPAAPVCSSAALRNESYYMATNDNWSPAQMHLMTAHGNTALLIEDDAEPMSPTLPARPHDGQHCNTSSANPSQNLAVGNQGPPINTVPGTPSTSSNFDATYSSQLSLETNSGVEHFSRDALGRRSISEKHHAALDARETGTYQRNKKLREERERERRIQLTKSAVYGGSIESLTARIASANAQFSGYKHAKTASSIEQRETQQQLAAAEAEARDQLGDLGPSLGMKKSSSLESLQTMVQELQMSDEPRGHQALRAPRGRGREDSLRAAVVSEPDASKPRKTWLLEDGDHEGGFASQRNGPFQSSLNDGKHGCKSSRAKKPSILRGIGHMFRFGKNRKDGVVPVDNYAVNISPPTSVVSTATSPQLQQQQQQQLQQHQQQQQIPTAALAALERNGKPPAYQPPPPLPAPNGVGSNGIHQNDIFNHRYQHYANYEDLHQQHQQHQISRRHQHYHSQRSARSQDVSMHSTSSGSQPGSLAQPQAQSNGVRPMSSYYEYETVQQQRVGSIKHSHSSSATSSSSSPINVPHWKAAAMNGYSPASLNSSARSRGPFVTQVTIREQSSGGIPAHLLQQHQQQQLQQQQPTYQTVQKMSGPSQYGSAAGSQPHASKV

SEQ ID NO: 10390 - DNA, 2561 bp, DROSOPHILA
ccgctgcgcatcagtgacaagcacatccgcgaagtggtgctcggctgtgtggcgctgtacaatttcctgcgcaagacggacgactcatttcggcgcaccagcgacagcatcgtgcagcaaagggcagagcagcagcagctggcctacagtgtcgatagcgatgaaattgacgacgattgcatcatgctggccaccgaggaggagttacgcgaacgggcggagttcacgcccagcgttggactgaccacctgcttccagccgctgtgtacgcagcgtggcgagacgcccgaaggtctggctaagaggaactggctgctccagctggactttgcccaacagagcggaaacggaagcggtattggcataggaattggcaatggtaatatgagcggaaatggcagcattgtcggcagtacagacagtgcgagcggcagttcaaatgggagtttatattagtgcaatttacctaagtactttacgaattttgtatagttccttgttttatattttctaaatctgtaatctgtaacagcatctgttgccacgttgccgacttttgtttacctctctcgtttggcgcattatctactgcataccattacgactacgactatgttcacgttcgttccatctgcgttccgtgcttcatctagggttctgtatagttagcttagtttcttgcggaagttccggttcggtgaatgatgctatgtgatgtctcaaatctctattgtggcccagtgcactgctcctggggagcggcctgcttattaaacgggtctggcaacaaacaaaaaagtaaaaaaaaaaaaaagcggcagctgacaaaaatgtgcgaagtcgaagaagtacatcggaaacagatcaacaaaattaaaattttagtattcgtatttaagcaaaaaaaaaaaaaacaaattatacataattatatttacaaataaatgtgtaaggagtggtctttacgtgtcgaaaccttatgcaatgcacactctatatttcacatttcttcggaccagttgggccactgctgtatcagagcgtagagtgcttctccaggactcttggtagcactgacttgacgatggcccagtaacttatagccctccaccagctgagcctgtttgacagcctgctccagcagctccttggcggcatccaaggcctccttgttgggcgcccgttcttcgaagttaccaataaacgcaatgcccagggaaccatcgttattgggaccggcaaaggctcctctctggcttggacttctgccttcgtataccttgccattaccgccgatcagatagtggtagccaatgtccgagaacttttgcttggacatctggaagttttgcagattttgcatgtgctgggagcatgtaacatcatccgcacaagctcctccagctgtatgggcgatcacagcacgtggcaagggagtttccatgctgtctatggctccgttcggcggtttggcattccactcggccctcgtcacgatcggtacttccccctggacagcgattgctgtgaggccaacgatgagcaaaccgatccaagtcattccacttgcgtgtctgtcaactgactgggttgggatcttatgggctgcggcacctattgccgctgataaggggagtgcccccaaggagatagtcatccgaccccatataaatgaatgtatcatacatatatgagggggatttttcttgccagtgatagataattgacagggggtaacgattataagaacaactagcatagcaatatatcgttctctcagaatttttctaaatgggtaaaatttgccaagcgaaattcccctaaaaactacaaggccaccacaagggggacatatatgtaataaaaagtgtaaaatgtacatagaacttaaatcacttaccacgttcttgtgaattattaaataaaaatttgctgctttagattatttcatagttcttacttattttacactaacactcgcgaatcagcagattgagcatttttacagcatgttgatttgatgtttttctttggcgggatgtaatattaattttaccggaacactcgtatttatttagttataatcccaatctgacacaaactataattaaaccgcactatttttacgcgtttcaataactgatttcttttaatgcgatcgaattaagcgttgaattgcgtgtaatatcgacaatagaaaagaagccgaaaaagtgagcattcgcgcaagtgccgctatttctagcttgtaagcctgccttcgagcaagaactaactgtaatcaattgcctctctgtaaacaaacgtaagtgtttgatgcgatcgaattactcgccgaattgtgagtcataaccaaagaaagagcgtgctttcgcgcaagtgccgttatttcgtcttgctttctttaatcgaatatatttcggtctcttcttttgcagcagttctgtttttttagtgtgcgcggaagtacgttctgtttgtatactattacctcctttacttattaaactaactttaaacagttattttaatagttagattctacacaacggcaacgtaga

SEQ ID NO: 10391 - DNA, 561 bp, DROSOPHILA
atgacttggatcggtttgctcatcgttggcctcacagcaatcgctgtccagggggaagtaccgatcgtgacgagggccgagtggaatgccaaaccgccgaacggagccatagacagcatggaaactcccttgccacgtgctgtgatcgcccatacagctggaggagcttgtgcggatgatgttacatgctcccagcacatgcaaaatctgcaaaacttccagatgtccaagcaaaagttctcggacattggctaccactatctgatcggcggtaatggcaaggtatacgaaggcagaagtccaagccagagaggagcctttgccggtcccaataacgatggttccctgggcattgcgtttattggtaacttcgaagaacgggcgcccaacaaggaggccttggatgccgccaaggagctgctggagcaggctgtcaaacaggctcagctggtggagggctataagttactgggccatcgtcaagtcagtgctaccaagagtcctggagaagcactctacgctctgatacagcagtggcccaactggtccgaagaaatgtga

SEQ ID NO: 10392 - protein, 186 aa, DROSOPHILA
MTWIGLLIVGLTAIAVQGEVPIVTRAEWNAKPPNGAIDSMETPLPRAVIAHTAGGACADDVTCSQHMQNLQNFQMSKQKFSDIGYHYLIGGNGKVYEGRSPSQRGAFAGPNNDGSLGIAFIGNFEERAPNKEALDAAKELLEQAVKQAQLVEGYKLLGHRQVSATKSPGEALYALIQQWPNWSEEM

SEQ ID NO: 10393 - DNA, 4814 bp, DROSOPHILA
tccggccagttcttcttcttggaggacgaagcctgcaactaagacaggatcacgggcaacttcgatgggacagctcgtttctctatgttctcctcagctttccttcgttcattttgcattctttcgttgaagaacacatttgctttcaaattaatttgttattgttgtcgaggattgcgtacaatcgaaaattggggattaattgtacttgattaaagtgagttttatatacgtttttacagcgaaataaatagtgaaccgaaacaacagaatgttgttttaaatgagtctagcaaaaataaaccaattttctttatacaaaactgcatttgaaagttcttttttctaaagtggtgctcatagaatcctgcgagtttaaaagagctaacgtttgcaaattaacacgtatttattgcacttaagcgataattactcaaaatacgcacaatacaaatgtaaattacatacaaatttctgtcatttcaaatttgatcacaatacgaaatcgacgcacaatgaataacagctacaaacatttataagtatataatttacaatatttgtttttagatataccaacgcatgcacagcatatttttaatgtaaacgcttttgaagctttaaatttatgcgatttaatcaaatttacatacaatttttcgaaaaaggcaaatcttttgagtttataatacttaatttgatctgtggcttgttgaccactaaataactgacacaagtaagtactataaataggtaattttggagacttatacgctaaaaattccataaaagtaaatgcgtcaaaaattgacccaaatatttgatagttgcattgtgctgtttcgaatcccaatctgagtctgagagtagagagcgttttacaaggagagttttcttactgttttgccgaacttatgcaatagaagtatagttagtaaaaatggacacatgtatgtctaaaattgagtgtttcagttgatccaaaagcagatcctatggtttatccaataatttaattaccttgtttattttctttttccttcagcataatttcttgtaaatggaacttttagtgacttaacattagttttgctatgtgcttaaataattgtcgaaatcttgcaacagaacgtatcaaaaataagtgtatatcatgcaggagattaaaagatagagaacatttgaggtagccgactatgtatcgtttccacttttcatgaggttggacacttcctggccgagctccatggcttgtttgcgcaacttgagggcctgaaagatacatgtcatcagtaagcatttcgctatcaatactcaagtggacttacctgagtcctgagttccttctcgcgggtgacaagttcctgaatttgcgacatgactgtgactgagctgcgttgatctatcacccaccgcaaatagagatctaaaatgcatgtttgatgagtaatgtttcatatattaagttcttaaacataccactccacagctctaagcttatgggcgccaccgatggccatatcacattggcattaggctcgtacagcggattcaagaatgtctgaaggacatcaggccggttcaaataagaccacaggctcgtcgtcctggtgtgcacattcagttcgtttctctcccgctctgaatcgcacaggaaagttccatactgcgaaaagtgactgtgctcaaatagaaggatcagcagttgagtgctgaattcaaagctgcaggggaactgcgtgtaaagctgataaatgcaatccagaaataggacgaaggtggcaccagaggtcttattgcgtgtctgatttggtgtatagcatgagtagcgatgacgcgaggcgaacggatgtcccgcctggatccactcgcgctctatcaaagcctgcaggctgcaaagggaacacggcataaatatctttttcaaggtaaggagaatatgattacttacccccttacagtccggcagtccggattgagaatgatctgcaccagtgaggtgactataagcgtggagtccaaccccttagcaccgtgcactaacactggacttccctcttggtccaggcattgggccaccacacaggaggcgttcagtgagttcagcacaagactaagccagccgctgttctccagtcgcgatagccatttatcagtactgcatcccaaatcgttgcaagcttcgataagccgagcaaagctgtccaaaatagaggcgggcgaactgacgtttccaattgaacgatttaccttcttccactgcgagtagtgcaggtcagtttccgtattcgatttgcccttaccccaagtgtccacgatgaaccccttccgactgcgacccagcaccagattaaggatagcctcgtcagctctacagcgcttgatgccctgaatggacagcggctgggagctgcgcattagtgtggcctgcaaatatgaatcattgaattaatttaataaaatttgatgatgtagatgcaatgacttacgccattttcatgcctgtagctgagcacggggaagcggccgccatcgcggaacgcagcggagagcactatctgctcgtccgtaattgctttaggtacaattagcgtggcgccatatgtggcacagacgctgaagtctctgttgacgttggtgatgcgccactcgcaggaggcctggggactttgaagcgcaccacctcccacaccaccaacaccacacgcaagggcttctatcgcatagccattttgcagaggatggggaatgccggcgcccacagtcaacgtcgatgtcgaagttgatggcatgcaaattgttatgttggccacattcggcgaggacgcaccgcccatgccaaccccgcttatgagtttggcgaactccagctcgggcctgtcgtttggatggggaggttaattgaattgtagccaatttgttagttatggagaagccgtgtacccacctaaacatcgtgtagccgtcctctaggatcgagtacatgggccggtagaagaatggatagagcagttcggtgttctggatggcactgagtgcctccagcgatgcggccacgttgaagaactccttgccgcactttatctccaacgaaatgatgcgcaggtccttgcacttcagggtgataatcccaccgaccacgatattctgcgacaaactaggcttcttctccacacagtcgatgttcttgtggagcaactgaaaagagggggatgagcatgatgaatttctaattcaattatgagcgctccactgatgccgaagcacatcggattaggtgggcaggcctcaacccacttacccatagctcctggctggtttcctggcgggcgctgagcagcaaatggtgccctgtgatgcacagtgtgccaactgttgcacccgacgcccccgcattcgatgggtcgtgcagcaggacaccgtccagcttgggggtctttataaggtcggcgaattccatggtgtcgccctcggcggggtgtccgatttgatttggcccccactaattaactttttgcattttgccccggctatctcctgttgccacttgattgcttctgtcgacgccgccttccacctccgcccttcttcgccacggttatcccgcctttcgagtccccttttttgaacccacagcagtgcgtacgtcaccggttctggcggggatttggcggacttacggcactgctgctctgcagctaacaatgaaactcgttccgggctgcaaaaacttttgttccacgcccccgcttacggcacagattgcatttctttctttcttttcgattccgtttccgaccgactgttctgttttgtgctttgtgccagtgtgcccgtcgctcactgagccggaaagctttgttgtggcgtccactaccacactgcgttttgcctatgaaccgttattgccactaacaaagaactaaaaaattatcaggttttttaatatgtaaaaatatttttaaattgttttgcaatttcatttagtttagttttgcaggaatgattatatttacgcttcatttttaaatatatgtttacgacagtttcatatatgaaactaaaatgacaaaaaagaaaataaactaaataatttatagtaatctaacagtaatgaaaattatttgcttcacgtctttcgtactcagattaagatgcagagaataaaaataaaacacatttcgctatatctgaatcccttttaataactattcttaaatttgtagttaaaccattcgaaataaaaccatgtggcatactggttgcatgtcacacgcacatgcggtcctttaatccgagtaaaagtaagaaatgattatggtagattgcagtatggctaaattaagttttacatatggtacacagacagcgatgccaatcgaaggtcgtggtccgcgccagaagaagcgtcgaatactctttggaatgcgctgcagcagacggtggcaaggtgacttagtagatggcgtctccaccagctcaaacgactcccgtcgggcgtacatttgttggcggtggggcgccactgggccttgtcatgatgtccacggcattcttgaagaactgcgttttcacaaagtctgtggcggcggaattcagatccttattggcaccatagttacacttgacgtagccatacagattggcggcattcagcgcaatggcgatcattaccagcagtagccatttgaacttcaggccgaatagggcgaacaggaagaagaggccccagaagacgggacagaggatgagtcccagccagaagatgcgctgctcgttcttgttgacccgactctggtaggattcagactgcg

SEQ ID NO: 10394 - DNA, 2330 bp, DROSOPHILA
aaaacagaacagtcggtcggaaacggaatcgaaaagaaagaaagaaatgcaatctgtgccgtaagcgggggcgtggaacaaaagtttttgcagcccggaacgagtttcattgttagctgcagagcagcagtgccgtaagtccgccaaatccccgccagaaccggtgacgtacgcactgctgtgggttcaaaaaaggggactcgaaaggcgggataaccgtggcgaagaagggcggaggtggaaggcggcgtcgacagaagcaatcaagtggcaacaggagatagccggggcaaaatgcaaaaagttaattagtgggggccaaatcaaatcggacaccccgccgagggcgacaccatggaattcgccgaccttataaagacccccaagctggacggtgtcctgctgcacgacccatcgaatgcgggggcgtcgggtgcaacagttggcacactgtgcatcacagggcaccatttgctgctcagcgcccgccaggaaaccagccaggagctatggttgctccacaagaacatcgactgtgtggagaagaagcctagtttgtcgcagaatatcgtggtcggtgggattatcaccctgaagtgcaaggacctgcgcatcatttcgttggagataaagtgcggcaaggagttcttcaacgtggccgcatcgctggaggcactcagtgccatccagaacaccgaactgctctatccattcttctaccggcccatgtactcgatcctagaggacggctacacgatgtttaggcccgagctggagttcgccaaactcataagcggggttggcatgggcggtgcgtcctcgccgaatgtggccaacataacaatttgcatgccatcaacttcgacatcgacgttgactgtgggcgccggcattccccatcctctgcaaaatggctatgcgatagaagcccttgcagacttcagcgtctgtgccacatatggcgccacgctaattgtacctaaagcaattacggacgagcagatagtgctctccgctgcgttccgcgatggcggccgcttccccgtgctcagctacaggcatgaaaatggcgccacactaatgcgcagctcccagccgctgtccattcagggcatcaagcgctgtagagctgacgaggctatccttaatctggtgctgggtcgcagtcggaaggggttcatcgtggacacttggggtaagggcaaatcgaatacggaaactgacctgcactactcgcagtggaagaaggtaaatcgttcaattggaaacgtcagttcgcccgcctctattttggacagctttgctcggcttatcgaagcttgcaacgatttgggatgcagtactgataaatggctatcgcgactggagaacagcggctggcttagtcttgtgctgaactcactgaacgcctcctgtgtggtggcccaatgcctggaccaagagggaagtccagtgttagtgcacggtgctaaggggttggactccacgcttatagtcacctcactggtgcagatcattctcaatccggactgccggactgtaaggggcctgcaggctttgatagagcgcgagtggatccaggcgggacatccgttcgcctcgcgtcatcgctactcatgctatacaccaaatcagacacgcaataagacctctggtgccaccttcgtcctatttctggattgcatttatcagctttacacgcagttcccctgcagctttgaattcagcactcaactgctgatccttctatttgagcacagtcacttttcgcagtatggaactttcctgtgcgattcagagcgggagagaaacgaactgaatgtgcacaccaggacgacgagcctgtggtcttatttgaaccggcctgatgtccttcagacattcttgaatccgctgtacgagcctaatgccaatgtgatatggccatcggtggcgcccataagcttagagctgtggagtgatctctatttgcggtgggtgatagatcaacgcagctcagtcacagtcatgtcgcaaattcaggaacttgtcacccgcgagaaggaactcaggactcaggccctcaagttgcgcaaacaagccatggagctcggccaggaagtgtccaacctcatgaaaagtggaaacgatacatagtcggctacctcaaatgttctctatcttttaatctcctgcatgatatacacttatttttgatacgttctgttgcaagatttcgacaattatttaagcacatagcaaaactaatgttaagtcactaaaagttccatttacaagaaattatgctgaaggaaaaagaaaataaacaaggtaattaaattattggataa

SEQ ID NO: 10395 - protein, 593 aa, DROSOPHILA
MEFADLIKTPKLDGVLLHDPSNAGASGATVGTLCITGHHLLLSARQETSQELWLLHKNIDCVEKKPSLSQNIVVGGIITLKCKDLRIISLEIKCGKEFFNVAASLEALSAIQNTELLYPFFYRPMYSILEDGYTMFRPELEFAKLISGVGMGGASSPNVANITICMPSTSTSTLTVGAGIPHPLQNGYAIEALADFSVCATYGATLIVPKAITDEQIVLSAAFRDGGRFPVLSYRHENGATLMRSSQPLSIQGIKRCRADEAILNLVLGRSRKGFIVDTWGKGKSNTETDLHYSQWKKVNRSIGNVSSPASILDSFARLIEACNDLGCSTDKWLSRLENSGWLSLVLNSLNASCVVAQCLDQEGSPVLVHGAKGLDSTLIVTSLVQIILNPDCRTVRGLQALIEREWIQAGHPFASRHRYSCYTPNQTRNKTSGATFVLFLDCIYQLYTQFPCSFEFSTQLLILLFEHSHFSQYGTFLCDSERERNELNVHTRTTSLWSYLNRPDVLQTFLNPLYEPNANVIWPSVAPISLELWSDLYLRWVIDQRSSVTVMSQIQELVTREKELRTQALKLRKQAMELGQEVSNLMKSGNDT

SEQ ID NO: 10396 - DNA, 2643 bp, DROSOPHILA
aatcgtataaacatatacacatgtggtcatcagaatagaatttattagttgggagatctacaaatctgccaattattttaagcaaattgtttttactctcctttaacgcaaacaacttttatttatttagttagtagccctaattaatatattacctgctaagtaatacttggaactattgttttccatacaaatatataatcccgcatctctggcccgaaaagtcctctctaatctatgcagagaaatgcttgacagtgccttgttgtgtggctcaactttggccccaatcctaaatcctttgtgtccttcgtggccaggatttgcttctcattaccaagaagcccccattgttcgctccactgggaggagcacgtgtgagaaaggttgatggccagggacatgggtttgtgcagtttggttctcgccttctccgctcccaaattatgcaaattgctcgaaattttgcattggataatttccctatttgcccgtaatgctcaataaaaaaaaaaaaaatacaaacacaaaaaacattttatgacccaagagaccaacgatggcagcaaatggctgagcagaaaaaatactgaacagttgtataaatgcaccaacaaaaataaaaataatataaaaacagaacaaactgcgacgcatttaattaaaaatgtaattacccatgcttttcaacagccacattgctcgaagcggtagccagaggctatgaaaacattattcggaaaattgttgcaaatttaattgttaaatcctgctatattttactgcggtgttactgcatcacggagcagttgtagttttttccatttcacaaatttatcttactgaaaatgagtttaagaaccatgtcagaaaagagcgtggggcaactaacaaaaaaaaaattttaaaaaactaactagtaatcttttgttgtcaatgccttgaattttccacaatttcagtctaaatggaaaactgtcaatgaaaagacaatatttaaacacaactattttcgaaaaactaaattttaaaattcatcttttcgggaaatccaaattttagcccaaggtatacttacaatttgccatggatgactttgatttcagtagtccacctccggaggtacgaacagttcatacccacacgctgaatgatgaacagctcaaggattgtgaggcggccttcgccctcttcgacgacgataatgccaaggtcattccgatcaagttattgagagattgcctgcgagccgtggcccacaacccgccggaaaacgagatacaggattatataaccgaaattgatacggatggatccggcgagctttatctcagtgatttcctatacatcatgtcgaaacggtacgagaatttgaccgtcgaagatgaagttatcctcgctttcaaagtcttcgacaaagatggatctggctttatacacgagaatgagttccgtcagataatgactgaatatggcgatgaaatggaagaggacgagatcgaggaaatgatacgtgatgccgacgccaacacggaactgaaaatcgactacgttcgctttgtgaccatgatgatggagacgtaacactctctttgaaaaataaaaaacataaccgattgtagatctaatcaataaatttcaaaagcatggccaatggaatcgaagatcttgaaatatcggataccaccagtttggactattctttaaaaaaaaaaaaaagccaatatacaatagataaaatgataacaagagtaggcttttcttgttattaaattataaatatgaagttgtgaactaaagtttgtcgaaaatttgtagtgagtgttcagtgaccccaaaattttcccacccccaaccccttcctttggccatggatttcgaattccttactccgccgccagaggaacggaccattcgcacccacaatctgaccgaagaacaggtcaaggatttggagattgccttttccctgtttgacgaccaagacactaaggttattcctataacaaatctcaggcaactaatgctgtctgtggcccactatcccagtgatatggaattgcaggaaattcaggccgagatcgatgctgatggatccggtgagttatatctcagcgatttccttcacatcatgtctcagaggtacgcaaacatgtctaccgaggatgaaattatagctgcattcagagtctttgacaaagaaggaaccggcttaatatctgaatcggaatttcgtcacataatgcagaacatgggggagcaattgacggatgatgaggtggaggagatcatccgtgatgcaaattctgatttggaaggcaatatagactatgtgcgatttgtcagaatgatgtccactacataaggaaaaagcaggctttaggggttgggaacccgacctgtcagtatcagtatcatcaaaacagtttcggctcattccctttcgtaaattccaacagtctatagctctgcaagcatttaaaaatatctcgataaataccgaaaatctttgaaaatttatcaagatgtccgaactaacggaggagcagattgccgagttcaaggatgcctttgtccagttcgacaaggagggaaccggcaagatcgccacccgtgagctgggcacattgatgcgcaccttgg

SEQ ID NO: 10397 - DNA, 643 bp, DROSOPHILA
acacaactattttcgaaaaactaaattttaaaattcatcttttcgggaaatccaaattttagcccaaggtatacttacaatttgccatggatgactttgatttcagtagtccacctccggaggtacgaacagttcatacccacacgctgaatgatgaacagctcaaggattgtgaggcggccttcgccctcttcgacgacgataatgccaaggtcattccgatcaagttattgagagattgcctgcgagccgtggcccacaacccgccggaaaacgagatacaggattatataaccgaaattgatacggatggatccggcgagctttatctcagtgatttcctatacatcatgtcgaaacggtacgagaatttgaccgtcgaagatgaagttatcctcgctttcaaagtcttcgacaaagatggatctggctttatacacgagaatgagttccgtcagataatgactgaatatggcgatgaaatggaagaggacgagatcgaggaaatgatacgtgatgccgacgccaacacggaactgaaaatcgactacgttcgctttgtgaccatgatgatggagacgtaacactctctttgaaaaataaaaaacataaccgattgtagatctaatcaataaatttcaaa

SEQ ID NO: 10398 - protein, 165 aa, DROSOPHILA
MDDFDFSSPPPEVRTVHTHTLNDEQLKDCEAAFALFDDDNAKVIPIKLLRDCLRAVAHNPPENEIQDYITEIDTDGSGELYLSDFLYIMSKRYENLTVEDEVILAFKVFDKDGSGFIHENEFRQIMTEYGDEMEEDEIEEMIRDADANTELKIDYVRFVTMMMET

SEQ ID NO: 10399 - DNA, 3983 bp, DROSOPHILA
ggcaaatattttatttttcttcgcaactcttcttcttctagaaaacaccgaatgaccagggctactcaaacgcaattttgagcattcggatttacgaataagcaaggaatagcaaggtcacactgttcaatcgcacactttttttgctacaaagagcgtgatttatttttatagaagcaaaaaaagcaataattacttaatttactgccataaatatactgagaataagaacccagaatgtcggatagtgatttggatgccttacgcgcgcagcgcatgtcccaaatgcagtcgcaattcgtaagtgaaatatttgagtggctccaaaccggctagattcctctagagaattccaaaaatagtcataacttggaatgaaagcaaattagactatataaaatataataaaaatgttaagaatacattagcaatggtatgctttgttagttcttatagacaccttccctatgagtcatccttctcgactgggacacctgtttctttaaagggcaatccttcaatgaccttaactccttttttcctatttttagggcggcggcaatgatgcggaaaagcaacaagcccagcaggagcagatgcgcgcccaggaggaaatgaagcactcgatattatcccaagttctggaccagcaggccagggcacgacgtatgtggatctagaccttgaatatctctagctaataacttataaaatatcatttagttaataccctcaaagtcagcaagccggagaaggcgcaaatgttcgagaacatggtcatccgcatggcccagatgggtcaggtgcgtggaaaacttgatgacgcccagttcgtcagcatcctcgaaagcgtcaatgctcagatgccgcagagcaagtcctccgtgaaatacgatcggcggcgggcggccatcgatagcgacgacgacgaggattacggctgctgattcgtccgaaattccgcccaacatctaatttaagttatgcccgctcctcacatccgctaaatcatgtttattacttttactaacttaaaacgagaaacaaaactagatgcccaaatacgtatggacttctttgtgtcagatggcgaatcttaaagcgtattggaagttcgtgccaagcggcaatgacatacactgacataggactagatttggcttacatttatatgcggtagaaaagtggtctagaggaggggtggggtcttctacgacttcttatagggatttatcatttcatattcttgtatgttcctagctttttatgatcttgctcggaaatgcactatgagatcatcttatttactttctctaacattcactcgcaatcaaaagctttcactagattcatttttaagttatccctttactccttcttctcgtgatcttcatcgggatcttcttctgtgaccaagcaatcgccgcagaaaatagagtacatgatgagcgataagaatcccaatggcaggccgaagatgacagtggtcagcacgggatttcccagccacatatcccttaatgctcttcgcacttcgaacagtgcccgattcaaacgtacaaagtacgtatctcctccataggcaatggcactttcgttgcggatggattctaggaaaaggtgcagtgcctgtggagtcatttgcattggatcatcttcgggtatgaagtggtgttgggtgctcgaattaatcgctatcaagtgaggcgtgggcagttgatccaagataatggaatgtgctattgatggctcgccaatctgaaatggaaatattgattagctccaaatcgataaaactatgatagaatcacttacccatccaaattggaatttgtcatgatatcgcgccctatgctttcttatcacgccctccaccatgtcccgaaactccagctcatgcgtggctatctgattgagcttatcctcctgtaccacagccaaaaccaagtacttgtttgtcttgagcagctggtggatgttgaaccgagtgacctttgggaagagtgtgaacctctccacgttcacccattggaaaacggtttcgttcacttcattggggtccatttcgtgcgccaaatgcccatgcggatagaagtggtgctgctcttctttgtagacaatcaccgctggcagtttctcaaagtcaaagtgttgggcagcgatatcctcgctggtggcatagaaaaatccatgctcttggtaaccttcagctgcagcatagtatgtatcccacaccacgccctcctgttggcctacgaaaatgaaaaatatcgtatgggatccctttagcatgtccacactctccgttcgcgtgaccagctgaactggaggcccagacatccttaaggcataatccaccagctcatcgcgaccgcggtctccgttgtaggtgaactccatgttgcccttgatgaacataatggtgggatagccacgaacctgtaagaatttggggatgcttataaggaacttggaccaaatatggtatattctcaccttgaactccttcgccgccgccggatacttggtacaatctaggcgacccactcgaacgttggtggcatgcaaagcctgagccaccagagcaaaaatgggctccgttttcttgcagtagccgcaccacggggcatagaacatgaccaaccattggccctcgtgtcgcacatcgatgaaccggtcactgagctccaaaaccttcgaggatagccccgtcgaacccagagtcagaagcagagctgttggttttgtaaatcatttagcatcagcttggattttttctattgttcgtaatttatttaccacttatgaggccgaaaatccacatagaatttggcgacatccttgcagcaggtttaatttgtacttccaagtgtaatttacgtgccccttatttgctatatcatgctttccgttattttaatagcttctttacttaatttaattagttgattggtttaattttcagttccaaattattttccttcggaccacagcaacaacaaaagaaaacatttgcaaaaaccaccccctttagactgaccagatgtggaaaatatccaaaatacttaaggagatactctttagtccaatgcgtaaattgaacaagtttatttattaattttgtagttgtttggattatgtttttaaaagattattgaactcaagattttcattctactataaccttaaaactaaaatgaattcgaaataaaaactaattaaatttttttatatgcatctctaagaatttatctttaataatgacatagttaataattacatttataaaagaatttttaattttgaaaataagtttttgagcggccatagagcggctgcctaagggttaatctggtatatttttagtcagatggcaactcttcagctttgtttacctcacaaaatagactatctggcaactcttaggcacacacgtgcatctccagaggaattttgtttcagttgttgttccttatttcttcttaactaaataattgtattaactaaataaaatgacgaataatgcgaagaaggaaccccagcaaaggggcaagcatcaggtgcataatgtgcgcttctacactataaagccgcgtgaaattgtcagcttggcgtatagtaaatcgagcaagtgcctcgctctgagtcggtaaattattgaaaattaaaaaaaacctaataattactgtgcagtaaactaataagtacactctttgcagtgcaacacccgtcattgagctatggaacctggagcacgccccgtatttggatcgtgtaatccacctgcccaccgattctcatgtggaatctatagcctgggcgggaaaccgcttattttccgtggatttaagtggtaaactgatcgagtgggatgtgattaagctaaaacaacgatatgagcactcgcccactggcaatgctctctggagtatcgatgtgaatcccgcggaaacggatattgccattggctcagaggaagggca

SEQ ID NO: 10400 - DNA, 1764 bp, DROSOPHILA
aaggaaaataatttggaactgaaaattaaaccaatcaactaattaaattaagtaaagaagctattaaaataacggaaagcatgatatagcaaataaggggcacgtaaattacacttggaagtacaaattaaacctgctgcaaggatgtcgccaaattctatgtggattttcggcctcataagtgatgttctatgccccgtggtgcggctactgcaagaaaacggagcccatttttgctctggtggctcaggctttgcatgccaccaacgttcgagtgggtcgcctagattgtaccaagtatccggcggcggcgaaggagttcaaggtgagaatataccatatttggtccaagttccttataagcatccccaaattcttacaggttcgtggctatcccaccattatgttcatcaagggcaacatggagttcacctacaacggagaccgcggtcgcgatgagctggtggattatgccttaaggatgtctgggcctccagttcagctggtcacgcgaacggagagtgtggacatgctaaagggatcccatacgatatttttcattttcgtaggccaacaggagggcgtggtgtgggatacatactatgctgcagctgaaggttaccaagagcatggatttttctatgccaccagcgaggatatcgctgcccaacactttgactttgagaaactgccagcggtgattgtctacaaagaagagcagcaccacttctatccgcatgggcatttggcgcacgaaatggaccccaatgaagtgaacgaaaccgttttccaatgggtgaacgtggagaggttcacactcttcccaaaggtcactcggttcaacatccaccagctgctcaagacaaacaagtacttggttttggctgtggtacaggaggataagctcaatcagatagccacgcatgagctggagtttcgggacatggtggagggcgtgataagaaagcatagggcgcgatatcatgacaaattccaatttggatggattggcgagccatcaatagcacattccattatcttggatcaactgcccacgcctcacttgatagcgattaattcgagcacccaacaccacttcatacccgaagatgatccaatgcaaatgactccacaggcactgcaccttttcctagaatccatccgcaacgaaagtgccattgcctatggaggagatacgtactttgtacgtttgaatcgggcactgttcgaagtgcgaagagcattaagggatatgtggctgggaaatcccgtgctgaccactgtcatcttcggcctgccattgggattcttatcgctcatcatgtactctattttctgcggcgattgcttggtcacagaagaagatcccgatgaagatcacgagaagaaggagtaaagggataacttaaaaatgaatctagtgaaagcttttgattgcgagtgaatgttagagaaagtaaataagatgatctcatagtgcatttccgagcaagatcataaaaagctaggaacatacaagaatatgaaatgataaatccctataagaagtcgtagaagaccccacccctcctctagaccacttttctaccgcatataaatgtaagccaaatctagtcctatgtcagtgtatgtcattgccgcttggcacgaacttccaatacgctttaagattcgccatctgacacaaagaagtccatacgtatttgggcatctagttttgtttctcgttttaagttagtaaaagtaataaacatgatttagcgg

SEQ ID NO: 10401 - protein, 403 aa, DROSOPHILA
MFYAPWCGYCKKTEPIFALVAQALHATNVRVGRLDCTKYPAAAKEFKVRIYHIWSKFLISIPKFLQVRGYPTIMFIKGNMEFTYNGDRGRDELVDYALRMSGPPVQLVTRTESVDMLKGSHTIFFIFVGQQEGVVWDTYYAAAEGYQEHGFFYATSEDIAAQHFDFEKLPAVIVYKEEQHHFYPHGHLAHEMDPNEVNETVFQWVNVERFTLFPKVTRFNIHQLLKTNKYLVLAVVQEDKLNQIATHELEFRDMVEGVIRKHRARYHDKFQFGWIGEPSIAHSIILDQLPTPHLIAINSSTQHHFIPEDDPMQMTPQALHLFLESIRNESAIAYGGDTYFVRLNRALFEVRRALRDMWLGNPVLTTVIFGLPLGFLSLIMYSIFCGDCLVTEEDPDEDHEKKE

SEQ ID NO: 10402 - DNA, 7920 bp, DROSOPHILA
tacattttaacggtaccagatgaaaattcagtgttcacgcgatgtggaaaatgttacggtgaccttgtttatttatgtggccgccaactggattcgcataaaaatgaaacagcactttaatttaacactgtcttctttttattgtatgtagctaatggtttaatatggaatgtaaatatagttcgcttgcattcatgatattcatgataataaacgaccaattagttttcatggctatcggtgaaaaagatgattgaattagtcaacagttgggttctgaatttattaaccaaacaaaaagcttttttaatatctttagtttactttttatcagcctaccatatctacattaataaataatgcatattatcctattaattgccttcatacatatatgacacggaactcacatgcataaatgtctactttgtgttattcacaataaatacagaaacggattatttaatctttaaaaatgtatttgcttacagaacaattcattttttaatttggcacggaaataatgcaatgcaaagaaatcagacttgtcctaaagtaattaaaatatataacttaactcctaagatcccagaatcagaaatattttatgtgccaaattaattttatgcggatataatgatttaagaactaataaaagacacagtaattaaatatttctcataattatatactacttaataacaaaagcaaatatattgaataaaccgaagagttataatttagttactaaattttccagatcacgatgaaatccagtcagctggcagatagtctcgtcatcccagcgcttcagtacagatagtctagatgatcagaaagaagtcgcgtcaatccagagccacatcgaaataggtgaagacagtttaacaatagctcgctcaggtcgcacaacgtgaagctccactgtgcaaggatgggggaaagtcagctgctgctgttgctgcggctcctgctgcttcctacagtcctcatttcctggatgcactgtgccggggcctccacggcggacatctacaagggcgctcgcctgggccaccgtatcgttcagacgcgctatggccgacttcatggactcatcctgcccctggatagctttcgcttcctgcgatccgtagaggtcttcctgggtgtgccatatgcaacgcctcccaccaaacaaaatcggtaaggaatttatgtaaaataacttaaacttgaattgaatacacccttaaatactgattcaaatgcacccatctccaatgcgtaacagttcaaataaattcagcattattgcataaatcataaagtcaataatctcagtttcaatttaaaagtagaattatctattattacttaggatcaatgcttttatcccttaatattttataaagttaaaataaagtacccaatctctattatccaggtttagtcccacgagagctccagcgccttgggacggcatccggatatcggataaatacagtcccgtgtgtccgcagcgtttgcccaatatccaaaatgagacggcggcgctggagaagatgcccaagggtcgcctggagtacttaaagagattgctgccatttcttgaaaaccagtccgaggactgcctgtacctaaatgtgttctcgccggtcaatggtaagtccagaatatttacttcaaaaatctacagctgcgctggaaaaacatggctagccgcaattgtagcacaaagagctgcacataaatctcacttaaattcaattaattaagattaatcgtacgccacgtaatgccaataatttctacgcaaaagaaaagccagagctcacgtaaccactgcgcaaaccttatcgcagtcgccaccccactaagctcacaatccctggacgagccggatccgggggaatcgctaatctgaagcgattccaccgccggagtgctggcaaaatccgctttgcacgcaatcggaaacgtttaatgggtcatgagcgctctcgggcacttggcggtgtgttgaaagggaaaaattcgctatcacaagtttcaaaaaatacaacaaatagagaaaaaaactggattaatatattcgtatcttgattgcaacacggctgacacaacgttttgttcactctttttttttttgtgttttgccagccggggccaatgagaagaagttgccggtgattgtgttcatacacggcgagtccttcgagtggagcagcggaaatccttacgacggcagtgtcctggcgagctacggggaagttgtggtggtaacactcaactaccgactcggaatattaggtaatcaaatgtttaacaaaaaaaaaatataaatttccgtttaagatttaccttttgaaatcaacattttgttcccttataagttttggcaatatatttaaaactcgtaattatttggcaggtttcctcaacgccaatcccaatccacatgcccatgccagagtggccaactacgggctgatggaccagatggctgccctgcattggattcagcagaatatccaaaagtttggcggagatcccaattcggtgacgttggcgggtcatggaacgggtgcagcctgtattaattacctaatgacctcgcctacaatggtccgtggtctcttccaccgggctattctcatgtccggatcagcgtactcatcgtgggctttggtcgaggatccagtactatttgccatcaagctggccaaggaggttaactgcaccattcccgatgatatcaatcgccaccacgagcagattgtcgattgtctgagggatgttcccctggaagacctttacctagccgacattcaggctccaaattttctcacatccttcgggccttcggtgagtcataaatcaatacagctttcttttgctaataaagtaataacagcagttaattaaaaatgaattaaagatattactacttcaaacaaattgatgataatattttaaatttatagtcaagccattacgaaaaacctaaaacttaaaaaaaatgtaatgccatttgatgcaaagagttagtccactcagagcactcatttgaagtcattgatttcgcgttttgtggcacttgctctctttgttcggtcctcgcttcaatggactttattacttacttacgcatcccgctcctcgtccttgaaggaccactactcctgtcacttacttgcgattcctttgccctcctcgatttcaatttaggttgatggcgttgtcatacgacccgggcattccaatctcgatatcgatgatttaatggcgcgcaactcgaggcgctcgtcagcggactccggtttccagtcgtccgccggaggtggtggcgggcaaggaggcggggccggtggcggaggaggcggtggctccggatcgtcgttcggcggtggatatttcggcggcagcggggccggaacgatgaatatgggcggtcactatgacgtcctgtttggcgtcgttacgggcgaatcgatttggcgcttcagtgcccacgatatacaaaatggtttcgagggcgagagacgcgataaaattatccgcacctacgtccgcaacgcctacaattatcacctcaacgagattttctatacggtgagtaattttccttatactatttaaatataaatctttattgggaatgcgatgtctgcgatgtggccataaattttgttcttcagatatttccttgccctcccaatgacgttatatgttcttcttgtctgccgtcagttaaagcttaattattgcctttatctaaccatttactttttaacttaaaaagtttgcgagtgaaaactttatagacagttggcggatgaaagaaatatggttcgctccagtgaatcatttattttttttttgccatttctcttcgctttgaatattttatatgcaaatcaagcactgactagacttatggctgcttatgcaaatttaatccaactcaggcattttatgcaacacatttaagatgcaaacattttattatttcttccaaaattgttccagcttactaaattgacaaattaaccaggctaagagaaacagcgtacatatttcagagtctaaagggacgtcaaatgtagcaatgattttcgatttaataccttgcaattgactttgagtctaatctattaacatgattaaaacacccctttcgaggtggcagaaaagtacatattttcccttgggtaattggctgaaagcaaaaacttatacagccaaagcacaaatagcaacaacggctgcaactgaaaaaaaaaatactttttaaaagttggtactctgtttaagtgtgtgcgagtgtaattataattccacgttgcgtatgggtaacattcgccactcaaacagatacacttgcatgcatacataaatacatcagtctcatgtttcggggcattttcaacctttaaaaattttttacatttgttgtgtgagtgtgtgggtgtatttattttatgctctcttgctggctttttgtttttatttttatttttgttttgtgcaagcgagcgaaatggaaggcagttaacacgccattgctgccaaaacattaacacgctttatttggcaaatgtgcgcaaggacataggcacacacacacacacacacagacacatactggcgcgcgtgcacatacacttacgtacggagtgtacatacacgtatacagacacacacatgtacctacttaaaagcgcacaagcagcacttaacccaaatcacagcaaacagcggagaaagcagagaaagcatccaacgacaaccgtcaccagtcgacgtctgaaactggaactgaatccgcatctgaatctgaatcggtagctatattcgtatctgtatctgaacctcaggctcggccaccgctcgccgcattaacacacacacacatacgcaccgtgaatgggagtgcagatatatatatttattcacacgtatacatttatcaagaagtcgtaaattgccggggcatatatcccgattataccgcttaagtccgtatttattttacttcgttatacttttgtacaatcgcagcgaaatcccactctttatacttcataaagctcaatttatataggtcagagctcaggctcgactctcatctgcagtcgagagccaatcatgactaatcaaatattttttgtaatactacaaaaagtaaaaaacccataactgatttccgctcttccaacgaaatcaatactccacccaaaatagaaatgctgaacctggttattcgaataacgatgtaaatgtattccacacacacaattgttagaatccgtttcagctccatatttttttttgttttcttctgtatgatgggttttctaaattatgcatgacatcgattttacagatgcattttgcggtcgtttattttccacacacacgctgggcagaaataatcatagtggtggtaacaagtccccctcatgctcgttttgtggtagcgaatggccaccgcaaacaaggactgcaaacagttgcaatccgcttgtaatccagccaggatttgacttggcacacatgcagccaatgcaaatctaaaattcccctcgccacaggagcggcatctggaaattcggttaatccaaaaatagaccaacaacacctgacgttgcttctaaaaatttaaagctttagatcagacaaaaaattgggtacatttattggtaataaaaatattccaataaagcgatttatttttgctaaagccacgtaattcaatagtcaagttaaacttttgtttgatttaaatttatatttgagacaatttattagacatacccttaaacatatatcaccatttacttttaatttttcctccaactataaataattatttttctaaaatggcttatgttatctgccccacagatcgtcaacgagtacacggattgggatcgcacctcgcagcatccgatcaatacccgcgatacggctgtagccgccctatccgatgcccagtttgtggcaccgattgtgcgggctggtgatatcctggcggccaattccccgccgccggtcagctcatcctcgaccgctgggtcgccgggtgcaaatgcggctgcttcgacctcagcgggctccactcagccctccggtcggtgctacttttacgtgttcgattaccagacaaaggacggcgactatccacagagaatgggcactgtgcacggcgaggacttgccctacattttcggcgccccactggtcgacggctttagtcactttccgcaaaactacaccaaatcggagacggctctttccgaggcggtgatgatattctggaccaactttgctcgcaccgggtaagttgaggtagctttgcacgctgaaagtgctcctgagtagtcttaggacacctgctgtccgtccgttcggcacttttaagtcccacttaaacgtcttgctaacttatgcacagagggaaaagaagtcacgctgtctactttcgctcatcgcattagtgttgaagtttactgaagatctgagggaaaatatatgtttgcaagcaacaaaccctccattcaataaaaatgcgaaaaactaaatatattctggattctggattactaaatgcatgcaatttaaaaatgattatatgaatgaactccttttcgttgaaagctaccattgttatgaagaatgcattatctaatgtgcctaactatttgatgacagcgcattttccacattttctttctgtttccagcaatcccaatgaacaccatcgccaggactcgtcgctgccggtttcaaaggagcgcaaccgctttcgcagcatcacctgggaaaattatgatccgctgcaccagaagtatttggaaataggtgagtcagaagaaagtttcctgcttttctccataccccccgccaaccagagcactttccatgtttttgtgtgaatggttcaaacagaaatctttttgtaagcttctaacgaaatggttgttcgtttgtttgtttgcatgctttttcgtgcggcagaggaaaactattaaaaagtttaatgcctttgaacgactttacttgcattttccttttcaataaggcgatatttttaaatggaatttccgatgcttgttaatatgcaagtggctcaagctcaaaaccatttcttataattcgcttactccaagaacgccatcaaaatgctgtatggctactttggcgtgcagtaaaaagaattcatggaatccatgccaaataaaagctacaagttcccaaaagtaccaagaataacctaagcacacacagccagctgcaaaaaaaaaaaaaaacagggaaaatcaaatttaattttaattttaaagatggcactgcccgagcatgctttgcttgctaacaacaacaaattggaggggcggcttggaggggtttgcaaaaaacgagggagttaacacacaagtacttgaaggaaatgtaagtggaaaaaagcatcacaccatcagccccaccaacaggagaacagcgaagccacctggtagatgaagggcaatcaaaacgcccagagattgtcgaaacatgacctgaagtgagcgggggggggggggctgaactcctagggggaaaggcgagaggctccaaaggggcataaagctttatgtgtgcgttaaaatggcaccgttgccattctcgtgtcaaacgtacgaaaatgttattaatttcaaatttttcacaccttttgtgcgcggacgcgatggaagcatgttgaagaatacaaagaagaggggacaagctatttgcataatgtcgcgattatcagataccctaaattgtgcataaattcgcctgcaagcttatattcaaattgtaaaacattttactctatctctcaaattatgagtagtacattctactgaaaatttatcttttcagttcatgcaaatgcggataatcttgcat

SEQ ID NO: 10403 - DNA, 1614 bp, DROSOPHILA
atgcactgtgccggggcctccacggcggacatctacaagggcgctcgcctgggccaccgtatcgttcagacgcgctatggccgacttcatggactcatcctgcccctggatagctttcgcttcctgcgatccgtagaggtcttcctgggtgtgccatatgcaacgcctcccaccaaacaaaatcggtttagtcccacgagagctccagcgccttgggacggcatccggatatcggataaatacagtcccgtgtgtccgcagcgtttgcccaatatccaaaatgagacggcggcgctggagaagatgcccaagggtcgcctggagtacttaaagagattgctgccatttcttgaaaaccagtccgaggactgcctgtacctaaatgtgttctcgccggtcaatgccggggccaatgagaagaagttgccggtgattgtgttcatacacggcgagtccttcgagtggagcagcggaaatccttacgacggcagtgtcctggcgagctacggggaagttgtggtggtaacactcaactaccgactcggaatattaggtttcctcaacgccaatcccaatccacatgcccatgccagagtggccaactacgggctgatggaccagatggctgccctgcattggattcagcagaatatccaaaagtttggcggagatcccaattcggtgacgttggcgggtcatggaacgggtgcagcctgtattaattacctaatgacctcgcctacaatggtccgtggtctcttccaccgggctattctcatgtccggatcagcgtactcatcgtgggctttggtcgaggatccagtactatttgccatcaagctggccaaggaggttaactgcaccattcccgatgatatcaatcgccaccacgagcagattgtcgattgtctgagggatgttcccctggaagacctttacctagccgacattcaggctccaaattttctcacatccttcgggccttcgatcgtcaacgagtacacggattgggatcgcacctcgcagcatccgatcaatacccgcgatacggctgtagccgccctatccgatgcccagtttgtggcaccgattgtgcgggctggtgatatcctggcggccaattccccgccgccggtcagctcatcctcgaccgctgggtcgccgggtgcaaatgcggctgcttcgacctcagcgggctccactcagccctccggtcggtgctacttttacgtgttcgattaccagacaaaggacggcgactatccacagagaatgggcactgtgcacggcgaggacttgccctacattttcggcgccccactggtcgacggctttagtcactttccgcaaaactacaccaaatcggagacggctctttccgaggcggtgatgatattctggaccaactttgctcgcaccggcaatcccaatgaacaccatcgccaggactcgtcgctgccggtttcaaaggagcgcaaccgctttcgcagcatcacctgggaaaattatgatccgctgcaccagaagtatttggaaataggtgagtcagaagaaagtttcctgcttttctccataccccccgccaaccagagcactttccatgtttttgtgtga

SEQ ID NO: 10404 - protein, 537 aa, DROSOPHILA
MHCAGASTADIYKGARLGHRIVQTRYGRLHGLILPLDSFRFLRSVEVFLGVPYATPPTKQNRFSPTRAPAPWDGIRISDKYSPVCPQRLPNIQNETAALEKMPKGRLEYLKRLLPFLENQSEDCLYLNVFSPVNAGANEKKLPVIVFIHGESFEWSSGNPYDGSVLASYGEVVVVTLNYRLGILGFLNANPNPHAHARVANYGLMDQMAALHWIQQNIQKFGGDPNSVTLAGHGTGAACINYLMTSPTMVRGLFHRAILMSGSAYSSWALVEDPVLFAIKLAKEVNCTIPDDINRHHEQIVDCLRDVPLEDLYLADIQAPNFLTSFGPSIVNEYTDWDRTSQHPINTRDTAVAALSDAQFVAPIVRAGDILAANSPPPVSSSSTAGSPGANAAASTSAGSTQPSGRCYFYVFDYQTKDGDYPQRMGTVHGEDLPYIFGAPLVDGFSHFPQNYTKSETALSEAVMIFWTNFARTGNPNEHHRQDSSLPVSKERNRFRSITWENYDPLHQKYLEIGESEESFLLFSIPPANQSTFHVFV

SEQ ID NO: 10405 - DNA, 3599 bp, DROSOPHILA
taaatggaatctcccgcatgatagtggaaccaaatcccctgtacagaccacgtttcaatccctcagtgcgataggcacgcagtagaatttgcaggccggactgtttgttgccctgcaatgtttgggagcgttgcttggcaatctccacgggaactcggatcaagcatgccaactattggatacagagattcttcagatctaaatacgaggtgctcagttttatatgaaatcctaccacttctgctgctgaagccgctgccatgtgaacatagggtgaatctttggtttgggtgaccgaactaaggaactgctttccgcactcgtaggtgcagaaaaacagggccgccgtgggagcacttcctgcagccgcaggagcgagtcctttgtagatgcccctgaatcctcctgcccgccaaaagcccagctcgctttgcagtcgggtcttcactgtatctatgggaaacagcgctatgtccactaccattccagccactcctcctgcctaaaactaattatttaagaactaacttttcatttaattttcatctacttacaacaagtgcatggaaaaattttaatttattgaccggctcttgcattttgattgccacggaccccgcggccgattccagacccaattccgctgccatgtcctagaaatgatgttggggcatccactttaagtcatcccgtcggagtattaactaaagttgttttagtaaacaaaaacataaaatgtggttgttaacgtaacagtcagctgctttttgctgatctggcaggtctgcagataacagctgcttggtgtagagttgccaagatgctgaaaccataacaaataaatatattctatgtaagatatatattatttggtcaaaagtgttacttaaaaaaaggatggtattgaaatgttagctttttcacaaaaacacataattataatacattttttttacaccaaagtaattattttaaaaccaataccatttacttgacaaccctgaaaagccgtggttctgggcaagagccagcagcaccgttttggccaagtggaataaaattggctgtgatttaactgatagtagaataccaactgcagcggtagaaaacaataatccaaggatcaaatcatggcccttcgcttgacccagagattgctgcagacgcagacgccgttcctcactcgcgtaagttttctcggccggaaaattggcccacaaaggcaaattacataatgcgcgcctgccagatcctattgatcgtacttatcgattcgaattgtagggctatcccttgctggtgaccaaggagaagaccgaggatgtggcccacaccaaatcggcgctgcagaagaaagtcacggtgagtgcaacctctggagctcacccccaattgaggttatagcatccgtatatatcttcgtgaacagggcaccgatattccctcggcacagtacggaggtcgtcatgccgtcaccatgctgccgggcggcggcattggtcctgaactgatgggctatgtgcgcgagatcttccggtattgcggtgcacccatcgatttcgaggtgatcgacatcgatccctccaccgagggcaacgatgatctggactatgccatcacatcgattaagaggaacggagtggcactcaagggcaacatcgagaccaagtcccaatccttgaccgaagtctcccgcaacgtggccatccgtaacgagctggatctgtacgtcaatgtggtgcactgcaagtcgtatccgggcattccggcccgccatcacgacattgacgtggtgctcatccgccaaaacaccgatggcgagtacgccatgttggaacatgagtctgtgcccggaattgtggagagcatgaaagtggtgaccgtcgagaatgccgagcgtgtggcccgctacgcctttgagttcgcccgccaaaacaatcgcaagaaggttaccaccattcacaaggccaacatcatgaagctgtccgatggtctcttcctggaggttgccaaccgtgtgcacaaggactatcccgaactggagcacaacaacatgattatcgacaacacctgcatgcagtccgtgtcgaatcctcaccagttcgacgtgatgaacatgaccaatctgtacggcaccatcgtgtccaatgttctttgcggtttgatgggcggagctggcctcatatccggcaggaactacggtgaccatgtaagtctctttctcttttgcttaacccatagtctttcagttttgtcatataattttagtacgccatctttgagcctggcacccgtaacaccggaaccgccattgccggcaagaatatcgccaaccctgtggccatgatcagtgccagtatcgatatgttgaaccatctgggccacaaggagcacgccaatgtcattcaggaggccgtctaccagaccattgtcaacgatgccattcgcacgccaggtgatcacgtctctcgtagttattcaataaacagaatcacctttatcatctaaatctcttacagatattggcggcaccaactccagtaccgatgtggttgagaatatactcaagatcttgagtgccaagcgcgtgaattggtaaaataatcgtctgcatttagagtagttctatatgttcttttatttcgctgtcacaaccaagtgttgtattttctattaagttttaagcaaacaaacatctatcgcttgtccccttttacttcactgtcgcgatgggcccagcgtaggcgggccttcttgtattataatttcatgctgttattgtattattttaattacttactgattacttcagcagaactgtaagtgttattgccgaattggcctaactgtgtcctaaccaaccagcacaccacagacttcacttaatcactaactttttggttgccttatatcttttagttttaagtacttcttcttgggtgacacatgctcgattgtcacctataagaggctacttaaaatttgtttatataaattggacttatgtttagcaattgcttcgttgaactattttctattgtatatttgtcctaagtagtgccccagtagaacacactaccacacacattcagtacacacaagtatgtagtattttcgttttgaacgtgtaaccaaattgtccttgtgcagctctaatgaacaaaattattctgttttttctcctctccctgaaaatccaaaaacgctttaccgctccgcaggccacatggaaactattttagccaaatttaggcactatcgcactaccgaattcaaccaactgctaacaaattcagcaagataaaccaaatcgaaccaagtctaatacaaaaaaaaaaaaagtcaaaattttattaaccccacaactaagccaatttgagacatcttgtaccccaaagccaatgcattcagcgttaatgtgatgcccagaaaaatcggtataatcaaatcgaggttgaattattccgctgcttaacccaaacaaaatatgttaccccggctaaatgtccattgtgtgttcattcgatgtccaagtgtgataattcaggtaatacaaactccaaatattttttagcttcatttatccccaggttcgattg

SEQ ID NO: 10406 - DNA, 1312 bp, DROSOPHILA
ctgaaaagccgtggttctgggcaagagccagcagcaccgttttggccaagtggaataaaattggctgtgatttaactgatagtagaataccaactgcagcggtagaaaacaataatccaaggatcaaatcatggcccttcgcttgacccagagattgctgcagacgcagacgccgttcctcactcgcggctatcccttgctggtgaccaaggagaagaccgaggatgtggcccacaccaaatcggcgctgcagaagaaagtcacgggcaccgatattccctcggcacagtacggaggtcgtcatgccgtcaccatgctgccgggcggcggcattggtcctgaactgatgggctatgtgcgcgagatcttccggtattgcggtgcacccatcgatttcgaggtgatcgacatcgatccctccaccgagggcaacgatgatctggactatgccatcacatcgattaagaggaacggagtggcactcaagggcaacatcgagaccaagtcccaatccttgaccgaagtctcccgcaacgtggccatccgtaacgagctggatctgtacgtcaatgtggtgcactgcaagtcgtatccgggcattccggcccgccatcacgacattgacgtggtgctcatccgccaaaacaccgatggcgagtacgccatgttggaacatgagtctgtgcccggaattgtggagagcatgaaagtggtgaccgtcgagaatgccgagcgtgtggcccgctacgcctttgagttcgcccgccaaaacaatcgcaagaaggttaccaccattcacaaggccaacatcatgaagctgtccgatggtctcttcctggaggttgccaaccgtgtgcacaaggactatcccgaactggagcacaacaacatgattatcgacaacacctgcatgcagtccgtgtcgaatcctcaccagttcgacgtgatgaacatgaccaatctgtacggcaccatcgtgtccaatgttctttgcggtttgatgggcggagctggcctcatatccggcaggaactacggtgaccattacgccatctttgagcctggcacccgtaacaccggaaccgccattgccggcaagaatatcgccaaccctgtggccatgatcagtgccagtatcgatatgttgaaccatctgggccacaaggagcacgccaatgtcattcaggaggccgtctaccagaccattgtcaacgatgccattcgcacgccagatattggcggcaccaactccagtaccgatgtggttgagaatatactcaagatcttgagtgccaagcgcgtgaattggtaa

SEQ ID NO: 10407 - protein, 393 aa, DROSOPHILA
MALRLTQRLLQTQTPFLTRGYPLLVTKEKTEDVAHTKSALQKKVTGTDIPSAQYGGRHAVTMLPGGGIGPELMGYVREIFRYCGAPIDFEVIDIDPSTEGNDDLDYAITSIKRNGVALKGNIETKSQSLTEVSRNVAIRNELDLYVNVVHCKSYPGIPARHHDIDVVLIRQNTDGEYAMLEHESVPGIVESMKVVTVENAERVARYAFEFARQNNRKKVTTIHKANIMKLSDGLFLEVANRVHKDYPELEHNNMIIDNTCMQSVSNPHQFDVMNMTNLYGTIVSNVLCGLMGGAGLISGRNYGDHYAIFEPGTRNTGTAIAGKNIANPVAMISASIDMLNHLGHKEHANVIQEAVYQTIVNDAIRTPDIGGTNSSTDVVENILKILSAKRVNW

SEQ ID NO: 10408 - DNA, 4394 bp, DROSOPHILA
attaaacataatattacagccgttgcaagttgcaaaatcaagacaaagttatacatgaccaatgtatatgtataccaattgcagcgccgttgcgagcaagtctgcaaaataccctaacgctaattggaagattcttcaacgaaccattttcagcgaaattcgcagacttacgtgcggatttttttgggccagtgcgaaaaccaaaggtgacaccccgcaactggagcactaggagctcaccaacaacgaaacaccggcggctgaacgagagtattacatatccggaagacaaaaccatcgatttgcagctcacacaagggcaaacaaaagtgcacacgcacacattggcaaggtggccccctcctctttccgttccacacacacctacgcacacaccagcataagagaacccacacatagacatcacgatgactgcgccgcgacgcctgcgaaaagaattgagcgatttgcagggcaacgcactgaagtccttccgggacattaaggcggacgatgacaacctgctgcgctggacgggattgattgtcccggacaatccgccgtacaacaagggcgccttccgcatcgagatcaactttccggcggagtatcctttcaagccgcccaagattaactttaagacacgcatctaccatccaaacatcgatgagaagggccaggtgtgcttgcccattatcagtacggagaactggaaaccggccacacgcaccgaccaggtcgtgcaggcactggtggacttaatcaacgaccctgagccggagcatccgctgcgggcggagttggccgaggagtttcttaaggatcgcaaaaaattcgtgaaaaacgccgaggactacaccaagaagcacagcgaaaaacgtccggccgactagcggataggcggaggtagagctggaggaggtgggccagtccacaacccatgtgtacccttaccccttagtcttgtgatttttctgttagttatttaattttcattcttgatccatgaaaaactatcctcagaaaacatttaagcagatatttccccggcagagtacctagttttgtaaaagtagcactgtaatttgatgcaagtgagaaatacatgttcgttatgttaaaatacagctgccgactcttggatggaaccgacatctgagttggatgtcggagctacgggcatgggaaatgattcctcgcccaacatgctacggaagcaggtcattacaatgctgttgttgtgctgaatgagggccttgctgaactggttcttctgcagctccttaatgtccagcaggctgtgaatggcccccgcctgctcgtccttaagaagttccagcacctgttccaaggcactgttagccgtatcttttagcttactcaacgtgagagtttgcgcttgattgctattaaaacaacaatcctgataaacgctctctatgagaaataagagcagcgacgccgcgtaatgggtgagaaacaggaacttgtggaagacaatgctgtcgggcttcaatttctttacttcttccaggagatcaatgaaaaagcgctgctgggcggtgtggaatgcctcgtcttctgttggtggcaggtagcatagtgtcttgctttccaactggcactttggcgcagactgccagacagggtcgagttcaaatgtgtccaggatgcgaaggcgcagaatgagtattggttccgaggcaaacatgctgctttgcaggctctgaacaggtgctcctcgtgaaatgtgaagattcaagggtgccgttctgttcttaacgtatgaatacggtgttctattgttaagacacttctccagttgattaaattcccgacgcaagcagtaaatctgcttgagaaggtcaccgtgtttcaaggactccctttctgtgtaggaaccgccatagacaggcacttggaatcccagagccttactggtggcctccttgtccacgatgcacaggctatcttctaatggcttcactttgtatagactgtagtaggtgttcgcgacaagactgcgcaggtgatgaagatgtctcagataatgacgatcattggactcgtaggcatagatactgccctcgatggcatccgtttgaagcttcatgtacatacggcaggcgatctcgtgctgcatgagaaagtcgtggggaatctggaacttggcaaacagtggcattaccaatgtgtcattcggctgagcaagcttgctctttatctcctctagcaaacgaggcaagtcgggatggtccttgttgtagttcaggcagataacatacacttccgaatttccccgcttggaagtagccggcttaaagatgtgtacctcctcaaagatgcaattgagtgtataaagtagagatacactgcaagcctcgaagagggtaaacatcttcactaggaagttaccgccacttgagagaattcttaaggcactgagtacttcagcaaagaaaaggcgaaccactatctcttcctggcaatcaggctgtgcggcacaatcgatggaaccatcggcagtgacaagatccacctgtccctggaactccacctcacaacgttccaccaggtggtcaatgttggccacatctagtagatttccagttagatctttgtgaaagaaccagttgtccagcgtgtggacgatgaacctgtcatcgctgatcatctggtttatagcattgccttcatagtacggattcaaagtagttgagcgccagcgccatttaatctggaaaaaagagttccgttctcgtatctctcaaggatgacttgataactcacctcatccttttcatatttgctatgaaggtaatgattcagagatgctatgaaggcaccgggtgcctcgcagagatgcatactgttgacagccggcttcgtgaccaatggataacgatgcaggcactcgaacaacttgcaccatgccacagttacaaattcggccttcgtgtcgtttttcaggcgccaggacacctcgccagaagggtcacgcctgttggtgtgagcactccattcctgcacgccatagtcattgagtttgcttttaaccgcattcagctgctcgcgcagtccctgcagcgcctcgaactggtagaactcactgaagagagcctgatccggtggcggcaactgccaggatttgtttcctttcggcttctgatagtggaacttcttctcgaagagctgctccacttcggaaggccggatggactgatagtccgtctgtaaagtgtgaaatgtaatgactgacttgtaggatgtagcatcctttactcaccattgggtgtggctttccctgcggagacgaacgaaagctcattccggctaaatttaaatgcgaggcgtcaaaaacaaagcgatctgcgacacaatagagatggaaaaagctcaaagcgatccatcgcctaaatcttagcgacggtaactaaaaatcgcaaacgttatcgattaagctatcaaatttaaattgattttccgggctgcaatgaataattattttatatctctaatgcaatattatagctaattcgtagatgcagaagatttggctagacgtttccatagcttgtatctgaagatgaatggaataagaacaaaagccatcaagaattccatcttgtttaaaagttaaaggttgaaaaataacttcagccaatatgttaaatgcaattgttttttttttttgccgcatatttcttttaaaaatgtttcttaattctaggtatttttcgactaattccctttatcaaaagaacaaaatcgctatctcctgtagaaatgtaacttcctttccaccttcgacggcgatgatcgtcaaaggcatttcccgtagatgcccgatggtggaaacgtggaaactgatttctttgattctatggaactatccatttagaaagcgcacggcaggcgacaaataaggtgcctgcaaagtgtgcggttacgaaactattggtcatcatccgttagtgattcgattgtgcatactaatatttcattaaaatcttattttattgatgcggatagcccaagtacggaagttggagaaattgtcggaaagttacatatacatacatataaacttacactcccaatcggaatgtggttatgtcttggggtctcggaatttcagcatcgaccatcgtggccaatgggtttacttaatacgcgcatgccttgccgactttatggccatttgaaacgtgagtcgtgtttttatgaataataataacgatatttcaaattatgagtttccaatgctgacaaaagaaaaaggatcgcattggctaccgcaggggcatcactcttcccttggaactcgacatcggtcttgagtaacgttctccgcctttatatacatatatatatatatatatatatatatatgc

SEQ ID NO: 10409 - DNA, 2286 bp, DROSOPHILA
tttttccatctctattgtgtcgcagatcgctttgtttttgacgcctcgcatttaaatttagccggaatgagctttcgttcgtctccgcagggaaagccacacccaatgacggactatcagtccatccggccttccgaagtggagcagctcttcgagaagaagttccactatcagaagccgaaaggaaacaaatcctggcagttgccgccaccggatcaggctctcttcagtgagttctaccagttcgaggcgctgcagggactgcgcgagcagctgaatgcggttaaaagcaaactcaatgactatggcgtgcaggaatggagtgctcacaccaacaggcgtgacccttctggcgaggtgtcctggcgcctgaaaaacgacacgaaggccgaatttgtaactgtggcatggtgcaagttgttcgagtgcctgcatcgttatccattggtcacgaagccggctgtcaacagtatgcatctctgcgaggcacccggtgccttcatagcatctctgaatcattaccttcatagcaaatatgaaaaggatgagattaaatggcgctggcgctcaactactttgaatccgtactatgaaggcaatgctataaaccagatgatcagcgatgacaggttcatcgtccacacgctggacaactggttctttcacaaagatctaactggaaatctactagatgtggccaacattgaccacctggtggaacgttgtgaggtggagttccagggacaggtggatcttgtcactgccgatggttccatcgattgtgccgcacagcctgattgccaggaagagatagtggttcgccttttctttgctgaagtactcagtgccttaagaattctctcaagtggcggtaacttcctagtgaagatgtttaccctcttcgaggcttgcagtgtatctctactttatacactcaattgcatctttgaggaggtacacatctttaagccggctacttccaagcggggaaattcggaagtgtatgttatctgcctgaactacaacaaggaccatcccgacttgcctcgtttgctagaggagataaagagcaagcttgctcagccgaatgacacattggtaatgccactgtttgccaagttccagattccccacgactttctcatgcagcacgagatcgcctgccgtatgtacatgaagcttcaaacggatgccatcgagggcagtatctatgcctacgagtccaatgatcgtcattatctgagacatcttcatcacctgcgcagtcttgtcgcgaacacctactacagtctatacaaagtgaagccattagaagatagcctgtgcatcgtggacaaggaggccaccagtaaggctctgggattccaagtgcctgtctatggcggttcctacacagaaagggagtccttgaaacacggtgaccttctcaagcagatttactgcttgcgtcgggaatttaatcaactggagaagtgtcttaacaatagaacaccgtattcatacgttaagaacagaacggcacccttgaatcttcacatttcacgaggagcacctgttcagagcctgcaaagcagcatgtttgcctcggaaccaatactcattctgcgccttcgcatcctggacacatttgaactcgaccctgtctggcagtctgcgccaaagtgccagttggaaagcaagacactatgctacctgccaccaacagaagacgaggcattccacaccgcccagcagcgctttttcattgatctcctggaagaagtaaagaaattgaagcccgacagcattgtcttccacaagttcctgtttctcacccattacgcggcgtcgctgctcttatttctcatagagagcgtttatcaggattgttgttttaatagcaatcaagcgcaaactctcacgttgagtaagctaaaagatacggctaacagtgccttggaacaggtgctggaacttcttaaggacgagcaggcgggggccattcacagcctgctggacattaaggagctgcagaagaaccagttcagcaaggccctcattcagcacaacaacagcattgtaatgacctgcttccgtagcatgttgggcgaggaatcatttcccatgcccgtagctccgacatccaactcagatgtcggttccatccaagagtcggcagctgtattttaacataacgaacatgtatttctcacttgcatcaaattacagtgctacttttacaaaactaggtactctgccggggaaatatctgcttaaatgttttctgaggatagtttttcatggatc

SEQ ID NO: 10410 - protein, 700 aa, DROSOPHILA
MSFRSSPQGKPHPMTDYQSIRPSEVEQLFEKKFHYQKPKGNKSWQLPPPDQALFSEFYQFEALQGLREQLNAVKSKLNDYGVQEWSAHTNRRDPSGEVSWRLKNDTKAEFVTVAWCKLFECLHRYPLVTKPAVNSMHLCEAPGAFIASLNHYLHSKYEKDEIKWRWRSTTLNPYYEGNAINQMISDDRFIVHTLDNWFFHKDLTGNLLDVANIDHLVERCEVEFQGQVDLVTADGSIDCAAQPDCQEEIVVRLFFAEVLSALRILSSGGNFLVKMFTLFEACSVSLLYTLNCIFEEVHIFKPATSKRGNSEVYVICLNYNKDHPDLPRLLEEIKSKLAQPNDTLVMPLFAKFQIPHDFLMQHEIACRMYMKLQTDAIEGSIYAYESNDRHYLRHLHHLRSLVANTYYSLYKVKPLEDSLCIVDKEATSKALGFQVPVYGGSYTERESLKHGDLLKQIYCLRREFNQLEKCLNNRTPYSYVKNRTAPLNLHISRGAPVQSLQSSMFASEPILILRLRILDTFELDPVWQSAPKCQLESKTLCYLPPTEDEAFHTAQQRFFIDLLEEVKKLKPDSIVFHKFLFLTHYAASLLLFLIESVYQDCCFNSNQAQTLTLSKLKDTANSALEQVLELLKDEQAGAIHSLLDIKELQKNQFSKALIQHNNSIVMTCFRSMLGEESFPMPVAPTSNSDVGSIQESAAVF

SEQ ID NO: 10411 - DNA, 4763 bp, DROSOPHILA
attttcttgttgttgaaccagcgcttccgttcagattttcactcaaacaccacacacacgtttatattttctttgaggatttttgggcgaatgggtgggcgggaaaagggggtcgcgtttgtatgtatgtatgtttttgaggagcagcgacgagtacatacgaatttttgccactagaatcggaatcgaaatgtgtatatttgtatatatttttctttttcgccccgaaattgttttgcttgtgcttcgattttttttttgtgaatttctttacgatttttttcgttgactgttgagaatgtgtgtgtgtgtatgaatacgaattgggggaaactgcaattttcgtggtcactggactgcctggactggcattttcacattttcacatttcgccctcggccatattttattatattccttcgtgctcggtgcccccgcaatggcagccaattcccattcgatttctgcgctctgcgattttggctgctcagcaccagcagcacccagaagctgaagccaaaatcctcgacgggtcgattcgagcgtttcgagattctctccgctcgggcaaaggcaggcgactgatttccaagcagtgccgtgtcgccagctcttgattttgattttccaatgcgcgcgctcctcccgaggaacgcaagataacggcgagtggaaagtgggcagccgggggagggctccataggtggactgagcgaaaagctttgtggaattgctatacagttagaattcctggtacacacaggagagggactgacaggcggagagcgcgagagaacggacggtaagacatgtgcgcgagtcggaaaaagagaataaagctcgggactcttcgccccactggaatttaccgcaaagctttggggccagaacttataaactttcggcagggttgcacttacattttgattttgggatcccgttgatttcgaaaaccgttgtttttaaaatgttcgaatgaaatggttatatgaaatactttacttttcataaaaattaatatattttttatttactattgaaatttcacaaaactttcggaaactaaaagaaactttcttggggtttgtacacctaaattacgtgtatagtcggatggtactgtccgcgcccgtggagaagacccatggctgcaccggatgccagttaacatccagcacaccaaactcatcgcgtttctcgtgtgtttgcagcttcttgagaggcacaatcaaagggttttgcagcaggtcactaaaaaaaagtttggagaaattcgtaattaaccttgggcaatgttgatttatagccacttacttatagaccatgccatgggagacgatcacagcctggtcatcgctgccggaagcaaagagcggatatcgaagatggaaagcaacactgcgaactgcattgcgatggagtcgcatggtctggtagggctttgtggacagatccaaatcgaaccagagcatctttttgtcataggtggacaccagcagattgtcgcccttgggatgaatagacatgcccgatatccatttggagttggtcagcagcttcttgacaagctcttgtttgaccagatcataaatgcgaatgttgtgttgcgtctgtaaagaaaaaacagaattcaataagacatactaacaaaagaaaattaacccacttaccgccacaaagaagcagggcttcaccggatggaagagcacgaattggatgagacccttgctcttggagaatggaatctgtgagcgccgcttggacaactgatgaattaaagccgagcggttagcaccttcgggcatcactgtggccaagtagtcaccacgaccgtgccaggtcacctgtcggatgggtttgaagtgggtaatcactacgcggacgcccttctcctgctcatcagcttccgcatttgaccattgcaccgccgtcttgatgcgttcactttcaatgacatcctgactgggcgcctcagccaagagatcgtcggtcttcttcaccagcaccttatcgcccactttaggattgacgagcagcaagcgattgccagtggccaccgcaataatagacagcttgggatttggacaccaagccacacagcgtaccacttcgtcggtctcgattgtgcgaatgcaacgacctgttgcaatttcccaaactgtgaggtgagatggattagtaagaagatatctaaaaggttgtcaattaaattagtacttactcttgacggttttatcatccgaaccggagacgaggtactctcccttgggctccacactaacagaccgcaccagatcggtgtggccacggtaaaccatactctccaccgtgggaaagggttgcaggtcacgcggcgagggcaacttggggataaggtactcggcatcgatgttcagcttgacacgctttgcacggggacacaggtaaagatccaggcaacgaaggaaacgctcccgaaggtatctcgagtatgcgggcacctccctcagcgacttgaacttctgtggcatgaagtgcagcttgcgcttgtgtggctcgtcctttagtttaagccactccttggtctccttggcatcgaaaagatactctggcggtggattgtaggactcggcatgaccgggaaggtcgcgtttgggcgcagagactggatcgtggatgcggcgcatgtgttcccgactggtgtccgtttcccacagcatgtagaacttgggaccgcgcttggcctgcttctcgcgttccacttcctcagtggtcttcatccagcccattttgagggcgtgcaccatgcgagagacgcgctttttctcggaaactgagggcaggaaagagcgtttgtggtcgggtacgttcttgatgggcatcttttccacctccgatgtgaaccattcgatccagggctcatactcttcgtgatccttgttgggtatgcgacccgaaacgatgcgcttgatcagagcaatgtcctcgtctgttaggcgcacatcctgaccggtaagtggatccttgacggtacgccaaaagtctgggtcctcgatcttacgcaggaactcatcaatttgatctccttgtggtggtttaataatcttcttggcatcccagtcgtaaccgatgtgcttgtattcgtcgtaccagtgcatgggtatgttgcctacagtatttcttatgtcctcctcgtcggaggtatctgaatcctgatactcaggcttcgagctatcccgtttcgggagctctgctgtaagggcttttttagacgcggcaccgcttccactgggcttatcgtctgtttgctttgacttggaatccttctcctcatcttccacttcctctccatcagtgctttcctcctcttcattatcctcttcatcactactttcttcatcttcctcagctgatgaagattgctttctgcccaagtagttgccctcctcatcgctctcgaactgcagttcctcactggaatccgagtggtattcctggtctatgccctcgtcatctgttgaatcttcgccgggatcttttacagcttgcagcaggtccttaaagagcacaaacacacatgcaggtcattttgaaatgactttttatatcactgtcaatgggtcttacctcctcctcctcctcgttttcggaagcctcggaactggccaccacttcatttgtgggttccgaatcctttcctctgcgtttcagagctagttttttggtcattttgaggtaaaaacaaaactaacgcggcgcacgtgttgcagtcagcgatagcgatgggaatcgcctgaaacggttgcctatcgattggcttgccgccactgctgctggtaatcggttacaaatccatttggaaacagcaacccttttattttcatttgttacctctcttaaaatatacatctataataaatactttccaataaagatttatttagtattaaacataatattacagccgttgcaagttgcaaaatcaagacaaagttatacatgaccaatgtatatgtataccaattgcagcgccgttgcgagcaagtctgcaaaataccctaacgctaattggaagattcttcaacgaaccattttcagcgaaattcgcagacttacgtgcggatttttttgggccagtgcgaaaaccaaaggtgacaccccgcaactggagcactaggagctcaccaacaacgaaacaccggcggctgaacgagagtattacatatccggaagacaaaaccatcgatttgcagctcacacaagggcaaacaaaagtgcacacgcacacattggcaaggtggccccctcctctttccgttccacacacacctacgcacacaccagcataagagaacccacacatagacatcacgatgactgcgccgcgacgcctgcgaaaagaattgagcgatttgcagggcaacgcactgaagtccttccgggacattaaggcggacgatgacaacctgctgcgctggacgggattgattgtcccggacaatccgccgtacaacaagggcgccttccgcatcgagatcaactttccggcggagtatcctttcaagccgcccaagattaactttaagacacgcatctaccatccaaacatcgatgagaagggccaggtgtgcttgcccattatcagtacggagaactggaaaccggccacacgcaccgaccaggtcgtgcaggcactggtggacttaatcaacgaccctgagccggagcatccgctgcgggcggagttggccgaggagtttcttaaggatcgcaaaaaattcgtg

SEQ ID NO: 10412 - DNA, 2507 bp, DROSOPHILA
atcgctatcgctgactgcaacacgtgcgccgcgttagttttgtttttacctcaaaatgaccaaaaaactagctctgaaacgcagaggaaaggattcggaacccacaaatgaagtggtggccagttccgaggcttccgaaaacgaggaggaggaggaggacctgctgcaagctgtaaaagatcccggcgaagattcaacagatgacgagggcatagaccaggaataccactcggattccagtgaggaactgcagttcgagagcgatgaggagggcaactacttgggcagaaagcaatcttcatcagctgaggaagatgaagaaagtagtgatgaagaggataatgaagaggaggaaagcactgatggagaggaagtggaagatgaggagaaggattccaagtcaaagcaaacagacgataagcccagtggaagcggtgccgcgtctaaaaaagcccttacagcagagctcccgaaacgggatagctcgaagcctgagtatcaggattcagatacctccgacgaggaggacataagaaatactgtaggcaacatacccatgcactggtacgacgaatacaagcacatcggttacgactgggatgccaagaagattattaaaccaccacaaggagatcaaattgatgagttcctgcgtaagatcgaggacccagacttttggcgtaccgtcaaggatccacttaccggtcaggatgtgcgcctaacagacgaggacattgctctgatcaagcgcatcgtttcgggtcgcatacccaacaaggatcacgaagagtatgagccctggatcgaatggttcacatcggaggtggaaaagatgcccatcaagaacgtacccgaccacaaacgctctttcctgccctcagtttccgagaaaaagcgcgtctctcgcatggtgcacgccctcaaaatgggctggatgaagaccactgaggaagtggaacgcgagaagcaggccaagcgcggtcccaagttctacatgctgtgggaaacggacaccagtcgggaacacatgcgccgcatccacgatccagtctctgcgcccaaacgcgaccttcccggtcatgccgagtcctacaatccaccgccagagtatcttttcgatgccaaggagaccaaggagtggcttaaactaaaggacgagccacacaagcgcaagctgcacttcatgccacagaagttcaagtcgctgagggaggtgcccgcatactcgagataccttcgggagcgtttccttcgttgcctggatctttacctgtgtccccgtgcaaagcgtgtcaagctgaacatcgatgccgagtaccttatccccaagttgccctcgccgcgtgacctgcaaccctttcccacggtggagagtatggtttaccgtggccacaccgatctggtgcggtctgttagtgtggagcccaagggagagtacctcgtctccggttcggatgataaaaccgtcaagatttgggaaattgcaacaggtcgttgcattcgcacaatcgagaccgacgaagtggtacgctgtgtggcttggtgtccaaatcccaagctgtctattattgcggtggccactggcaatcgcttgctgctcgtcaatcctaaagtgggcgataaggtgctggtgaagaagaccgacgatctcttggctgaggcgcccagtcaggatgtcattgaaagtgaacgcatcaagacggcggtgcaatggtcaaatgcggaagctgatgagcaggagaagggcgtccgcgtagtgattacccacttcaaacccatccgacaggtgacctggcacggtcgtggtgactacttggccacagtgatgcccgaaggtgctaaccgctcggctttaattcatcagttgtccaagcggcgctcacagattccattctccaagagcaagggtctcatccaattcgtgctcttccatccggtgaagccctgcttctttgtggcgacgcaacacaacattcgcatttatgatctggtcaaacaagagcttgtcaagaagctgctgaccaactccaaatggatatcgggcatgtctattcatcccaagggcgacaatctgctggtgtccacctatgacaaaaagatgctctggttcgatttggatctgtccacaaagccctaccagaccatgcgactccatcgcaatgcagttcgcagtgttgctttccatcttcgatatccgctctttgcttccggcagcgatgaccaggctgtgatcgtctcccatggcatggtctataatgacctgctgcaaaaccctttgattgtgcctctcaagaagctgcaaacacacgagaaacgcgatgagtttggtgtgctggatgttaactggcatccggtgcagccatgggtcttctccacgggcgcggacagtaccatccgactatacacgtaatttaggtgtacaaaccccaagaaagtttcttttagtttccgaaagttttgtgaaatttcaatagtaaataaaaaatatattaatttttatgaaaagt

SEQ ID NO: 10413 - protein, 784 aa, DROSOPHILA
MTKKLALKRRGKDSEPTNEVVASSEASENEEEEEDLLQAVKDPGEDSTDDEGIDQEYHSDSSEELQFESDEEGNYLGRKQSSSAEEDEESSDEEDNEEEESTDGEEVEDEEKDSKSKQTDDKPSGSGAASKKALTAELPKRDSSKPEYQDSDTSDEEDIRNTVGNIPMHWYDEYKHIGYDWDAKKIIKPPQGDQIDEFLRKIEDPDFWRTVKDPLTGQDVRLTDEDIALIKRIVSGRIPNKDHEEYEPWIEWFTSEVEKMPIKNVPDHKRSFLPSVSEKKRVSRMVHALKMGWMKTTEEVEREKQAKRGPKFYMLWETDTSREHMRRIHDPVSAPKRDLPGHAESYNPPPEYLFDAKETKEWLKLKDEPHKRKLHFMPQKFKSLREVPAYSRYLRERFLRCLDLYLCPRAKRVKLNIDAEYLIPKLPSPRDLQPFPTVESMVYRGHTDLVRSVSVEPKGEYLVSGSDDKTVKIWEIATGRCIRTIETDEVVRCVAWCPNPKLSIIAVATGNRLLLVNPKVGDKVLVKKTDDLLAEAPSQDVIESERIKTAVQWSNAEADEQEKGVRVVITHFKPIRQVTWHGRGDYLATVMPEGANRSALIHQLSKRRSQIPFSKSKGLIQFVLFHPVKPCFFVATQHNIRIYDLVKQELVKKLLTNSKWISGMSIHPKGDNLLVSTYDKKMLWFDLDLSTKPYQTMRLHRNAVRSVAFHLRYPLFASGSDDQAVIVSHGMVYNDLLQNPLIVPLKKLQTHEKRDEFGVLDVNWHPVQPWVFSTGADSTIRLYT

SEQ ID NO: 10414 - DNA, 5059 bp, DROSOPHILA
acttcttcactacgttcttattattttcccctccacattcatttttgtgatttcactaattaaagccacattaagcattgcctttgccctcctgccttttcggttatctgtctgcctcaagctggggccatgtgtcctcgtaacataattatctggggtccttgaacgcatgcggctctcggagaagcgaaatggaaatgggaataaaattgtatataaaaaggaattaaaaataagatgaaatgggaaaaattccaaatgctgcatgccgtctttgtacttgcaaaattaaatgcaaaatggggcggaatgataaagagcttagtgtccagggtcggatctgttgtggggggatcacaatttatctggttatgcaatttaccaaaagggttttccccttcatacacacacacacacacacttgtccacatcaaaaatgagagaaaagggagcttaagcattttcctgagtgaactcaagtgtcaggtcgagagcctttgagtttttgccatcatgattgatggaaaaagttggcgagaaattatcatgtataggtaggggctaattccaaattggattccccaaaagaaaatagggaaaactttgagaaaagtgctcacctgatgcttttccgaccaaacaatcttgagtaaattaaatgccacacttgaatgcgaattgaaaaacccacaagacaaagcagcaagtggttgaatggcagctgcgaatcatcacacgattattgacacccacttgtgccgcccactcccgattattacgagagatttatttgcgaaatatttttgcaaaatacgtgcacaagtctttaatcttgtgagacgagcaactttggcgaaattgtttgatatgcagaaaattgaaaggcaaaactttgcagacaaacagctagtacagacgacacagacacggcattcatttacccacacttgatacaaaacaatgccaagtgtaggaagcacttgaggacactgccaggacaatgccaggacacttgcagcacaatgacaaatacattttcaaggggagccagcgtgaaacccatttgttttcacagacatttgcgcttccaactccttcagtcgctttcaaataccttagcaaatacaatggcggccaagtggagcgcgaaatattccagcgccctcataggaaatggaaataattccgtattctggacatttcagacaaaggaaccatcctcgaaaacaagttggccacaaaaggcactcagcccagctaaacctaagcaaaccccttacaatactttcccagatattgaacaacattgggttttaataataaactttgttcaacttaccggaatctcaataaaacggaatggattgtaattcaaaagcattaccattttcaagcttaaaaggaaacttgtttttaaagttattcctttgtgacaaaccaacttttgtacattgttcaccacattaataacatattattaaaagagtttattaatttcacaacataacatgtgatataattttcgaccattgtatataatttaaatgattttttgtttttatcaaacaaaagttacacatcattaaacataaatgaatgacattgctctttgtgatattgtttggtataagtttcaatacacttttataatattataataaaagtacattcttttgaacataagttgggcacttttgttgcatgcaataataataataataatacggaatcaaataatgttgtagtatttattgttgaagattttgttgatagttttaaaggtggccccgagctacaaagaaactaattaaaagcgaggcatttactataattacacaatagctggaggcgaaggtttccttttgtcaggtgctaagcgagttatgttgtatttaattaaatggcaatattgaaccacccaaatgaaaattgccccaagaaatgtgtgctcgacattaaattgtgtcacaagacaccggactgaaataatcttctgcgcccgatcagccccattcgccccatatgaataattactcatccgacctgtagaccccgagcgagcaaaatgaactacggacagtccacagagattaatatgcaattcacttctcatccccatcccacccacagtgaccaccgtggagccgaacaacatgtacacgacctgcatacccattgggggaaactactcgagcagcggtggtgtcttcgcacccaccactctggccaacgcctcctcggacactctggcctccggattcgaggcagccggctatgcggcctattcgacggccctgagtgttacgattgccattggctgcagcctgctcatactgaacgtgttgattttcgccggagtctactatcagcgcgacaagacgcggctggaggtgaagacactgcagaagcagtaccagcagcgtagcctgcaccagcaggtcccctacccaccggagcccatcaagcacgcccactaccacatgggtcactcgcagagctcggccaatgtcatcgtcgatgtggagagccatcaggaccaggccggccaggcggccatgttgctccaagccgcagcagcagccgcagcagcagcggccaacgacgtgaagccaccgccaccgcacatctgctcaaacacaggtaagtgtggtttgactcgcggcaaaaggcaattgccttttctgagaatgatacacaattataaaggcaaaaaaaaaactcatatggctcaccataaggtatttggtttttttgccttacataatcataataatcaatataatcataataatataatacaataatataatcaaatgcataattgagttcgaggggattggttatcacttaaacaaataaacatacttactttttgaacgcaagctattaaaagtatataagataaaataaatattaaattaaatattaattaaatatttgtcaataataatttaacaactaatacattaggttgtgaattattaataaagatctcttgttttctttgtttttattgtattaatttcaatctgatagaaaaatataaaagccacaaatttaatcgaaagctgctttttacatctgcttatgtatagcttcaaagctcgaatttttcaagaccatgtcttcataggaggcgaccaaattatatatagttataaaccgacgacaaactatttcgttcaaaacatactattctgcttaaaaaccccatttatggaacaaaaaactgttttgtcaatgaatactttagtttcaaagttcatagactaaagttacattttctattccccaatctcctacaggaatgcaacagcagcagcaagtgggtggtggcagcggtggtgccctgaataatggtggcatcgaggggtccaaggtgaccacagacaacctgggcaacgtcacctacagcactagctccaagcagcagcagcaacaccagcaacaacagcagcagcagcagcgtgagcacatgcaaatcaagggaatgaccggcacgcaaacattcggacgaagtggctccggatcgggaggcggggctgggggcggagccggttccgcttccggtggcgcctccgtggtggtgtccggcagcagcgttagctacaatcccggcatgatgacgctgcccaagtcgggcggtctccatcatgcggccactttgaattatgcgcgcaacacgaccgccttgaatatgtcgggcggcggcaccgccctagtggatagtcgcggcaatgtcctgctcaccagcaccgcagtgggtcctggcatggccggtactggtgctggaggaggatcctctggtggcggcggaggcggagattgcatgaccctgccacgcaatcttggtctggcggccgcaggacgacacaatcccactacaggtgagtgccagaaatggcaaatgaaaataaaaatgagagtaaaattatagctaggacgcgtaactcgagaacgcaagtgccaaaggatatggcaattgaattggatttctctgctgccaaagttgcaagtttgtttccgcagctctccttctgcaacaatattgcgggctgaggcagcaatcaagctcaaatgtgataagatttcatttcattatgaagtgcttgtttccacgtctgtcgatttctcgtctcggttcttgtatcttgtatcttcaatctcacttctcggttctctgtttctgcgactctcgaagtctgcttattcgatttcaagcaaatgaattcgagattgaaaagcttttgtgagagttcacacttggcaagcactgccgttggtgaaatacagtttgcattacaatcagcagaaaactttgatgcggttgaaaataagagtttattgggttccggaaaagttgggtaaggtggaaggaaattcggtttgggacagtttcttgcgacgcagaaatgtcgttttactcctagaatcctagagcaaaaacgcacacttattgtattacaagtttaagaaatagctagctacgtataaatagatatagccaaattcttacattttctaatttacaaataaatttactaactattatgttattttaaaactaactaactaactcatttagcaatggttcggtcttatgcataaaatgtgaacttaaagttaagaaccataacataaagttgaatactgcattggcttttaaagtccttaaacgcaaacaatgggttaatgaatggctaaaggatatcccaaacccaatcccatgggcaggcaacgggcatgactgtggagtgttcgacctgtcacgggctacgcacccacacacacacacataaatatcctgctaaatcatcccaaacaaacgaaaatattgcttaatcaaattgaatgaccttcgtgcccgaaaggtctgacgttgcaaaaagtccgtggcagcaaaaaacgagaatgtccgcgtgaaaattgaaattgttctaatcagccgtcgaggaggttgtatcgtattttttgctgggcctgctaacacgtgttattgaatcattgaaaaggaaaggcggagcagcaagagggaaaaacaagcagaggaccgggaaaa

SEQ ID NO: 10415 - DNA, 1266 bp, DROSOPHILA
atgccaggacacttgcagcacaatgacaaatacattttcaaggggagccagctgaccaccgtggagccgaacaacatgtacacgacctgcatacccattgggggaaactactcgagcagcggtggtgtcttcgcacccaccactctggccaacgcctcctcggacactctggcctccggattcgaggcagccggctatgcggcctattcgacggccctgagtgttacgattgccattggctgcagcctgctcatactgaacgtgttgattttcgccggagtctactatcagcgcgacaagacgcggctggaggtgaagacactgcagaagcagtaccagcagcgtagcctgcaccagcaggtcccctacccaccggagcccatcaagcacgcccactaccacatgggtcactcgcagagctcggccaatgtcatcgtcgatgtggagagccatcaggaccaggccggccaggcggccatgttgctccaagccgcagcagcagccgcagcagcagcggccaacgacgtgaagccaccgccaccgcacatctgctcaaacacaggaatgcaacagcagcagcaagtgggtggtggcagcggtggtgccctgaataatggtggcatcgaggggtccaaggtgaccacagacaacctgggcaacgtcacctacagcactagctccaagcagcagcagcaacaccagcaacaacagcagcagcagcagcgtgagcacatgcaaatcaagggaatgaccggcacgcaaacattcggacgaagtggctccggatcgggaggcggggctgggggcggagccggttccgcttccggtggcgcctccgtggtggtgtccggcagcagcgttagctacaatcccggcatgatgacgctgcccaagtcgggcggtctccatcatgcggccactttgaattatgcgcgcaacacgaccgccttgaatatgtcgggcggcggcaccgccctagtggatagtcgcggcaatgtcctgctcaccagcaccgcagtgggtcctggcatggccggtactggtgctggaggaggatcctctggtggcggcggaggcggagattgcatgaccctgccacgcaatcttggtctggcggccgcaggacgacacaatcccactacagctaggacgcgtaactcgagaacgcaagtgccaaaggatatggcaattgaattggatttctctgctgccaaagttgcaagtttgtttccgcagctctccttctgcaacaatattgcgggctga

SEQ ID NO: 10416 - protein, 421 aa, DROSOPHILA
MPGHLQHNDKYIFKGSQLTTVEPNNMYTTCIPIGGNYSSSGGVFAPTTLANASSDTLASGFEAAGYAAYSTALSVTIAIGCSLLILNVLIFAGVYYQRDKTRLEVKTLQKQYQQRSLHQQVPYPPEPIKHAHYHMGHSQSSANVIVDVESHQDQAGQAAMLLQAAAAAAAAAANDVKPPPPHICSNTGMQQQQQVGGGSGGALNNGGIEGSKVTTDNLGNVTYSTSSKQQQQHQQQQQQQQREHMQIKGMTGTQTFGRSGSGSGGGAGGGAGSASGGASVVVSGSSVSYNPGMMTLPKSGGLHHAATLNYARNTTALNMSGGGTALVDSRGNVLLTSTAVGPGMAGTGAGGGSSGGGGGGDCMTLPRNLGLAAAGRHNPTTARTRNSRTQVPKDMAIELDFSAAKVASLFPQLSFCNNIAG

SEQ ID NO: 10417 - DNA, 3001 bp, DROSOPHILA
acccaagaagtgcatgaccggtgtgctctcccactttatgatggatggtgcctcgactttgccgcctctcttcctgcaggtgaagcctggcgagcgtgtgctcgatgcctgtgcctctcccggcggcaaatcgctgcttatgctgcagacgctgcacttggaccacctggtctgcaatgacatccaagaatcccgcctaaacaagctgcgcaaagtgatgcaggagtacctgttcgactacaaggagcgctgggctggaaagcgcctcatcctcagccagagtgacgcccgcaatctggaccagtacgagcagttcgacaagatcctggtcgacgtgccctgcaccacggatcgccatgtgctcaacgagcaggacaacaatattttcaagccgacgcgcataaaggagcgcctgcggataccagagctccaggcaggcatcctggccaactgcttgcgtctcctgcgaccaggcggcagtttggtctactccacctgctcgctgtcgcccatccagaacgatggtgtcgtccacatggctctgcaaaaggtcttcacggagtacggcatcacaactaccatcaaggatctgagtcgccacacggcgctcttcagcgatgtcttcaagttcgagcacccaaagggactcaagtatggacaaatggtggtgccctacctgccggccaactttggacccatgtactttagtaaaataaccagaaatgtgtgattaaatgaaagttgttggctgattaacaagactatataactgttgccccaataaataataagagttgtaaactaaaaaggtacctttatatttaacatactgcttcctttggtaaccagtattttctactgctggaattacatttgcttgtcggtcttctttttctttttgcccttgatgggcagaggaccgggattcttgaaaatggtgctggaaagtatagtcaggctccttaagttaagttctagttaattgaagtttaaattgtactcactggcaagtggtgcatatgggactgtatttgcagaagaccgagaggcaaaccgagcagacgtagccaatgtcgatcagctcacgatggcagaagcaggaggcgcggtagtccactttgggcggtggcggcaggaccaatttgtgacggatctgcggggcgggcaggaagacccacaggaggtactgcagcaggccgtccagctgggtgaccttgaggaactgtccggaggtaatgtcacagccttgctgtagcaaactgagggtcttgtccagggcgcaggtatcgatcgtgatgcccagtttctgggcggtgaagaagacgttcatgaacgtcatgtactgcgaggcgcactcgttgctgcctgtgacgaccaggatgcgggaatgcatcttgacgccaggagccagattcctctggagctgtacgggagtattttgttttagatttggtttcccaaggcgattcctagctattctctacccttgatatgtagcacagcgccatggacatgctgccggccaggagactctcacaaggagcgctgagccgtggtgcgttcatcaggatgctgcccagctgctgcttcaccgtcttctccaccagattaaacgcctcgtactgcccatccacttggcgcagttccacttgtcttctgggcagcggatacaggaagtttctgtaatggaagagccattaggtggcgtacatgtgtggcagcctctactcacgtggcatggtgggagcaggataccacagccagtttgttctgggccttctgcatcaggtgagcattcccaaaggcaatcaccgcctccaggatttgcgtgaggttctgtgggttctggcgcacgaagtgctgggaggggttcgtgtccaggacgatcaccaagaggtcgatgcatgattcggctgaaaattgcgttcataaatcattgttttcattccattcttgtttaaaacaaataccttccttgcttgctgcttgatctgcttccattttcgccggcaatgttatcgctagagatgcgaaccaatcgatatttgcagtagggtagcgcaataaacttacgttttatttattgaaaacaaatcggtgtcaccaccagccgccttcgatagagctgttatcgttatcgcagccacctatcgtttaattcgctgggcgtttcacaatttttttgggaaacacaacaaagcttcacaaaggacacgatgctcgttctggtactcggcgacctgcacatcccgcaccggtgcagcagcctgccggctaaatttaagaagctgctggtgccgggccgcatacatcacatcctggccaccggaaacatctgcaccaaggagtcctacgactacctgaagtccctggccaatgatgtgcacatagtgcgcggcgacttcgacgagaacctgacgtatccggagcagaaggtggtcacggtaggccagttccggatcggtctgtgccacggccaccaggtggttccccgcggagacccggaggcgctggccctcatccagcggcaactggacgtggacatcctgatcacggggcacacgtacaagttcgaggcctacgagcacggcaacaaattctacatcaatccgggatcggccacgggtgccttcaacccactggacaccaatgtggtgccttcgttcgtgctgatggacattcagagcaccacggtggtcacgtacgtgtaccaactgatcggcgacgaggtcaaagtggagcgcatcgagtacaagaagatctagggtcctagtattagccaccagccattcccctccaatccaacccttgacccctgcattctgagctcggcttcattaaagaaattgtaaatgtacgtagcaataaatcaagttctcatttttttatctgataaaaaatgctagcaccttgtttaaatagagaataaaagtacgaacggacgaaagtgaagttttagatttaatgcaataataaacgattacaaagtaaggaaaaacac

SEQ ID NO: 10418 - DNA, 831 bp, DROSOPHILA
atggaagcagatcaagcagcaagcaaggaagccgaatcatgcatcgacctcttggtgatcgtcctggacacgaacccctcccagcacttcgtgcgccagaacccacagaacctcacgcaaatcctggaggcggtgattgcctttgggaatgctcacctgatgcagaaggcccagaacaaactggctgtggtatcctgctcccaccatgccacaaacttcctgtatccgctgcccagaagacaagtggaactgcgccaagtggatgggcagtacgaggcgtttaatctggtggagaagacggtgaagcagcagctgggcagcatcctgatgaacgcaccacggctcagcgctccttgtgagagtctcctggccggcagcatgtccatggcgctgtgctacatatcaaggctccagaggaatctggctcctggcgtcaagatgcattcccgcatcctggtcgtcacaggcagcaacgagtgcgcctcgcagtacatgacgttcatgaacgtcttcttcaccgcccagaaactgggcatcacgatcgatacctgcgccctggacaagaccctcagtttgctacagcaaggctgtgacattacctccggacagttcctcaaggtcacccagctggacggcctgctgcagtacctcctgtgggtcttcctgcccgccccgcagatccgtcacaaattggtcctgccgccaccgcccaaagtggactaccgcgcctcctgcttctgccatcgtgagctgatcgacattggctacgtctgctcggtttgcctctcggtcttctgcaaatacagtcccatatgcaccacttgccagtga

SEQ ID NO: 10419 - protein, 276 aa, DROSOPHILA
MEADQAASKEAESCIDLLVIVLDTNPSQHFVRQNPQNLTQILEAVIAFGNAHLMQKAQNKLAVVSCSHHATNFLYPLPRRQVELRQVDGQYEAFNLVEKTVKQQLGSILMNAPRLSAPCESLLAGSMSMALCYISRLQRNLAPGVKMHSRILVVTGSNECASQYMTFMNVFFTAQKLGITIDTCALDKTLSLLQQGCDITSGQFLKVTQLDGLLQYLLWVFLPAPQIRHKLVLPPPPKVDYRASCFCHRELIDIGYVCSVCLSVFCKYSPICTTCQ

SEQ ID NO: 10420 - DNA, 2606 bp, DROSOPHILA
gctttgataagactatcttttggtttgactgttcattagataaagacccaaacaaatacattaaatgtaggtaaacatttcgtaccgttccaaaatgttctctttagatttggattttagaccgaatgttcatatatgtatttgatttcctgttcaaatgtaattagagggtatctctcacccgtagccttatgataaggaaaagcaatatgtcagaggcaagtttttctgtagtcaatcaatttttgttgtataatgatagcatatgcttaaaaaccgtgccttcttttctttttttaaacacatgtttttggggaactgctgctattcatgtcttctagatcaagaatatttatatttagaagataattctttaaaatatacataactatatataatatcccatgcttttgtagaaatattgtgtgcgcgtgattctcgttactttctatggtcaatttaaactagattaattttcccagctctattttctggctatttccaggtggagcacatgtgtaacttctacgtgtaggttttggctcaaagctgttgttgtttattggcccatttacatttgaagttaaccttagttggcaaattacggaaatcgctcgagggcgtagtgtttacccatatgaaagatactctgggtaagaatgctcggaagatactgactatattcgagcggatacttgtttgtttggtcagacgatggctttttctctctttgtacgacttgagtcaatttatgttgacatcttcttggccattgttttaaagcttcgagtcaagttgaacacatccgctggcggttgggaaaagaaaaggaatgaaaccactgccaaataagatagtctgaattcattattaataaattaaacttttattttatttaactaaacaaacgttgctttgttaataacaaaaagagtccaattctagtcttagaaatatgtgcattacttttgtcttaattttagctccaacagaaagtaactaagaacaaaacacggagttacgatgctatagactgtgattagttcttgatgcttagatacgaaggacccacttggcggacgtacacactccgctcgttggtcaaatacggcggacacttgacggtaagtatgccatcggacgacagttccgatcgcacatcgttgggatagtatcctcggggcaggacgaaccgcttgacgatgtggcgacccacgaaggtgtcaccatcacgtcgcttctcgtgcttggcctccacgaccacagtgtcgcctgaggtcttcacgctaatctcatagggcttgaacaggtgcacatccacattggcctcgaaaccatcctttccgacaattacccgacttagatcgggtgcggatccaacgcgagatagtgatcgcttccagtagggcaagtcccagtcgttcaaatcccaatcgcgccacagccgacgacggtaatcccagtaatcccaatccgtattgtttgtagccgggacaagagccattttgtggtagttattattccttaggacaggaccaacagcaacgctagtttgtatttactttccacttatcgcgctttctgatagacgtccactcgcgttttctgctctgagcaaattaaacttggaaacgatagtagtcgacgcttatatagccataagcttcgccccgtgggatcagctcggctcaacacagattctagtcaatagccaatgacagttgtgacgtagtaggcacactgttcaaaaaaaaaagcggcatcccagttaggaattcaaaaaatacggcaagctgctgcatcttaaatatagtttttacatctgaaacgttgtgtgattatgaaatttaagttataaaatttttaataaatgctctaaatataattcatcgatttttttaccgcagtgcaccagttgcagttacagtggcgttaaaactgggcgatgttttcgattgtttatctttgcattgacgcttgtatataaggaaatggggctgtgggtcgaaaaaatgcctttgcatgttatttccttgaggcgcttcgagatcatatgctgggtgggttgatttgcagactagtttccgtagaggctataaattttcagcggttctccaaaggtactgctaacctgctaattattcagtagatttgaaataaaaatctttatatgctgaaaatttttcgttttttatccaacaaatacatattttgctttccaatgatgcagatgtttgcgtgtccttatttgtttatgtttttctctttcatttaccaaatcattctcccatatcggcaacgcattaaaaacggtggaaacattccaaaaaatgttggcagaattcgtattttgaaattaattactctttgcttccgtttgcaaattaaaaaacaaaatcaaagcaagcccaaataaaaaccaacacatttctttgacggatgtgattcttttcactttttgaccaaattcggctttaaattttgtacacgatagaaattaacagagatacgcggattacagatacacaatctatagatacagcaacataaaagggggattgagtttgtcatgacaaaagggcaatttgtaaaaaaaattttgacga

SEQ ID NO: 10421 - DNA, 606 bp, DROSOPHILA
gaaaacgcgagtggacgtctatcagaaagcgcgataagtggaaagtaaatacaaactagcgttgctgttggtcctgtcctaaggaataataactaccacaaaatggctcttgtcccggctacaaacaatacggattgggattactgggattaccgtcgtcggctgtggcgcgattgggatttgaacgactgggacttgccctactggaagcgatcactatctcgcgttggatccgcacccgatctaagtcgggtaattgtcggaaaggatggtttcgaggccaatgtggatgtgcacctgttcaagccctatgagattagcgtgaagacctcaggcgacactgtggtcgtggaggccaagcacgagaagcgacgtgatggtgacaccttcgtgggtcgccacatcgtcaagcggttcgtcctgccccgaggatactatcccaacgatgtgcgatcggaactgtcgtccgatggcatacttaccgtcaagtgtccgccgtatttgaccaacgagcggagtgtgtacgtccgccaagtgggtccttcgtatctaagcatcaagaactaatcacagtctatagcatcgtaactccgtgttttgttctta

SEQ ID NO: 10422 - protein, 154 aa, DROSOPHILA
MALVPATNNTDWDYWDYRRRLWRDWDLNDWDLPYWKRSLSRVGSAPDLSRVIVGKDGFEANVDVHLFKPYEISVKTSGDTVVVEAKHEKRRDGDTFVGRHIVKRFVLPRGYYPNDVRSELSSDGILTVKCPPYLTNERSVYVRQVGPSYLSIKN

SEQ ID NO: 10423 - DNA, 2708 bp, DROSOPHILA
cgaaacgacgatcacagagatcacaggaatagggaaagtctctgttatgatagcgtttatgaatctccagggctttggcaatggcaaaaaccttgccgcatgtgtcgcagtggactccagactgcctgtgcttcgaatcgacgtgaactttcagcgcctgctttgtgaggtaaacccggtcgcactggctgcaacgaaagttgggacgattggccaaatgaatcatctggtgcttggccatgcgggaatggttcctgaactccttgtggcagaacttgcagttggattttcccgtatgccgattgcgtggcacaatgtcctctaagctgtcgataggggtttcctgcttctcctcaatctcttccatcaggaactcttcattcatatccgcctcattctcctcatcctccacgtcgtcttcctgttccgtgttggcttcggttgccacaaatatctccctcaactgctgattggcaatggccattttcttgtggaagtcgtaggcccatttcagttccaccgcacaacgtttgcacaaggttcgtggctcgtttttgggattttgccgcaggtcttccttggtgcagatctcgtagcagtcgtagtaactcagcgccgcctcctggtcatagatgacggtcatgtccagcatttggttgggatacggctcctccaaacacaagcggcagcaattgctcagctccaaagaagtagtactgtctgaaagtgagacttcatgggatacaagcttcacgggagcttctgcagttcgccttgctattgtaaaattaagcgtttggcatacttttgatgtttggggatccatctgtgcaaagcttattttgatcaaattgaaaagattactcagattacctaataaatacttctttgtttacagttgaaaatccccgctcttagccataaatgtgaagaaaaactaaacatagctgtgctagggttgccacctatttcacgagaggtctggcagcacttgggagcgctgaaatttttgagaactttttgcttcgtagttgttgtgatttctttgtacatcccctgaaaacgatgaagttacttgagcctcagacgaccattagtcctgaaccggacatactgcatccggacgacggtcaatacatatggctgccaatttccgtgctcgttggcattttcgttctggctgcactggtgcgttatcgccacagtctgtttgtttaagtggatgtacatttgtttaatttatgcatttgggtgtacacaggtctacgccatgtcacgtagtcgctgtcggaattcctgggattgcctaaagagcaggaaggctccgcgaagtggatacatcaatgtggatgaggaggattccgatgtgcccatggactgcggagatgaactgggagatcaaaggactactgctactctcctcactggtcgcctccacattcaggatgtcagtgagctcgtgacaatgtcccaatacaatcacagccctttttcttccacagggagcgaataacgcctccaatgcctagtgaatctcaaaagtcttccatacactttattgtccacgttgtcttcaaacggtggttgtcatcggtttagttactactgcaaactacgtgcctctactacaagtacaacgaaaataaccctaattttaatgatccgtactggtggcgccaaggattcgcgtcgtcaggtcgtagaagccaaagaagaatgcaccgcccagtgtgatccacagcacacgcggcacaaagccagcaaacagactgaaaagtaacatcgaagtacattaataaatgtaataaatagttttgtaaagttaatttgtgtttaaatattaggaccagcttgagttgcgtctaatatggaaataattacccgctgaagcctcgctccaggtaaatgccatgcaaaattcttcgggcactgcgacgtcggttgagactctccctttcagccagcataattcgggttttgaccacatcgagcggcgtagttaatcccgctgaaatgcctccagcgacagctccacaaagagccaccgaaaaaggagtggaatcgaagccggtcaggggagtccattgcagcttaaagtactcccagagcggaaactgtatcagactaaatggaatctcccgcatgatagtggaaccaaatcccctgtacagaccacgtttcaatccctcagtgcgataggcacgcagtagaatttgcaggccggactgtttgttgccctgcaatgtttgggagcgttgcttggcaatctccacgggaactcggatcaagcatgccaactattggatacagagattcttcagatctaaatacgaggtgctcagttttatatgaaatcctaccacttctgctgctgaagccgctgccatgtgaacatagggtgaatctttggtttgggtgaccgaactaaggaactgctttccgcactcgtaggtgcagaaaaacagggccgccgtgggagcacttcctgcagccgcaggagcgagtcctttgtagatgcccctgaatcctcctgcccgccaaaagcccagctcgctttgcagtcgggtcttcactgtatctatgggaaacagcgctatgtccactaccattccagccactcctcctgcctaaaactaattatttaagaactaacttttcatttaattttcatctacttacaacaagtgcatggaaaaattttaatttat

SEQ ID NO: 10424 - DNA, 580 bp, DROSOPHILA
ctgaaatttttgagaactttttgcttcgtagttgttgtgatttctttgtacatcccctgaaaacgatgaagttacttgagcctcagacgaccattagtcctgaaccggacatactgcatccggacgacggtcaatacatatggctgccaatttccgtgctcgttggcattttcgttctggctgcactggtctacgccatgtcacgtagtcgctgtcggaattcctgggattgcctaaagagcaggaaggctccgcgaagtggatacatcaatgtggatgaggaggattccgatgtgcccatggactgcggagatgaactgggagatcaaaggactactgctactctcctcactggtcgcctccacattcaggatggagcgaataacgcctccaatgcctagtgaatctcaaaagtcttccatacactttattgtccacgttgtcttcaaacggtggttgtcatcggtttagttactactgcaaactacgtgcctctactacaagtacaacgaaaataaccctaattttaatgatccgtactggtggcgccaaggattcgcgtcgtcaggtcgtagaagcc

SEQ ID NO: 10425 - protein, 111 aa, DROSOPHILA
MKLLEPQTTISPEPDILHPDDGQYIWLPISVLVGIFVLAALVYAMSRSRCRNSWDCLKSRKAPRSGYINVDEEDSDVPMDCGDELGDQRTTATLLTGRLHIQDGANNASNA

SEQ ID NO: 10426 - DNA, 5002 bp, DROSOPHILA
gcatttggataagactctatggggtgtgtatggtctgttgtggtctggctcaaagtacagctcaagatgaggctttgtaagatttgcttaagaaaggacttgatcctcaatggggtttcataagaaagtagaaagtgttgccgtctgctgttgtatttacaaaatgcttcgatgtcattactcgtatgacctaaaacgatttcaaaactagtcatgttaaatgtctctatatatccgtatttatatatatatatagtgacgtatttgggtggtccaaaccagccacttccattatttcaaagaaatcagtaatgcactctagtaattttccataacgtatcccagctgcgcagcattcgtttatctttggcagcgcagccgttcttgtaaacatcctaaagcctgacctaagcagatttgactgccctctttcaacgctacctaatcttaagaacccaagagcgaggctctcccgaaatacaaatattgttcaaatactgaggcttctcctcaatccaatttgcatttgatttttagtcttaagctgagatccaaagaataaagtcgtgaaactatttctcctaaaaactattttttatttcttggcgttgtccttagtcaactgacgggacattagttcgactcataaataaaacaacaattttactatatatatatatatatatatatatgctggtgtgttgtatatataagtttataaagtttatgtatgtaatacgtttaaaaagattttttggtttctttccttcttttttttgtaatgtttttttggaaaaagtatttctgttacgttgcggtttatgattacgtttaaacatacttatcagttagcgggttccgtaatcttggtttcaatttgattaatacgtctcttagatcactagtattacaatggatgctatttgtgtcgctcgtttcgtattagctttctgggtatttttttcttgttgtttttctttctgtttttttgtttttttttggttgttttggaaaatgctttctgtggtcgaacctgcttcttagtgaaaacatattttgtaatacctaactctttggttagctaacgactagaacgtaggaagagaaaggaatccgattcacattgaacgcacgacgtctgattcaccggccccaaccaggatcctgatttcgtggctgctcgcaaaatggttaaatggttctactaatggatacatattgcttagtcgattgcagcagcgattggggcggaaaatcagagatataccagtggagagcaacagcggaagtcaacacagcgcaactgaattcgatccaaatccaaatccaaatccgatccgggacatcaagccatcctctctaagttggactatccgctttggaaccggcattcgagttgtcttgcagttgagctagtgtcttgaacttttgagagtttaggaatctgttgaaaaagataccccgtttaagtataaatacagtatcttttatttttgcctaaagagcactcacctcggatatgagtctctgtgcatcagtgtgtagatctggatttgagcttcgtcgaaggtgtgcgtcgtgggctcgatcatgttccggttgacaatctcgcggaccctggagtccagcgacacctccctgggcgacaggatcgagatgtagtcctcgtagatgaggcgcgccttctcctccaccaactctgggctattctccttcttgagatcctcgcaggccagccagaataggatgttctcctcactgaattcgctgcgcaggaagttctggaacacctttcgaccagctgggaaaatattcggccaaccaccaattagtttggatcaaggtggcaattgtcaatggcttacctgtacttttcatcagcttgtcaaagcttttgccccagctgcggatttcctccagtgtgggtctgtaatgtacaaataaatgtagtttttccgtggcttaagtttattaagttgattggtgctcaaactcactgctcgccatccaagaattcggcatttaccagatctcgcttcgtgggggcattttcatcggcattcttgatggccagactgtaaagataagaaaaaagggaaaaaacaaggggggtttgcttgttaaaagtcgattattttgattttacaactcatcaatcaccctttaaagtatactacaattttattcatcgctgaattggcgctcagcctgactcatttttaactggcacaaaatagcataaatatgtaagtacagtagccgctcgataacgtaaacttttagatagcgcaagctactgattagcattttataaaacacttgcaccaaacatagaaactgaacataagcgattctaccacattttaagctagagagtttaaaagttactcatatatctgaacgcgatataaagatataatgcctcgaataaacactgtagataggctaatggcatatcggttttgggtttcgaagcccggagacagagcaacggagtactcgaacttgacataaagctctcttatctggacgacagttatcagagcgactcgctggcccaatacctaatcaaagtcacacaggcgtacatatacccctatacatatatgaatcaaattagatgcggccagggggggtttgaggcgacatcgggtgctctgaactgggttttcggggcgatatacccccaagttgtgcacacaaaggtgcggacggggggttgcgagttggcggcgggtcgcaaaagactttcgttttcattcacgaaaacatgcaacacttggaggagtccgcggaggagccgccacatacttatttatatttgatttgaaaagtgccctccagagagcttttcgctgcccgtcgccttgctcacggaattgtgaatgaatgcgggagaaactgagagagcggcaccagtgctaaagagcgtttcgtaagagagaaagcggagaaagttcgcatggcggagagagaaagagcttttggatgttcagcagcgttgccagctgccagcagaaggccacctttaccgtgtccatttccatttcaacttccctatccatatccatatccatatccatgtcagtgggcacagccatagccgaagccaaagccaaagccaagcaatagttaaagccaaagcaataaccatagctgtaaccgtggccacatccatgacagcactgcgagaaacatggactaataatatttcgactctcttaaaaaaagggctcaaacagacaacctttaaaatgaaatgatttataaaataaaaaaataaaaaatttgcaaaaaattgatattgaaataagtaaaaataaataaattaattaacaataacgatgttaatgtaaccaaagattggttcatctgttatagtatatcttgaaaataaagctaactaggtaaaataattacgtatttaaaataattgcgcatttaatattctatactttacagtccaataataccaatcgattctctcggtgtatgaatgcatgagtgtttcaggaggtgcttaccatttggccctgttgtcaggatgtggttggcagtggatgggtattggcacaggtagttgttttaatgaccgaacggttgagtcaaggcagcgcggtaacgagaaagaaattgatttcgtgtcagaggattcgagcggtgcacaaataggccactcggtggtggcctccatactcaccaggagcaggagcagcagcagcaccagcagaagcagcaaggcttctgcgactgcggacgctgaaacgtggtcgcgttcgactcctgcagcacgttggacgtggagccgaggattcccacgctgccgcccacggtgggcgatactccgcccaggctgccgccacctccgacgacgcccccgccgccaccgttcccattgccattcccattgttgccactattgttggcggcactttgctgtgaggatgcagtcatgccgcgcaatcgacagccactgggcagctcggaaacggtgcaggacatgccgctacctgcaataaaggaacaaattgaaacgttaatgaacactgtgcacgggatggagtggggggaaagtgtgctgacagttgggcgaatcacagtcacactgcaaaaaatagctctattagtcatctagaaagaattgttaaccaaggtgcccggaacttaactacttaattgtcttggctggtgagtgtttgtctttttggtttggatcccattaatttgacaagatgtcattcaaaagatactgaaactgattcattatattataaatattattataaatattatatttatattataaacattatattcataaatatgttatttgaatctagtcaaaacaccttttaaataaaattgtaatatttgttctttgcatttatcacaaagaaactttatatgaaattaaagattaaatagtaaagaaaactgttgaattattaaaacattgattgtttgtatatttaatttaccaaaactatcaaaatataataaatacatattcgggaaagtgtaatctggaggagtaggtccaactgctcccgattcgcctcgttttccgtgtgcacttacctgccctttgaaagttgaggttgacgctggcggagctgacggagatggtggaggtggagatggtgatgggtgttgggtggtgaggtggtgctgccccagctggcggaccgcccactgccactgacctacccactcacccgctcgctttggtgctcttttctttgcttcggcttctctttctcggcttccttggggatgtggggtatgcagggagaccgttacgtatttatgtttttgctaataattttttatcgaaagttcccacacactctctctctctctctctctctccctgtggcgctctgtcctctctttctcgctctgcccacagctgctgctcttgattttagttttcgttttgttttatgttttttttccttctccttagcttttccttgggcgattttacaagccgaaaaattcc

SEQ ID NO: 10427 - DNA, 1175 bp, DROSOPHILA
atgtcctgcaccgtttccgagctgcccagtggctgtcgattgcgcggcatgactgcatcctcacagcaaagtgccgccaacaatagtggcaacaatgggaatggcaatgggaacggtggcggcgggggcgtcgtcggaggtggcggcagcctgggcggagtatcgcccaccgtgggcggcagcgtgggaatcctcggctccacgtccaacgtgctgcaggagtcgaacgcgaccacgtttcagcgtccgcagtcgcagaagccttgctgcttctgctggtgctgctgctgctcctgctcctgtctggccatcaagaatgccgatgaaaatgcccccacgaagcgagatctggtaaatgccgaattcttggatggcgagcaacccacactggaggaaatccgcagctggggcaaaagctttgacaagctgatgaaaagtacagctggtcgaaaggtgttccagaacttcctgcgcagcgaattcagtgaggagaacatcctattctggctggcctgcgaggatctcaagaaggagaatagcccagagttggtggaggagaaggcgcgcctcatctacgaggactacatctcgatcctgtcgcccagggaggtgtcgctggactccagggtccgcgagattgtcaaccggaacatgatcgagcccacgacgcacaccttcgacgaagctcaaatccagatctacacactgatgcacagagactcatatccgagattcctaaactctcaaaagttcaagacactagctcaactgcaagacaactcgaatgccggttccaaagcggatagtccaacttagagaggatggcttgatgtcccggatcggatttggatttggatttggatcgaattcagttgcgctgtgttgacttccgctgttgctctccactggtatatctctgattttccgccccaatcgctgctgcaatcgactaagcaatatgtatccattagtagaaccatttaaccattttgcgagcagccacgaaatcaggatcctggttggggccggtgaatcagacgtcgtgcgttcaatgtgaatcggattcctttctcttcctacgttctagtcgttagctaaccaaagagttaggtattacaaaatatgttttcactaagaagcaggttcgaccacagaaagcattttccaaaacaacc

SEQ ID NO: 10428 - protein, 271 aa, DROSOPHILA
MSCTVSELPSGCRLRGMTASSQQSAANNSGNNGNGNGNGGGGGVVGGGGSLGGVSPTVGGSVGILGSTSNVLQESNATTFQRPQSQKPCCFCWCCCCSCSCLAIKNADENAPTKRDLVNAEFLDGEQPTLEEIRSWGKSFDKLMKSTAGRKVFQNFLRSEFSEENILFWLACEDLKKENSPELVEEKARLIYEDYISILSPREVSLDSRVREIVNRNMIEPTTHTFDEAQIQIYTLMHRDSYPRFLNSQKFKTLAQLQDNSNAGSKADSPT

SEQ ID NO: 10429 - DNA, 17694 bp, DROSOPHILA
attatcggtatgattttttttgtagttttttgcttgtgtttcggcttttttcatatacatatacataaattgaattttgtatatttcaaattttgtctcccgacgtatataattccgctccttctgctttttgttttatataaattgaaaacttaattgtaaatgtaaaaatgttaaaactacattcaattataaataatgttggtttttctcttgtcgtattatttatatgcaatgttcgctcgttacgtaataatatttataattaatattaattaattagcatagtttacgttacgtttatgtaatttttaaagcaataacaagccatttaatttaatttcatttatcctcctcactaatcattgctgaattaatcggttttgtgtttttgtcttttcaaatttctattttttttttttcgtatagttttggatgtactaattcatgcagactgcttcatcgtcgacgagtcgcgacaataaattcactcgatcctctatctcaatttgcaaaattgtggaattctcctcgactttgggctttctccttgcgcgtttttaaattatttcacaaaattgtacaatctcgcagaaggagagagataagtggagacaacaaccgacaccgggccctctcaacctgtgacctataattgcacctgaataaatgtgatggatgccatttagtttagttaccccattgcgtaatgtcaatattttaatgttagttaactgacgctccttgtgtctcgtggttgtttggatgtgttgtgggcttctgctgtttatgcatttgtaacatatataaaaaatatgaatataactatttgctaaaaacctctaagatgtacgccatgttaaagcatttagcaatcgcaaagaagaggatcctcgccgatcctgacagctcctgccagttaccgtcagatcacagcacatatacatatgtacgcagctgctgtctccaagcttccacaccggtcgccatacgcatttaattacaaaaagggtatcaagcgcgccatcctgagcgcgttctccagaaaggagctccacaagtcattcaggcgcttcgagcgcgacattaaaaagcgccaggtgagcagcaccgccaccagtttggtcagctgatgcagatagtagagcctaaggtagaaattaggatattttgttacttacttttctgaataacctccccttttcaaccagttaattatatattttctcacctgagcatgcgttttctgctggccggcagcgattcgggtcgctgcttgaacaggaactccctgaagcccagaacgtagcgctccacatacttgtcccagttaatgtggcgcacgtcgaagacgaagatctcgcgatccttgggacttagcgtgtgcagcagggcgtgtacgttgtcgtccttgaagcgccattggcgtgtggcaaagtactcgaggcattccacagctttggcaattttattttgtacgttgacaacgctgtaatatgcatatacatatataaaatgttattaatggtagtagtagtagtagtgggggagtagtgggccggccgaacttacaatggcttcttgcccatgattctggccactccgtccagtatgtaggccggtaaaaagtgcttggctatacaattcagcgtgttcatgggtcggttcatgcgcaggtcgccagtcggataccacaggcagccctctggggaaagcaaaaggcaaaaacagaaaacaatttccgtataattataatggtcacattaggcgaatgttatccgtgctcacccaggggatgcttgcgcacactcgtcatggcgtgtttgacaaactccgaccagatgatgggattgcgctggccggtgcaacaattgtagatgagtaggttatttgacttgcgggtcgctgtgcgccaggcggcggcgatcatcaggttaatcacaatatcgacaggtaccatatcggccacatagttcttttcgcacatcatcgtgcggaacatgcccttggccagcgccgaaaccaggcccgttggcccattgaagttgtccacccaaccggcaaacggctcattcagactggcagtcactgcataacaatttaagaatatcaaattattggatctatatatgtatataaactgattgctccactcaccaatcgatggcctcacaatggcaacgggcagattaccagcctccttaagtaacatatgctccgctaaggcttttgtaaacgtgtacgtattgggacgcttgccaatcaggcgcggtgtaagcttaaatatataaaatgcaattcaattattaaataatacatatataattacacagagtaaccgacctgatcgagtatatcctccggaagccagttgattagtgaaatgatatcatcgggattgtagggcggtgcgtagataacctcggacacatcggttctatcgcaattgcaataggcagtggatacatggattagtgcctgtaaaaaagggttaattgatttagaaatcgcaccgtagccgttttctatatatctcccagtcttacgtccagtgacagcatgcgatggcagagctcgacgaggcgtttcgtgcccagcatattgattgtgactgacagtttgagcttctcatcgaatttcactgtggcagccgagtgaaagacaacggaaacattgcgacacagtaggttctaaaaacggacagaatctctatgaaagcgcattcaatttaaactgcgaagagactacgcacctgatctttttctgaaatacccagttcctcggaagttatgtcgcccgaaatgggtatgactttactgagttccttgggcttctcctgacgcagtgattcgaagagctaagtaatatatgcaacatataaattcaatgtattagaactcctccagaactcctctactcactggtgcattcagtagttccgtgagtcgtgctgacacttcttgaccgcgtttcggtcgtatcagtagatagatattccttatttccggacatgagcgcagcaacttctccaccagtacctgcaaaagcgtacatacatcagaaatcgaataattaatagcccctcagtcattgaatatagccattaaccatttaaacgattattgttacacccacaaggacacacttgacccacttcagtggtgtctgcggtttggctttacttgactccagttggtcgtgggcccagggaatgggaaccccgccccaaaaacgatgtgagaattgtactggaatcaagcgacagcagaccggggcagacaaaaggggtagtgggtgggatctgtggctcgttaagtgggtggtttggtgggtggtgggcgtgccaggagcacaaaatcgatgaacaacacacagcaccactgcgagctcagagtctgggcggcgccactgcgatttcatgtcataatgacgcagccaggagccaccgacatgcaatatttacagaggaaaaaattcgggaccacgatctttcattcgcatactgacatgaaaaatataaaaatataaatattccaagctaactacctttaccttcttacgttttacaattgcgattttaagaaattctgttaaccaactacgcatccattttctctccgtgcatatgtttaacaatagctggcacaaaaaattggcacaacagccggaggatatattcggaacagtgaaacgggtattccgctgcaccactttaagaacaattaagtggaacttggagtaggaaaaccagacccaccagatgcatagacgcaaatgcatactcgcattatgaagctttcgcatggcaggcgacgatgagtcaacatcgtctagtgcagccagctcaacgtaactcaagcattacggctttaaaaatcaaatattaaaaaaaaaaaaacaagcaaaccaagttaagcttacacgcacatagcacgcaaacagctaatacaaaaagtgcatctaaaattcagggtggctaaccatcgaaaccacccacccagcactccattccacttcactcgattccacgacttttttgtttatcagcgcgcacacaaatatttgtgcatattttatgactgagaaacacatgaagttttcaatcgagcccaaccaggccatcgtcggggttcaatagttcaattcggagtcaataaacacgaggcgtatgcgtgacatgaatgaaagtggctagccaatggcccacaaaagtatgcaatgaaagtgggcgtgtggggtttttggtcataaaaatggaataatggagtaaacggtgggttacttgggccgaaaacttcacatgtattggcgaaaataatatgaaaatgccatgcttacaaggttaagttatctcaaccaatttacatttaataaatcacaaagataatttaccaatttaaaactatttactctgacgcatgaaattacattcaattttaactaaaacatttaaatggcgattacacaacctaaattgtcttcaatctaagaaatgatttaatgagatgaatacggtaatcatccgcaaattagaaatgctagttatgtgcactttcgtgcttatttaataatccgtacttaactaatcagatatcttaacagaaatttattgaatttcccgattcaccagattgtttcctacgtttaaaaatggctgatatttcagaactcacctttcccataaatccagttccgcctgtgatgaagacactacgtcccgcataaaactgggcgatgggcacgtagctggtgtcgtccgcccggaaacgctcgtagggcatctgaaggccgttgctgctgggcggcaagggcagggccgtcgaggacgccacccccgccgctatggataaggacgcggatgaggtgggtccgccggagcccgcattggatccggccgcactcgagctgccgtagctgccggaggaggaggtggccacgctggcggcatgggttagtccgttggttcgggccaaggtgccgttgagcagcttggcatcgtgactgtttgcgggctggggggctgcggactgtttgaggctgctgtttggcgctgcttccgtttccgttttgttggctaccgcgtgtgacatgttcgattgttgtctgtgtgttttgtctgtgtgtgtgtgttttctcttctttatcctttttttgtgtgctattatcctgcggttcagagcctgcgcttaagttaaagtaggaagcagttctttgtcatttgcagtgtgcgttcaagtttccaagggcggtaaatcccttatattccttcttgccgtctaataggtatattttcggtttggaagtaattactctgattttccctatttggaagctgctgaattgttcataaaaatttattcaattaagtccttcgaaaagctagttgaaaatccttctgtcgccgttgagcgcctgtccatgtttccatgagtcgcttgtcctggaggttgctttcggttggttttgtacaaaaagtgttcagcaggtgtatcctgtgggttgggtgggggtgaacaagaccgatttcttacaacttccaaggtttagtgctcttctgaactgtaagacaaaccgaaacaaatataacatgttaattgaaggtgttcattatttaaatgcttttcagtttatgcactttctaacaaaatgaatagttttaaattgcttaataaaaaaatagtccttattgttaactaaagcattcattcattcattcacacagacaattttaattcaattattgccggtcgataatcctttaatgattttttttgttatccgtgctcatacgtgtatccattgacacaatcattaaccctcttcatttccttttagcttctttttacccaatgagctactaacaacaaaaccaaatcaaagtgctagcaataatccattcagcctaccatccattcacccatcaaattatatatccatctatcttctatcaaaacgtcatttatccttgggactgggctaaaattagcaatcattttgagccgcatctgattggcaacctaaatccgagctatgacgtctaagggcttggcaatcggccatcacgaaaaaggatatgcaaatgacgtcgaaggatgtgtgtaagagaacactctacaaccaccgagatctcgaataaagtttatccaatggcccgcaattgaatttaacgcacaatagagctaagaaaacgaaatccgcttaatgcttaaatcggcttacaaggcgacaactgaaaacggaaagcggaaaaccgagaactgagaactgaagacccgtcgaaacgaaccgaggagacgatactgtcgatagcagtgacagttggcgaatgcccactatatgtctgggaacacttcattctatattaaacgatttttacatgagccgagtggagctgcgcttagctgcgctgagctgagccgagagattctattgctatatggcgacccgcatgatcaagtgccacttaagtgtgtttcacacgtcacaatatctccgcaggtccaaagtagccgccctgcgtctacagccccctaaaccactcgagccaccaacacggggagactcattaattggtgaaagattgggtgtatttgggttggtgggtggtggcggtggttcccaggaaatacttataaacctaaataggtattattaaccttcgcgtaaaaaggggcagcacacttagccaatccaaacaaacggttcggttctaccgacgtagttcctggctgtagggggttgtaaaaaaatccctaatgaatttgtcaacaagcgcgggtaacaagtgaatcaacagggctctggctaaaaggaaaaaaaaacatatcaaataaacaacaaatcgtatttgtttcgccgctaaaaatcgcagtatttggttggccgggaagggtttgaccttcgaacccactgccatatcagaaagtataccccattctgcgatataattcgccaaatgccttgctaattgaatttcaaatttattgttgaccaaatattgatcataaccaggaagcagggggagtgtgagtgtgtatctttgtatctggctagattgattggtagttggatatacttatggggtgtgacgtcattctgcgttaatagtcacgttgatgatgatgttggcttaaagcgtggcgtcgtctcttgaacgaattttttttttcggggttcaaactacgtctgcccatgactttcactttttatttttcgaatcttttgtaggtctcctctgatttttttttcttcttctttttcaaatatctaaattccgcaatattttttttccatccatgtatttaaatttgtttttgttgttgtcggtgttttttttttctggttaaactttcgttttcaattttttagtttgtaccaaaatctaccgccacagatggctggcactatttatattttttcggtcatttgcatttgagggtttctttcgcggatttcggccctgttgctggttaccccatgtggccaagaaatgtgttaagaaattggcacattggttgtttgtctttcgatcgggcattatcgtgtgcggcgatgttatcaaatcgcagagggccggccatatccgctgaactagttgtgttgcggctctataattaaagtttaaaccactttgagacgcggcaatcacggcggcctcatcacgtaactgtaaatttatcaatgaagcctcgagacgctgagacctggccaacttcgccgactggttcctcttcattctaaagtgaaatttcttgaaaatcaactttttctcgccctctcccctgctcaccctcctcctcctcctcctcctgcttccctgctgtcttaccaactgcaacgaaaatttgcgcgccagcgacaagaggcaaatgaaccgacgaccatcgaaccatcgctttggcccggccacgcccctgccccaccgccgctccacacacccgaccgccttacgcctcccgcctcccgcccaccgccccacggagcgtgttaaccaaacatgaagaccgaaatgtatctgcgtgtgtgctgttaaacggtaaacattcaacattcaacctgccttgacaaggtagttacacaccagtcttcgctgcccgtgtattgtctgacccatttcctataatcgtgccgcattatcatcatcagcaacctcgtcatcgtcatcagcatcgacttgccggacatttggaagcgaccgcttcacaaattgtaccctacccccataccctaccctttggggctgaccagggatagctgaccatatgaagacagctaataaaatagtgaagtataatataggaaagaattcctaaagtgtttttataaagagaacttaaatgaagtttcgaaaagtattatattaccaaaaaaacgttaaaaacttaggtaaatctataaaattaaatagttcagcaaataatcaattatcattgcccgcaattaattaggatccaatgagctaatcaccgatgacaaatatctataatgattacaaaaaacaactcattctgtttacagattagcaactcatttgacctttaacacacttataacgtgcgaaaacaagtgttgttcaatttgagggcgtcttgttaaccgcctactactaattacgtgaaacactttgagaatcttcgatttcacttgtcgtgataggaacttcctcaagggtatttcgtgtttcgaccacaaccacggtaatgatgtgccttctcccatggtcgaagacccgtctttagccgcgtttcttctttgctctttcctacactgtctcctctcttcgggccctgctatttcctcatttggagcttgttgctttcggattacgagtctttagcactcagaccttcgccatatataacatatatatataaacttacagccgcatcgaatgcttccgcatgcagactatcgtctataggatggccgctaagatatagtcgtacgaaccgcgcgattctgaggtgtatttgtatcccttgacgatggtgtcaacctgtttgttttggcaatttggtagcttgtctcgttttcggatgggtttctttcgcctcggaccacatcgaatcgaactgaattgaccacaaacgaaagttcaaatatgcattttcacttttcaacaatgggaggcccctcattatgtaaacccagtagacctcgagccacggcggatgctggacagatgtgtggatatatggatgtatggacccatttgtgtgtgagtgcgcataatgggtctgtgccctctattctattgaacctttgagtgaggctctggaattgtggcctgtccggttgccactggccggtggtggtcgactatgtctgctcttatggttatcgtaagctatctatgctttgtgtgtaattgaataaatctgtagggggttggatagaatggatctcggatctgtctccctcccactgcccataattcgtgtggcttgattaacaaacaaaagcgatctcgcagtttacagcataaaagttaaatttaactgtgtatataatgggggctcccccgccccacacctgtcggtggtacccccccattcggaggtagtcagcagattagctacccaatttaaaagctcggcctccatcccgctcgcacccatacgcgctcgctagatattaaataattcacaattttaatatacagttcatcgtatttttagtccggtcacatgagctaagacgaaatgtctactggcttaattaaaacattcttttagtcgggctgtaattaaaagtggtcgcagtcggccaatttgaataatcaaaaacaatttgggctttgcaattctaagatgaagatttatgaacaactagaccttaagataagacccatttttttaaagctgtaaattatgaaactgggtccattcacatgcgagttcaaggcttccaggctacaaaatgcatatcaattagatgacaacttagtagataatccaaagtgcaattagaagggtacacgtgccatgtgttaggtgttaacctctcaaaactaatgcgaatgtttaaactagatcgtaacaacaaaaaaatcagctttatagctaataagcctgggcactttttatttacatatatataatataatatatgccaaatagcaacaagtctgggtgtacttatctaaaaatgtaagattcatgtgcatatagcaacttgtgctaatctcttaagaatttcttgacttgttgaagaaatacgagaaatttaacctattggcaatacctattggtaaatataccaggtaaacaatgacagggttgacataatatgggtatttccgggcatcatttacagagaaatacaatatctgtgataaacgaagtcgtcaaaattaagaggtttcgaggaagattcctcagtttcccaccaaaataaatatctcgcaacgagttttacgtcacaggcccgcgaaagtgtgagctcaataaacaaccgatctgaatgccaagtggctggtttaatggctccgtaacccattttgagtatgaccattagcccggtggtcaagtagaatgaatctagcccaaagttgcgaaagtgaaaaagaaattcgaggtggcactctggtaggccagtcacgtaatcaatagaaatatgtcaccttctcgaagtcgaagatacgactgtcgatactgtaaaataccgatactatatgccagtgctattggctatatataaacgttttcgaccaggccgtattgactgtggcaacaatttcggctgagctcagcgcttgctgtcgatgcatttgcgcatgcgtccactcatttcacttcgctccattccactcccagccagaaatgtgggtcaagtcaatgtgggttcgcaattatgacacattgtccgcgtccgagagacagatatttagcccacaaaaagcagaaatcggtgtaatgatatttgtaaatgtaaaaattaaataaacaatcgaccgaacgctgccccactcattttactgctgtgtttttggagggcttttcggctatttggttttttatttcggtttttggtttttcttttttgcaacctgagatgtagtatctttgtcgcactaagtgtgtgtgtgtgtgtatgtggccatgatccatgtttatttattatgctccatcgtctttctgctgtcgttatcgttttcattttcgttttcgttgtcgctaatcgttgtctcgtctgtgtgcaaattttatttgtaaatatgcaatgattaatattacaaatatacagcaacaaaaatttcgaaaatattagttgcgtcttgaaactttctcgcagcaacaacctgcatattactacaggcaaacttctataaactgaacctccacgtgactggtaatttataatcttgtcggtttttgaacttatggagttcgagaaaccatgacccataaatcaattaactgtaagtcatttaataaagtgatggaattgaaacagtcttgagataaatgccttctaacgtattgatatacagaatagaatgcagaatacaatagaatagaatagaatacaatagaatttgtttggtatatataagaaccgcatcttaatttgggcgccaatttgaaattgggtcattgcctgagaatatctttacactttttaaaaaacagtgttatgaaacgactaagccccgcgcgatttattttcgaagcagcactgtaattgaacgttttaacgtgggtcaaatattagctaaaactgaaattgcataatccgaccaaaaaggaaacagctcaaatatttgtgggccaagcctggcttgcacttacttgtcaggcaaacataaagccgatgctattggctctaatcgaagtcgctgaagatgctgcagccgcaagtcgtgtttgcattgactggatttgatttttcccactttgtttttccgagaagccccgaatttaggtcattgacattggggacttgcgaattcgtttgttatggtttccggttttgcggaacttttgacacttgcgatgtttttgcgggccgttcgatcgcgttgaaaaaaactgagaacgacagaacggaaaaactattttgatagacaattctttatttcgttgttgacactactggcaaggcaagatacgatgataccgataactatgcccactcctgacacactaaaaaactcgagaccagaaattctgcttcttctgttgctgctgcttcttcttcttcggttgcccccaagaaatttctccaaatattttcacttttgcgagagagtgcgaagagaggaaagacgaagaatgaccgttgcgcaggcgcaaagaaatcaagcgacggagagagggagagcgcgtgagagttgaccgttctttgctcgctttcttaacttttttaactgcttttctttaccatatactatatgttcacacacatatatgtacatatatatatatatatatatacaaagtgtgatctttagcgacgcgtccgcttcgtcggccgtttggaactgaactaaacttggccctcaaagaagtgaaagatttatgcagtcggctccaaagctgcgctgccaagaaaggcgaacaaaagaaagcagcgcgaagagagagcggcgcggacacgtagatttcggttgcgagatttgtgatgccatatgtatttgagatcgccagaagagagcgaaaaagagagcaacgtcgactgaggcagcatgcaacaagctttaattgaaaaagccgcaaaagaacggtgtgtgtggaaaacaagtcgtggaaaacggaaaaccggaggagaaagagaagaaattggatatgtggtcaggcactgacattgaccactcacacagacgccggcagcgacgttggcagagccaaaagaggtcaaagtacacttcagcagtatcaggtatctgccactgctttcgtgtgcgtgtgcatgcataatcttgcacttgccaccaggtaacagttaacacaaaaacataaccacgcaccaacggccaaattgaccaaaaaaaaactttcgtgtctaattgaaaggcgcgtcacacttgcggttgaaaaaagggtaaacgagggggcggggaggtgattaattcaccacagttaacggcaagaactaatcgactacactggaaaacaagtgttaggcaattctaaagtgttcctagaaaatgccattaacccgtgcacaagttttcaaaattgaattgaatcaaattttaaaatgttcttacaatcctatataataacactaaattcattatttatgtattaataatttaaaaaatatgatagtgctctgaatttctttgctaggtactagaatcaataatcagttataaaagatgaggttggaacagcttttcactgattgaagggtagtataatgaagtaattgaaattgtagtgattaatattcaactatgctttatcagttaattttaactaccaaatatgtagtataggtaattagttaatatgtagcttaatatgagtttaacgactttgacaaaaaagacaatatttgaaggttaagtactttcattaccaattaccaaggaacatttgcacttagggattggcgtagctactttcattcatatttaacagtcagccctactattttgctcattgaaagctaagagagtccatgcaaacaaacactttaaaaaatagctccacaatgaatcacttagtgagaaaaatatcaccgatttacgtacgtcatcaataccttttagagaaatagcgagcttaggtgtaatatatattcaaaattttaaaaatatatgtttaagatgcttacatagacgccgagtgtttacaactacatgactatgtcaaacaaaagtgtttgttttctacattatagggcgcacggaaatgattttttggtttgcggtgggtgtgtttcgtagatttgactgccacgtgcccccaaaatccctctaagtgcattggcaaacatttgagtttttaattgattttgcacacacttctcacattttgcgagctctgttcaagcaccatcccaaaaataagccaactaaaagcggaaactactctcaaaatcgaagatttctcacacttacccacattttttttgccgtgcaaaagccaagcaaaagttttggccaacccatggaatttcttttgcagaagatgaaaagggaaaatgggaatggctggaagcgaagaggctgggcggaaaaccaatcgattgcctacttttaggccgagctaataaattctcatctgaccggaaatgggccagcataaaacaaaactttcgtcagtgacaggcaatagtcacattaaaaggggaatttccgcaaaattgtattaatggaaaattctgaataattaatggcccataaaagtttttatgtttcccatttaaattttgtatagcttattgtaaaagttatagatcattaatattgcggcttaatgtccatgtacataaataaactattttgatttcagataatttaattcagatatttaaattttttgatattgtattcactcaaataccacactttggaggcttaatgtatgtacagcccaggcagccagcaccccttatcaagtgctttgttcatttttatattttttttaattacacaaagttacggcattagatggcgccctgttgacaggacctgctcattctcatgctcgtcctcgtcctttttatttttccattttctcggctgtgaaatggcaaacactcacacacatggtcaaaggggagcgggacttggggtggaatagtaaaatcgagggggaggtagacaacaaaacggggaaaatgacataatgcacttgaaatgttatcgccttgctgtcgagtgcaataatacactcgcacactcgcacacacactagcacacactggtcggaaaaattcggattaaatacagattatttatgagacccattaatgggcaggttgtcagcagctctattcatcttggggcatactttcgggccgagcacacaccaacaccccttctgaatttccccaaaaagttttccgggcgcgatgccactactcacacatcgtttcttttttatgcaatatcagctcagtctttggaactttttctgcacttttcacgttttttaggaaacattttcaacgttttgggaataatgtaagcgttatctgaattttatttaattttctttgagatatatgatgaaactttcgggggaaatactcgcgacgaccgccttgaaaatcaattggaaaatgcctgtttcatttttttcctgccaagctccccaagattatttcacgcgcctgctctcgtttcgagagagatttgtggcgaagtctcaagagaagaaattggtgtcccggagaagagagaaattcactctttggctaccattttctgctactattttcctgggcgtctgccggcttttccggggggttgttggttgcttatataatggctaaccagctgactcaacagctctattggttttccgataagatagggctttatctgtcggctctatcagttcaattttagggctgcatacaacggtggttaattaagtaattatctaggaaaactcgttgcaatattaggcatagtttcaggctgaatgtctgttttccgcgcatcaaaactcagcaacactggcttttcattagctcttcgctggctttctcctgacacgttctctttccggaaagctggtctgctctttggcggaaacgtgaaacggaaatgtcagattttctgctaaattttttacaaccatcgacgccaaaaagcagcgacattctccggatgagataataaacccagcgacatacatttttttatagggagcaagggggtccccaaaggcaggggctgctgctaaaagggggctaaaaataaacggcgagcaaaaaaaatgggacacgaaaatatgctcaaactaggccacaaaaattgtctaaaaataaaggaggaaatgaaaatgaggtcttttgggttcgggaaagaccccagtttttttttttttcgttttcagggcgtgtacgtaccggctccaaaacgaaagtgaggttaggaacgtgtgcggatgctgcggctatttgaactgaactggatttatccgggatggctgggaaattcctatttgctggctgtaattatttgtttgctatttggcatcacactcacacacacacgttaccaggcatttcgcgtcgcgattgcttcctttttctaacaaataactattttatttttccctttgaacagccttatgtcgtttagtgggggaaatgtaccgtttccttcggcggaaagaagagagcagcactgctcgaaatgcgaaatgtgactgaggcagaaagaagaagcttctggcgaccgagccgcctgcgattctcaccattaatgccgctctctctcacctctcactatgctttctcctttctccaccctctgcggtaacggttgttctccctttttttcggtggtgcgttaacggcaatacaaacacgctctctttcgctttctgggggctgatattgctatgatttttccaccaccttggccgttttttctattgaatgaaatccactttggtctagttcttcttcctttccactcctgtgcttcttcttgccgcttttcctgcgcctgcgttggacaactaaaataggcgattgttgggcagcaaacacagaaactgatttcttgcactttcgcacatttctgccgcacaaatattcaacgaggcactcaaatcactgcttgctgcgatttcaaacaaccgccagtgctgccaccctgctgctaaagtaacgttgccattgcgcgggaagttcaaacaaaaccattggagcatgtaaactggttgaaacctacttccttttaatacattagagtggatgggaattaaaagaaatcaataaacaatttcaggttacgcaagtcatatttatttttattttcttgaacattaatcgtatatcgtatatcaattaaacgttttcacaatttcacaaaaagagttaacattttcatttaatttattgctgttaattattgtatgaaagctatgtttttcccacatttatctaagaatatatttgattacagatctctattttataggaatcttgatgtcacaaccttcggcaaaccaaatatttggacaataagcaaggtcgccagccgattgcagtgcacgcaacataaatgtgaaaatcaaaacataaaggagacaaaaacaaaccaaaaatgcattgtcatttggggacggcggggccttaagttgtcggatatatgggtaaaggggtgtgggctgatgactgccctgccactctgcatattaatcaactttaaaatacattaagataaatgaatagggaaacattcaggtggaaatgttcaatgctcttaagggggaaataattgatatatcacgaaaactataaatgaaaacggttaatacgtgcatctaagtcataatactaaattaattaacacatctaataacccataccgtgtgaaattaacttattattaaaaatgttttaaaaattatatttaacttatgaaaataaataagaagtaaagaaaaatttgcataatatctgattataatggttttaagatgttttcttcaaaaaaaatccaattaaaatgttgtaagcagcttgaagcttctcggatatcccaaatccattattatttta

SEQ ID NO: 10430 - DNA, 2637 bp, DROSOPHILA
gcaagaaatcagtttctgtgtttgctgcccaacaatcgcctattttagttgtccaacgcaggcgcaggaaaagcggcaagaagaagcacaggagtggaaaggaagaagaactagaccaaagtggatttcattcaatagaaaaaacggccaaggtggtggaaaaatcatagcaatatcagcccccagaaagcgaaagagagcgtgtttgtattgccgttaacgcaccaccgaaaaaaagggagaacaaccgttaccgcagagggtggagaaaggagaaagcatagtgagagttcagaagagcactaaaccttggaagttgtaagaaatcggtcttgttcacccccacccaacccacaggatacacctgctgaacactttttgtacaaaaccaaccgaaagcaacctccaggacaagcgactcatggaaacatggacaggcgctcaacggcgacagaaggattttcaactagcttttcgaaggacttaattgaataaatttttatgaacaattcagcagcttccaaatagggaaaatcagagtaattacttccaaaccgaaaatatacctattagacggcaagaaggaatataagggatttaccgcccttggaaacttgaacgcacactgcaaatgacaaagaactgcttcctactttaacttaagcgcaggctctgaaccgcaggataatagcacacaaaaaaaggataaagaagagaaaacacacacacacagacaaaacacacagacaacaatcgaacatgtcacacgcggtagccaacaaaacggaaacggaagcagcgccaaacagcagcctcaaacagtccgcagccccccagcccgcaaacagtcacgatgccaagctgctcaacggcaccttggcccgaaccaacggactaacccatgccgccagcgtggccacctcctcctccggcagctacggcagctcgagtgcggccggatccaatgcgggctccggcggacccacctcatccgcgtccttatccatagcggcgggggtggcgtcctcgacggccctgcccttgccgcccagcagcaacggccttcagatgccctacgagcgtttccgggcggacgacaccagctacgtgcccatcgcccagttttatgcgggacgtagtgtcttcatcacaggcggaactggatttatgggaaaggtactggtggagaagttgctgcgctcatgtccggaaataaggaatatctatctactgatacgaccgaaacgcggtcaagaagtgtcagcacgactcacggaactactgaatgcaccactcttcgaatcactgcgtcaggagaagcccaaggaactcagtaaagtcatacccatttcgggcgacataacttccgaggaactgggtatttcagaaaaagatcagaacctactgtgtcgcaatgtttccgttgtctttcactcggctgccacagtgaaattcgatgagaagctcaaactgtcagtcacaatcaatatgctgggcacgaaacgcctcgtcgagctctgccatcgcatgctgtcactggacgcactaatccatgtatccactgcctattgcaattgcgatagaaccgatgtgtccgaggttatctacgcaccgccctacaatcccgatgatatcatttcactaatcaactggcttccggaggatatactcgatcagcttacaccgcgcctgattggcaagcgtcccaatacgtacacgtttacaaaagccttagcggagcatatgttacttaaggaggctggtaatctgcccgttgccattgtgaggccatcgattgtgactgccagtctgaatgagccgtttgccggttgggtggacaacttcaatgggccaacgggcctggtttcggcgctggccaagggcatgttccgcacgatgatgtgcgaaaagaactatgtggccgatatggtacctgtcgatattgtgattaacctgatgatcgccgccgcctggcgcacagcgacccgcaagtcaaataacctactcatctacaattgttgcaccggccagcgcaatcccatcatctggtcggagtttgtcaaacacgccatgacgagtgtgcgcaagcatcccctggagggctgcctgtggtatccgactggcgacctgcgcatgaaccgacccatgaacacgctgaattgtatagccaagcactttttaccggcctacatactggacggagtggccagaatcatgggcaagaagccattcgttgtcaacgtacaaaataaaattgccaaagctgtggaatgcctcgagtactttgccacacgccaatggcgcttcaaggacgacaacgtacacgccctgctgcacacgctaagtcccaaggatcgcgagatcttcgtcttcgacgtgcgccacattaactgggacaagtatgtggagcgctacgttctgggcttcagggagttcctgttcaagcagcgacccgaatcgctgccggccagcagaaaacgcatgctcaggctctactatctgcatcagctgaccaaactggtggcggtgctgctcacctggcgctttttaatgtcgcgctcgaagcgcctgaatgacttgtggagctcctttctggagaacgcgctcaggatggcgcgcttgataccctttttgtaa

SEQ ID NO: 10431 - protein, 625 aa, DROSOPHILA
MSHAVANKTETEAAPNSSLKQSAAPQPANSHDAKLLNGTLARTNGLTHAASVATSSSGSYGSSSAAGSNAGSGGPTSSASLSIAAGVASSTALPLPPSSNGLQMPYERFRADDTSYVPIAQFYAGRSVFITGGTGFMGKVLVEKLLRSCPEIRNIYLLIRPKRGQEVSARLTELLNAPLFESLRQEKPKELSKVIPISGDITSEELGISEKDQNLLCRNVSVVFHSAATVKFDEKLKLSVTINMLGTKRLVELCHRMLSLDALIHVSTAYCNCDRTDVSEVIYAPPYNPDDIISLINWLPEDILDQLTPRLIGKRPNTYTFTKALAEHMLLKEAGNLPVAIVRPSIVTASLNEPFAGWVDNFNGPTGLVSALAKGMFRTMMCEKNYVADMVPVDIVINLMIAAAWRTATRKSNNLLIYNCCTGQRNPIIWSEFVKHAMTSVRKHPLEGCLWYPTGDLRMNRPMNTLNCIAKHFLPAYILDGVARIMGKKPFVVNVQNKIAKAVECLEYFATRQWRFKDDNVHALLHTLSPKDREIFVFDVRHINWDKYVERYVLGFREFLFKQRPESLPASRKRMLRLYYLHQLTKLVAVLLTWRFLMSRSKRLNDLWSSFLENALRMARLIPFL

SEQ ID NO: 10432 - DNA, 3681 bp, DROSOPHILA
ctacactttgagcactttaaatgatattttttttcagctgaatttatttagattaaatattcaatggttttgtatttcgcttttaattggacgttactttttcgaaatcgtatttgttggtcgaatttttcgaggtggattttttgaggaggcgaagaaccgtttgccagcagcgccgaacagttaatgaagccgccgacgccttggccaccacgcagagtagcctttcgcccaccaccccccccctgcattaccgccatcgaaccacccagccaccccaaaaagccaaaaacaacagcgtaccaagttgtcgtagggccgaaagctttttctgcctgcgcacatgccgcccagtggtgggtttttcaacaaaaaaaaaagcttttcgtggtgaactcggttcgaacgcacatttggcgcgaaacgtagcggaaactgtggccccagggaaaatgagccgcaaaatgagaaggcggaagccgctaccgcatcattttccttacaatgtgtgagaaccaaaccggatgtgctaacttagtggtcgggggacctctcagcaggatatcgtttgcctttgaagccaatacttatttgctggaccgaaatttccgctatgacattacaaatgaatggttatatttttagagaaaatcttaatgtaataagtaaatatagattattatttttttcacagtgcatcggaattgaattgactaataagtattttgcaaatatgattatataatgaaaattaggaattttgtttatgtaatatattttctaggcatatccgtaaaacttttgttcaaagcgaaacataaagaacaatatgtatactaactttaagtaggcacatctattgacttcatcagatgcttcgagtgcttctatagcttgaaatcagttttcctattgacttctattcgtcttgagcaatatacaaaagttcttgtcagcttcatcgtttctttacaagttaaaaaattttatttttctcagtatgtttccgaaaagtccacgaattcgccaggtcaaccaggctggtttgaccagaatccctcagaagggatcgcccagaaccctttactccaaatcacttctttctgcacaggcaaagaagcgccgcattttgggacagcggaacttgaagaaggataatgcgtgagtgaagaaatttatgattttcactttttttgcgtttatcagtgtgtaaatcgctattagctcagtagacaaaaacaagcaacagttgcaaaaaatacccgagacgggcctactcacaccctcctcctcggacaactccttgaccaccacagggtctagctctggccaatctagctgttcggctatggcaaagaccagtttgctccgagagcccacctccttgaccccctatttgactctcaagcgtcagcagacctcgacattgattaattttcgggtgcgcaaatcgctttctcaaatggatttcaaggaggcgcgtcgcacgggaaactatcagttggtggcccatgtgggatcgcccagaaagtctgttcagcaaatgtcgcagaaagtcgatggcgatttgggattggaggccaatatggccaagttgctgcttcaggacaatgcactaattgaaggtgagatgagctttgtggttggtccagatcaggatgcccgagtggccagcttgagaatctttaacaccattatgctacacgcttggcgcaggaggcgggaggaggttcgtcagctgaccgatcaggtggaggactacaagaaaagtgtatgatacttaatgtttttaaattgaaaatctctttacttaagtcctgatcctgcagttggttaaaaatcgcaaccaattgcatgtctacaattcgctcttctccgtggagaagcgtcgcaatgaaaccttaaatgatcagcttaggcagtcctatcgcgaaaatgctcagacgaaactctcctacgaggaactaaatgccgtgctggtgcagatcagaaacgaaaaggagaagcttgccgaagaggtggcaaccaaggatcgggatattgagaatctccaggaaatgcagcagcaactgaagagcgaactctttcaggtgcatggccaacagggacagcagcttgaggagttgacccggttgcagcgcgagtaccaggagagccaaaccgctcaggatgaactgctccgccaactgaatctgctccgaatcgaactggcccttaagagtgactttgttgaccagttacgcgacagcttggccaaagtgcaggatctcaagcggggatctgatgagcagttcaggtgaggagagcttatatcctaattggggtttcataattacctaagaatcgaatccattagcaaattgcttgaacaaacgttaaaactagagcaagcgatcgcagaaaaggaggagcaactggttaccctccagaattgcttggccgccaccttgggccaaaggattcgccaatgcttcgcccaaagtcaggcctatcagcatgccacctatcgcatgctgcactttgtagcccactatatgctaccaggtactccgcctccaggaccttcgcttccaggagccgttaacaggctgaagggcttttttgtacgcggctcgcaaaatgaattgaacaatgaagatagttttaaagatctgcaggagggcgacaaaggcaaagattaggaaaaatgcacctaaaagttatttttattttgttgtttattgttcatattttttgtttagacttgcaatttttctttgtgatttatattgctccttaaatcatttttgattgtattgttcgaaatatgaaataaataatatttaataaaaaacataaataatatacatataacatatacatatattacatataatataaaattaaaaacacaattcataccgtttattttattacattacgtaaacgagaagtggactctaacaatggctcgatttttgccatttgtaaaccagttgctattgaatacataatcgccctcgggaagcggtacgtatttagtaaactgttggtttacaaagtgggtgggcagcttatccacaataatgtcgtgctgaaaaatatctcagaaattggttaagatcaatattacttacattcgaaaatgcttactgtatagggacaagaatggttgatgtttgagtagggtttaaataaggcaaagagaaataaaaccatgggatttccgacatttgcgaccatcttgcagccatcaaaggtaaaattttggttaaagggcattagaccatttgatcgcttgtgcaaccccagattcacctaaaagtggtactcatttattaaaatggttggcatacaaaatgtctatatcgcaccgtaaaatgatgtactggtatcttataaagccgaaccttgaccgataggtatttgtaagtgcgattcgtagcctttagaaagcaatattcaaaatcactgaattttttgtccatcgaagtacattttatattggtaaattcgatacgactactttccaccttaaaaacaaaacaattaggcaagcttttgtgcactgttaattgcacttaccaaatgcatttgaaaaaacataaaatatataacacctgctatcgtgatgcactggaaattcatcttagcctacgttccagatttcacaacggcgtcgatacgagttttaggtagaac

SEQ ID NO: 10433 - DNA, 1500 bp, DROSOPHILA
atgtttccgaaaagtccacgaattcgccaggtcaaccaggctggtttgaccagaatccctcagaagggatcgcccagaaccctttactccaaatcacttctttctgcacaggcaaagaagcgccgcattttgggacagcggaacttgaagaaggataatgcctcagtagacaaaaacaagcaacagttgcaaaaaatacccgagacgggcctactcacaccctcctcctcggacaactccttgaccaccacagggtctagctctggccaatctagctgttcggctatggcaaagaccagtttgctccgagagcccacctccttgaccccctatttgactctcaagcgtcagcagacctcgacattgattaattttcgggtgcgcaaatcgctttctcaaatggatttcaaggaggcgcgtcgcacgggaaactatcagttggtggcccatgtgggatcgcccagaaagtctgttcagcaaatgtcgcagaaagtcgatggcgatttgggattggaggccaatatggccaagttgctgcttcaggacaatgcactaattgaaggtgagatgagctttgtggttggtccagatcaggatgcccgagtggccagcttgagaatctttaacaccattatgctacacgcttggcgcaggaggcgggaggaggttcgtcagctgaccgatcaggtggaggactacaagaaaagtttggttaaaaatcgcaaccaattgcatgtctacaattcgctcttctccgtggagaagcgtcgcaatgaaaccttaaatgatcagcttaggcagtcctatcgcgaaaatgctcagacgaaactctcctacgaggaactaaatgccgtgctggtgcagatcagaaacgaaaaggagaagcttgccgaagaggtggcaaccaaggatcgggatattgagaatctccaggaaatgcagcagcaactgaagagcgaactctttcaggtgcatggccaacagggacagcagcttgaggagttgacccggttgcagcgcgagtaccaggagagccaaaccgctcaggatgaactgctccgccaactgaatctgctccgaatcgaactggcccttaagagtgactttgttgaccagttacgcgacagcttggccaaagtgcaggatctcaagcggggatctgatgagcagttcagcaaattgcttgaacaaacgttaaaactagagcaagcgatcgcagaaaaggaggagcaactggttaccctccagaattgcttggccgccaccttgggccaaaggattcgccaatgcttcgcccaaagtcaggcctatcagcatgccacctatcgcatgctgcactttgtagcccactatatgctaccaggtactccgcctccaggaccttcgcttccaggagccgttaacaggctgaagggcttttttgtacgcggctcgcaaaatgaattgaacaatgaagatagttttaaagatctgcaggagggcgacaaaggcaaagattag

SEQ ID NO: 10434 - protein, 499 aa, DROSOPHILA
MFPKSPRIRQVNQAGLTRIPQKGSPRTLYSKSLLSAQAKKRRILGQRNLKKDNASVDKNKQQLQKIPETGLLTPSSSDNSLTTTGSSSGQSSCSAMAKTSLLREPTSLTPYLTLKRQQTSTLINFRVRKSLSQMDFKEARRTGNYQLVAHVGSPRKSVQQMSQKVDGDLGLEANMAKLLLQDNALIEGEMSFVVGPDQDARVASLRIFNTIMLHAWRRRREEVRQLTDQVEDYKKSLVKNRNQLHVYNSLFSVEKRRNETLNDQLRQSYRENAQTKLSYEELNAVLVQIRNEKEKLAEEVATKDRDIENLQEMQQQLKSELFQVHGQQGQQLEELTRLQREYQESQTAQDELLRQLNLLRIELALKSDFVDQLRDSLAKVQDLKRGSDEQFSKLLEQTLKLEQAIAEKEEQLVTLQNCLAATLGQRIRQCFAQSQAYQHATYRMLHFVAHYMLPGTPPPGPSLPGAVNRLKGFFVRGSQNELNNEDSFKDLQEGDKGKD

SEQ ID NO: 10435 - DNA, 2541 bp, DROSOPHILA
ctcccgtgaggttctgtaaacaaggggattttatcgttgccttcctgattttatcacttatgactatacccacttattactatatttatcgggatgcacaatggtctgcaactggcgaaaacttcttgtcaacttctgggactccaaagaaaattgaatgggaaagctgagcagtttaaagtaattctacagaaactaaaagttaaattagccaaataaaatgtagataagtactaactattcctgagttaacatcctgcaagtgtccacagtccgaacatatcatattctgctttaattccgatttcttttggcaattccaacaagccggcgaagattcaactgaaaatttccgtatttctggcaactggaattgattaaattgtgctgcatttctaacaagcggtgtataatttgtagcttttacagcacttttaaagccattaataactctactcattttctacaataaatttaactgaatgatatacacaatcgaagcctttaattacacaagctgataataacaaaaaacagctgatatgaaactaaggtggcaacgctactgctttgcgactatcgagcttaaaactttttaaactatttcatttaactattaaatattgacatttatgacgtttaaatagtcattggtctatttaaaatgtaagaccttaaaaattgttaattgaaattaagtaattaaatatagtataacttattcatagaaacaattcaatttaataaagttcaaataggatagaggttcaatataagcaaaaagaaaaggaaggtaaaaatatacaaattaatgtctttaataagtaacattttatatatatacataagaaaatatcagacaaagagcaggaaagtataccaacatatagtcttaatggatagtgaaacacagagttttatgtacagaagtataaatttattccaacatgtggcttacaatctaaagttcaggtcgcgtgtccttcgagcacgtccttacatggagtccttgcgataagcgcggtagttgttcatctcattgggaaatgttttatacagctccagcagcagattcgttttgaacttcttcaggccctcgatcttgcccttgacctcctcgttcttggccagtgccttctccacgcaatccttggtgtacagctgaggattcttgtcttggtcgatgtagtcaaaaaacacttcaaatggcacatagacgtcctgcacctgggagcgcagcttgtcgatctcttgtaggccggtcaccaagctgttactaatggtgcacatatttatagacatttgatcaaataaattttagcattttcttacattttctggttgagtacattttgaccctgtggctgaaaatcgcttacgattatgcggatctgacgaacattctcgatgaacatctctagctgggtctcaaggttctctagcggtgcagacatttttaacgattcaaattcgttccttattttgtgggtatttcgttaatatgtttgttttccttggcaaatattttatttttcttcgcaactcttcttcttctagaaaacaccgaatgaccagggctactcaaacgcaattttgagcattcggatttacgaataagcaaggaatagcaaggtcacactgttcaatcgcacactttttttgctacaaagagcgtgatttatttttatagaagcaaaaaaagcaataattacttaatttactgccataaatatactgagaataagaacccagaatgtcggatagtgatttggatgccttacgcgcgcagcgcatgtcccaaatgcagtcgcaattcgtaagtgaaatatttgagtggctccaaaccggctagattcctctagagaattccaaaaatagtcataacttggaatgaaagcaaattagactatataaaatataataaaaatgttaagaatacattagcaatggtatgctttgttagttcttatagacaccttccctatgagtcatccttctcgactgggacacctgtttctttaaagggcaatccttcaatgaccttaactccttttttcctatttttagggcggcggcaatgatgcggaaaagcaacaagcccagcaggagcagatgcgcgcccaggaggaaatgaagcactcgatattatcccaagttctggaccagcaggccagggcacgacgtatgtggatctagaccttgaatatctctagctaataacttataaaatatcatttagttaataccctcaaagtcagcaagccggagaaggcgcaaatgttcgagaacatggtcatccgcatggcccagatgggtcaggtgcgtggaaaacttgatgacgcccagttcgtcagcatcctcgaaagcgtcaatgctcagatgccgcagagcaagtcctccgtgaaatacgatcggcggcgggcggccatcgatagcgacgacgacgaggattacggctgctgattcgtccgaaattccgcccaacatctaatttaagttatgcccgctcctcacatccgctaaatcatgtttattactttt

SEQ ID NO: 10436 - DNA, 480 bp, DROSOPHILA
tgcgaagaaaaataaaatatttgccaaggaaaacaaacatattaacgaaatacccacaaaataaggaacgaatttgaatcgttaaaaatgtctgcaccgctagagaaccttgagacccagctagagatgttcatcgagaatgttcgtcagatccgcataatcgtaagcgattttcagccacagggtcaaaatgtactcaaccagaaaatgcttggtgaccggcctacaagagatcgacaagctgcgctcccaggtgcaggacgtctatgtgccatttgaagtgttttttgactacatcgaccaagacaagaatcctcagctgtacaccaaggattgcgtggagaaggcactggccaagaacgaggaggtcaagggcaagatcgagggcctgaagaagttcaaaacgaatctgctgctggagctgtataaaacatttcccaatgagatgaacaactaccgcgcttatcgcaaggactccat

SEQ ID NO: 10437 - protein, 63 aa, DROSOPHILA
MSAPLENLETQLEMFIENVRQIRIIVSDFQPQGQNVLNQKMLGDRPTRDRQAALPGAGRLCAI

SEQ ID NO: 10438 - DNA, 3187 bp, DROSOPHILA
gaccagacaagtgcaagcaatggagctcagcgtcagtatccactgtctcacacacatccacaaaagcatcttcatcagattcagttcctcagatctcgcatcagctgctgcgattcccatggacgtgacacggtggagcggtggagaaaacatcatcataataataataaagccgaataactttctccacacgtagtgtgtgtcaataaatcggttgtttctcgcagagtttgaaaggaaacttttagagttcttaaacaaagaatgtggttttggaaccactgtgccgcatcctgtctgccatgaatgatgcgtcctttcctgccagcacataaagccccggccagttgcatctattccacacactgatagacaatgtttgtgcactgatttatactcagccagctattaaataagaattttcgttattacgctgccggggattttattatgtgactttcaaaagcccccgccaacttgttgtggctttggcttaaagccgcgccaagctgaaaattgttattttaaccttttaaagtcagctttatcagcaccaaatgcagggccattatgcgtggcccacgcggcgtatgagcaacgttaaatctgcgaataattcaaagacgtgcgtttctttttacagccgccttgtcggtaatcccattaaggagttatctggcgaaacatttttgcacaacactcgactggaggcactgtgagtatactttgtttgttttaatttaaaaaatcacaaaatatatcatgaagttgttaaaacgggattgaatttgatttgaatatatgatttcatttaatttctcaccaatatttaagttcgttggccctaatgccgattcacatcagcagcagtttaatggagccactgaatatatcgtttttgaatctcacgggaattcggtatgatcacatcgacttcgaggccatcaattcaatgcgcaacctgacgtacatcatctacgatcgattcttctactgctcaatgacgccgcgggtgagaatgtgcaagccgtccaccgatggagtcagctcctttcaagatcttctgagcaaaccagtgttacgttactccgcctgggtgatggccacgttgacaatagctggaaatgtgctagtcctatggggacgctttatctaccgcgatgagaatgtggctgtgacaatggtgattcggaatctggctctggctgatatgctgatgggcttctatttggtcaccattggagtgcaggactatcgctaccgcaacgagtattacaagtaagtcaaatgtgatggattggcatttgttacgccccaatcttttagggttgtgctggactggataacctcgtggcagtgcacactgattggaacgctggccgtgagctcctcggaggtttcgatgcttatcctggcttttatgtcgctggagcggtttctcttgatcgccgatccctttcgcggccatcgcagcattggaaatcgggtgatgtggctggctttgatttgcatttggattacgggcgtgggcttggctgtggcaccggtgctcctgtggcggaccagtaccctaccctactacggatcctattccggaacctgtgagcacaatgtttatgataaaatgtagtttaccaagtgacgaaattaaacttaacaggctttccattgcacatccacgaggccttcccgatgggctggctttactcggctttcgtgttcctgggcgtcaatctgctgctgctggtgatgattgcgatgctctacacggcactccttatttcgatatggcgaacgaggagcgccactccgctcactctgttggattgcgaattcgctgtgcgattctttttcatcgtgctgaccgacttcctgtgctgggtgcccatcatcgttatgaagatctgggtttttttcaactacaatatctccgatgacatctacgcctggttggtggtctttgtgctgccacttaactcggcggttaatcctctcttgtacaccttcaccacgcccaagtaccgaaatcaaatcttccttcgcggctggaagaagataacttctagaaagcgagcggaggctggcaatggaaatgtggccaccacaacgacgggcacggcaactggatcctctcagcatccggatgacttcacgatctttgccaaagccgcgatgagatgccattaggtcctaacgctgtcgaactgaaggattcttgtggcgcagatcgaacttgtataccaccagatttagcagcatttattttgtctatgatatcgaaaatctatatatgtatgtgaatatctatccctgtccgtgtaagataaccaaatgaaagtgtgaaataaattgaatgtgatatttgtaaggcaattttacggaatttaaaatgggatgcgagttagtgtaagattaagctattatctaagttttggtaatagttttaaatactttttatttagaaatagcagcgctatcatttttggcatggtgtgattctttctggtccgagtaaatctttgccattaccaacttggagcgcacgatgtgaaactttcgcatttcctccaggtcctccatctgcaccaccatgttatgcttacgctccaggtgcatgcgtagtctaaaaaattattaaggagtgttactttcaaataatgtacactttaaacaaaataactaacttgttacgagctggatagctctgatggcagtgggcgcactcaaatggcatggccgtatgcgtgcactcgtgattcctgagagatgaagatgaggtaaaggacttctggcagccgggaaactcgcaaatgaagcgagatccagagtgcttaacctgctggtggacagtcaaatgggatcgctgtgcgaaacgacgatcacagagatcacaggaatagggaaagtctctgttatgatagcgtttatgaatctccagggctttggcaatggcaaaaaccttgccgcatgtgtcgcagtggactccagactgcctgtgcttcgaatcgacgtgaactttcagcgcctgctttgtgaggtaaacccggtcgcactggctgcaacgaaagttgggacgattggccaaatgaatcatctggtgcttggccatgcgggaatggttcctgaactccttgtggcagaacttgcagttggattttcccgtatgccgattgcgtggcacaatgtc

SEQ ID NO: 10439 - DNA, 1080 bp, DROSOPHILA
atgacgccgcgggtgagaatgtgcaagccgtccaccgatggagtcagctcctttcaagatcttctgagcaaaccagtgttacgttactccgcctgggtgatggccacgttgacaatagctggaaatgtgctagtcctatggggacgctttatctaccgcgatgagaatgtggctgtgacaatggtgattcggaatctggctctggctgatatgctgatgggcttctatttggtcaccattggagtgcaggactatcgctaccgcaacgagtattacaaggttgtgctggactggataacctcgtggcagtgcacactgattggaacgctggccgtgagctcctcggaggtttcgatgcttatcctggcttttatgtcgctggagcggtttctcttgatcgccgatccctttcgcggccatcgcagcattggaaatcgggtgatgtggctggctttgatttgcatttggattacgggcgtgggcttggctgtggcaccggtgctcctgtggcggaccagtaccctaccctactacggatcctattccggaacctgctttccattgcacatccacgaggccttcccgatgggctggctttactcggctttcgtgttcctgggcgtcaatctgctgctgctggtgatgattgcgatgctctacacggcactccttatttcgatatggcgaacgaggagcgccactccgctcactctgttggattgcgaattcgctgtgcgattctttttcatcgtgctgaccgacttcctgtgctgggtgcccatcatcgttatgaagatctgggtttttttcaactacaatatctccgatgacatctacgcctggttggtggtctttgtgctgccacttaactcggcggttaatcctctcttgtacaccttcaccacgcccaagtaccgaaatcaaatcttccttcgcggctggaagaagataacttctagaaagcgagcggaggctggcaatggaaatgtggccaccacaacgacgggcacggcaactggatcctctcagcatccggatgacttcacgatctttgccaaagccgcgatgagatgccattag

SEQ ID NO: 10440 - protein, 359 aa, DROSOPHILA
MTPRVRMCKPSTDGVSSFQDLLSKPVLRYSAWVMATLTIAGNVLVLWGRFIYRDENVAVTMVIRNLALADMLMGFYLVTIGVQDYRYRNEYYKVVLDWITSWQCTLIGTLAVSSSEVSMLILAFMSLERFLLIADPFRGHRSIGNRVMWLALICIWITGVGLAVAPVLLWRTSTLPYYGSYSGTCFPLHIHEAFPMGWLYSAFVFLGVNLLLLVMIAMLYTALLISIWRTRSATPLTLLDCEFAVRFFFIVLTDFLCWVPIIVMKIWVFFNYNISDDIYAWLVVFVLPLNSAVNPLLYTFTTPKYRNQIFLRGWKKITSRKRAEAGNGNVATTTTGTATGSSQHPDDFTIFAKAAMRCH

SEQ ID NO: 10441 - DNA, 3567 bp, DROSOPHILA
atgtgcgacaggtaaacgacttgccgcggctgtatcgcaagacgaatcgagaggttcccacacgatgttcgagctatgtggagcaaatgctgcgaccgctgaaggcatttgcccagcagaacgagtcccagcttggcaccctggtggtggaacaaatcttggcggaagttgctagtcacataaccaaggcgtgagtataattttacgatgggttcgaatttctctgaacttttattcgcactataggtacttcaatgtggtgagcgatgtgctcacatccgtacagaaaaccgaggagtcattgcgacgcttgcgaaatgtaaaaagtggcggagccgcgactgtttcgactggaagctcggctgtaatgtctgacgatgataagattcgcgtccaactgcgagtggatgtcacatcctggaggcaggagctgtgcaaactaaactttcaggccacccagatcgataagctagtcgagctgacaaacatggtggaggacagtatcaagctaaaggataacagcgcttagtcaccaacaacgatcagttattaaacgtatacacttctttttattcttggtaaacgaattctaacgattctttaggcacaattattgattgtattaggactacgaattgtacataatatatataggcatatatgtatatcatatatttaaatgcattgaatttcacaatcgttattggtaaataccggcgaataggattcttcctcgaagttattcgctgttggaatgaaacagagaagagattgcggaaaattagccgacagaactcatcaaactgtggccacagaacgctaaagatatataaagaatattgcaaaacggcaggcaaggaaccatgcataacataactcaagcttgcaatgatatatacaaagatattaagttgtgtgcatataagaatgagcggctcaacggaagacaaacaggattggatgccaaggctcaaacaaaaacaaaactaagcttgctacattacagcttgagttcctcggtgtccggtagcttgcggaaaaaccactgcacatgttcctcagtgacatcggccagcttggttggctgccactggggcttctgatccttgtcgatgagtagggcgcgcactccctccttgaaatcacttcgctccagatgacgcacggccagacgatattccataataagacactgagccagcgacagctgtgatccgagctccaactgacggaacgtaaccttcatcgaggtgggagacatcttcgagagcgtctaaaacaaagaaaaaagcaatgtgtctgatttcaataataaaattcaactctaatagaaaaatgcaacaaggtgtggggtgtgagtttgtgagctagtgtaacttattcagttaagaaaagtcgtgcagcaactaaagcgttgctaattggctggaaacggatcaaatatttaggcgctaaaagcgcgcgtcaagcgatgattggcccagccaattaacatccgattgtgttcttatcacttagtaaactgtgccccactcacctcaagcgtcttcttggcccattcactgccatcgttctgcagattctctagaatcccctccaccgagtccgctgaaaagttcttgttgatctgctccaggacaggctgcagcgagaagggcttttctggcggggaatggtacttctgcagcagctcaggcacatcatccgcatccgggcagttaaggagagccgtctccagatcagggatcttgctgctctcgcagtagtgcgtagcaatgcctgagtaatagacatcggctccgcgcagtcgatatcctgtgagacccagatagaggcccagctttccctgcagtcgaggcaggaagtatgatccacccacatccgggaagaggccaatcgccgtctcgggcatggcgaacagtgtccgatcgctggccacccggtacttgccatgcacactcagacccacgccaccgcccatggtaataccgtcaatgatggcgatgtagggaatcttatagtttccgatcagggcattcgtgctgtactcctcccggaagaagctcttcgactcatccgtagggccagcctcgaccagagcgcgcacatctccaccggcgcagaaggccttgtcacctgtgcccttgatgatcaccagcgacttggacttctcgcacttcttcaggtgcttgtagatcttgcgtaccatctccaagttgatggcgttaagcgccttgggccggttcagaataatcattcccttgttagaggactccgtggccagcacggaggaggaggattggcgaacggagagagccattgttgttggttttgtttgggatatcgttgctccgccgatcatcggcaattggctacaggtgcgatgaccaaatgtgtacaccaacctttgaattgggccctgctggacggcgacatcgaattgttttcgattagctaagcgcttctatttgcaggaatttgcattacttaccattttgagcggctgtcgtcagtaatgttgtgtgtggggcgaagcgagtgtttagaaattcagcgttgcgcaatagaattttagcacccgcacagctggtcattcttgtcgcggagctgccagaccgcacacatgccggaagtaaataagggtgttccagaaatcgttttccgcgtaaaatattactattaaatggacatgccaagggcagacctataccaggcgccttttaatttattaattcaaatattatatgtataagaattttagataaagatacaaattgtttaaaaatagtttaacacaaacctgttgataacaaaattcactattcattttgaactcattagtagataaacgtaaaaaagaacacacattacctacatattcataatagagcagatttgcagtctggcaacactgaaattggcaattgtacttctcgcgaataagaaaaacaaatttcgtggagttactttatcttattttgtcaacaaataaacggtgagtaaacatttgtaattagcacgcaatcggtggtcggttgtcagttaagccagggccagcaaggggctcgcaccaagattacaatgccgcagttctttaagttccgcaagctgcggacaaagcgtcatagctcttctaccacttccgcctctgttttcatgtcctcgtccacggccaccaaccagatgaactatgacggcctcctttccaagttgaccgacgaaaaactgatgctcttcgaagccgccggcgaggggaccattgtagagggtagccggatatgcggccaggatgcggatccgctctccttgccgctggtggaggacggcgccatcgaggaggagcaggcggcccccatacagacgattcatcgcactgtattcgccgttccacgcgtcccttccccctcccccgtaagcacatcaggtgccaatctgaacctcaagacggaaaacgctgcgacagcgactccgcagcgcaaaatatcgacgtcatcacgtttcatgaacgccttcagtcagctctacggcggcggcaacagcggtccgagctgcggtcacgtggagcag

SEQ ID NO: 10442 - DNA, 1231 bp, DROSOPHILA
ctattgcgcaacgctgaatttctaaacactcgcttcgccccacacacaacattactgacgacagccgctcaaaatgggcccaattcaaaggttggtgtacacatttggtcatcgcacctgtagccaattgccgatgatcggcggagcaacgatatcccaaacaaaaccaacaacaatggctctctccgttcgccaatcctcctcctccgtgctggccacggagtcctctaacaagggaatgattattctgaaccggcccaaggcgcttaacgccatcaacttggagatggtacgcaagatctacaagcacctgaagaagtgcgagaagtccaagtcgctggtgatcatcaagggcacaggtgacaaggccttctgcgccggtggagatgtgcgcgctctggtcgaggctggccctacggatgagtcgaagagcttcttccgggaggagtacagcacgaatgccctgatcggaaactataagattccctacatcgccatcattgacggtattaccatgggcggtggcgtgggtctgagtgtgcatggcaagtaccgggtggccagcgatcggacactgttcgccatgcccgagacggcgattggcctcttcccggatgtgggtggatcatacttcctgcctcgactgcagggaaagctgggcctctatctgggtctcacaggatatcgactgcgcggagccgatgtctattactcaggcattgctacgcactactgcgagagcagcaagatccctgatctggagacggctctccttaactgcccggatgcggatgatgtgcctgagctgctgcagaagtaccattccccgccagaaaagcccttctcgctgcagcctgtcctggagcagatcaacaagaacttttcagcggactcggtggaggggattctagagaatctgcagaacgatggcagtgaatgggccaagaagacgcttgagacgctctcgaagatgtctcccacctcgatgaaggttacgttccgtcagttggagctcggatcacagctgtcgctggctcagtgtcttattatggaatatcgtctggccgtgcgtcatctggagcgaagtgatttcaaggagggagtgcgcgccctactcatcgacaaggatcagaagccccagtggcagccaaccaagctggccgatgtcactgaggaacatgtgcagtggtttttccgcaagctaccggacaccgaggaactcaagctgtaa

SEQ ID NO: 10443 - protein, 351 aa, DROSOPHILA
MALSVRQSSSSVLATESSNKGMIILNRPKALNAINLEMVRKIYKHLKKCEKSKSLVIIKGTGDKAFCAGGDVRALVEAGPTDESKSFFREEYSTNALIGNYKIPYIAIIDGITMGGGVGLSVHGKYRVASDRTLFAMPETAIGLFPDVGGSYFLPRLQGKLGLYLGLTGYRLRGADVYYSGIATHYCESSKIPDLETALLNCPDADDVPELLQKYHSPPEKPFSLQPVLEQINKNFSADSVEGILENLQNDGSEWAKKTLETLSKMSPTSMKVTFRQLELGSQLSLAQCLIMEYRLAVRHLERSDFKEGVRALLIDKDQKPQWQPTKLADVTEEHVQWFFRKLPDTEELKL

SEQ ID NO: 10444 - DNA, 3126 bp, DROSOPHILA
ccaatccaaactttcgggcacattggccattagaggagaaccaactatttcggccatattatccgcgctgtcttcaatattgctcttcaacagtcgcaaaaatcccttgaggtaaccatctgtgctctggttttcaaaatatttaaataatattattgtttttaggctttgggatgtacatttatatgttttttgaaatacgcaccatatcagcaaaaatatttggcttcaacctgaagctcgtttgaccttccttatagttttgattgtgttcctcaataactttgaaattttcctcgaacgccttgtaacttcgcatttcatcgtaggtgcgaagatatttgcgattgttattattctagaaggcatttataagctcttaataggtttaatttttatttttctaaagcttaccttaaatttttcgaattcgctcttgcaatttgcagaagaagaatttccttcgctcaaattggatgttacaatttgacaatttaggccacataaacaaccaaagaaaattaatttccacattgcttttgacttcattaccttcagttactgtcaataaactaaaatcgcaactaagcatatttatgctttcttaagaagcaacgtaaaagtctgatcgaaactgtgagcacccattagattacatttagaaagagcatattattttatataagctgactaaaaacaaatcaaaattatacatcattatgcatttaaagtctagctcagtataagtaatttgcttttaatggtacacttcgtacaataaatatttaacatatttaaagaacaaaaaacataatatttttataaatcacagaagttattattattttcgattagccatggccagctgtgtttcacttcattctaaaattccagtcgttcccacagaaatgcaatatagcctctcttccgaattttgcaacaaatcttgcgagattttctcagtatttcaatagaaaaaactgttggacgaaaactggggaatacccataatgtaagttcatataccctttgtcttacatgccagtcggaattcagtgtttcttttcatttgtgtcagaaatgatttaaagtgtgtattcttagccttaagaacagctgttttgcataacattgcgaatccggttgatttgcgtcaaaacaaaaccaggatcatgctgaaaaccgctgttagccgctttttacaaattagttcagtaagtttaaccatgacacatggtaatgcccatattaatccaccgacttgcaggtacaatgtggcggccgggcgaattctgttcgcaacatcaacctgattcccatggtggtcgagcaaactggccgcggtgagcgggcctacgacatattctcacgtctgctgaaggagcgtataatttgccttatgggcaacataaccgacgacatcagttcgactgtggtggctcaactgctgttcctgcaatcggagaacgtcaacaaaccgatccatctgtacatcaattcgcccggcggtgttgttacagcgggtttggcgatctacgatacgatgcagtacgtcaagccacccattgcaacttggtgcgttggacaggcctgctcgatgggatccctcctgctcgcggccggtgctcctggcatgcggtactccctacccaacgcgcgaataatgatacatcagccctctggtggcgcacaagtaagtacattctagtgtaaaaatctcacccgaattgatgatgcaatctcgcccagggccaagccacagacatcctaatacatgctgaggaaattatcaaaatcaagcgccagctgaccaacatctacgtgaagcacgccaagaatacgtacgaggagatgtccggacgcatggagcgcgaccacttcatgacccccgaggaggcaaaagtgctgggcatcattgaccacgtgcttgaacatcctccagagactgtttccgaaacgggacccgcgtcggacggcggcgtcacctccggcaaagccgtgcccgaggagtgcgagaagaagagaagcaagcaggcagcctaaatttccaccttcctatagaccaaaattcaatcataagttcgaaacaatttgaataattcagttttccacagaatatacactttccaaatacaccatgtcgactttctcatgattgagcattattaatattgcatcattaatgtttaaaagcctttacgtaatcagttgctcttagttaagagaggatgaactggaattatcgttatctgattgaagagctagtctctttcaggaagagcaaatggatcctatcatccatcattctccctcgttaaaatgctaaaccaatcaataaacttttagtaaaattcataaacacagtactcaatacggcatttgtttgtttttggttgtcggtagtttttgggagtggtttactgtttactaattaactctttcaagtcgatctgcatttatttcttattagaaaatttaaaagctatatcagaaaaagagatacttgtttgtgcgcaaacgcatattcttaattaagtaaaggaatttgaaaccaagtttcccttttaactctgatccattactataatatctgagctaccggtgatggaatccttctgtatgtactcgaagatcttgtttaattccggtgtttctttgatcgacttgaggaaatccactaactgctgatttttgtctattgaagaggaatttcaattagtttattttcagatacaatgttcttcaatatttttacttacttgctttgggtatttgcgaaagggccgagactgcacgaagggcagaacgcttgagttcgtcctgcttttcgtactcctgtttcacagagttggccttcaccttgtgggtgcacgtatcacgtagttgctgtataaattgatcgagtcctgaaagaattgagcaaagtgaataagagatctcaagtaatcaaggctttggtactactcacttagcagaaccttatccgggcacaagatggccagacgtgccgtcatcaggtacgtcagcatcttgatgtcgtagtggtcgcacagaccagcctggacatggtccaggaactgcatgacatccacacgatccaagccctgctcgagaagtgtgtacatg

SEQ ID NO: 10445 - DNA, 1017 bp, DROSOPHILA
aatacccataatgtaagttcatataccctttgtcttacatgccagtcggaattcagtgtttcttttcatttgtgtcagaaatgatttaaagtgtgtattcttagccttaagaacagctgttttgcataacattgcgaatccggttgatttgcgtcaaaacaaaaccaggatcatgctgaaaaccgctgttagccgctttttacaaattagttcagtacaatgtggcggccgggcgaattctgttcgcaacatcaacctgattcccatggtggtcgagcaaactggccgcggtgagcgggcctacgacatattctcacgtctgctgaaggagcgtataatttgccttatgggcaacataaccgacgacatcagttcgactgtggtggctcaactgctgttcctgcaatcggagaacgtcaacaaaccgatccatctgtacatcaattcgcccggcggtgttgttacagcgggtttggcgatctacgatacgatgcagtacgtcaagccacccattgcaacttggtgcgttggacaggcctgctcgatgggatccctcctgctcgcggccggtgctcctggcatgcggtactccctacccaacgcgcgaataatgatacatcagccctctggtggcgcacaaggccaagccacagacatcctaatacatgctgaggaaattatcaaaatcaagcgccagctgaccaacatctacgtgaagcacgccaagaatacgtacgaggagatgtccggacgcatggagcgcgaccacttcatgacccccgaggaggcaaaagtgctgggcatcattgaccacgtgcttgaacatcctccagagactgtttccgaaacgggacccgcgtcggacggcggcgtcacctccggcaaagccgtgcccgaggagtgcgagaagaagagaagcaagcaggcagcctaaatttccaccttcctatagaccaaaattcaatcataagttcgaaacaatttgaataattcagttttccacagaatatacacttt

SEQ ID NO: 10446 - protein, 253 aa, DROSOPHILA
MLKTAVSRFLQISSVQCGGRANSVRNINLIPMVVEQTGRGERAYDIFSRLLKERIICLMGNITDDISSTVVAQLLFLQSENVNKPIHLYINSPGGVVTAGLAIYDTMQYVKPPIATWCVGQACSMGSLLLAAGAPGMRYSLPNARIMIHQPSGGAQGQATDILIHAEEIIKIKRQLTNIYVKHAKNTYEEMSGRMERDHFMTPEEAKVLGIIDHVLEHPPETVSETGPASDGGVTSGKAVPEECEKKRSKQAA

SEQ ID NO: 10447 - DNA, 5008 bp, DROSOPHILA
cagtttctctgttttggggatcatgcatcgccgagacaatgtgaccttttgcggaaattatgatttgtctccggctgaccttgagcccccccgctgggcgatgtaacccccccccccccttgccgccgactcaattaagctaaatttaatcagccggacaagaaatgcttcggaaaaggaccctctaatgccggtcacatattgcacttccatttcgtagtacatttggcaaacctataaccttgagtttggcttaatgtcttgcataaattggggaaccaagtggctgcttaaaaatagaaccattccgactggagccaactaaaattattcatttcgatttgctagactcagcggggcgaacaagtatagccaatctttatgacttccttttaacttatatcttggttttttcttgcatcacaaattttagttattatagcagctttcagacgcgtgaaataatacttttaataaatttatatccccaataactttaagccgtctgtgaaacttaagcccgacgtctgtcaaaatggcgctttatgcatatattttttatggacaccaaatcaattttatccagcgctgaaatcgaaaccccaccaagtggaaagcacttgccatccgaaatattaattttgaactcccgctccagctcccaatcctccttccgcttcatcagctgtgtaatcctggcacttaaaactcttctccgcgagctgtgaacattagccaaatgaagtgacaagaaattaacgcaaaaataaaacaagaagacggagcggtataagaaataataatataaaaactcaatgagtcagcaccgcatcagctcctgctgctgttgttcttcttattgctgttgtttgtgggggcgtggccggagtgggaattgagtgctcctaatgatgaactcggtcaaggagccagtgcagccatggtggccaagtaattagataagcgagcgtgcaaaacaggagcaaaccgataaatcgccatggtctacggcaggagcatcgccgtaggcttctgtctgatgaccgtcgtccttctgctggccgccgtgatattctacttgagtttgggtgagtccttagagtgatgtcctttcaaaattccatcattcgcaaacctaaataatttctgaatcaagaatgttcaaaatcttagcaattattatacgcataatttgtgaaactacttaaagttcttttaaaacttgagctgctgtaaatttctatatatactttcgtatccttaaagggttccttcgcttgaagcaaaaaccaaaatcaaattccaaactgcaaaatggccataaattttatactcaaaagtatttgaaagtaatttgttgtataatacgataaaaataaggcaacaagaaacaaaaaacggggcgcaaaaaacaacaaacggctgaccataaaaaaataaatacgagtacggcgcaaactttgtcttgagcgcaaaacaattttcgcacatccatcgatggatccatggaagtatgggtataaatatatatttctgggcctttggtcctgaatgttttgcttcctcgttcgaggcttttatcttgttttacgagtatcaatatcgagaaattcgcacagctatattttttatgccaatttgcgtattgatttgccatgccacatctatggaatatgggcgaaacatgtttgatttatgcccttttgtcgcctcggattccgagtacatgcatcacgacaaattatttatctgccagatacaatttgtcctggcttaggtttaaatcagccacggagcaggaagtttaaagaggaaagagccaggatttgtgtgtgaacatgtggccttgtcatggacacaatgaaattgaaagtctcgcctaatgcacaatgcttttgtgtgtgaatcagtgcttcctaatgaagttacacatacaaatatgtatgtatgtatgtgaaaaaggatatgaggaaataaatttgtgcagcttgatgtgaatcatatggctattatcttgaacgaaatgcattttggcttaaagcttaacgaatgaaagattaatttcaattcactttaaatgcagatatcaaatcgaatgcactatagcttatgtctaattaaaagcattcacattgaaatatctttatttacacagtgccatggcaatcgtgcaaaagggtaaagttattatgagataaatgagccagcaacccaaagaacatgtttctgacgcaatccgtgcaatcggattaaaagctcctcaaggtgctccacttccagttttatttgctcatttgtctaacgaactatgttccataatctagtaatttgaattgctcaattttcggaaggactctcaacgcatggtacccaaacaaatcgtaaaaatgataaaatgcaaaacaagaatgtcatttcgttttacgacaattacccaaaaaaaaaagttgtaggcattcaggcagaaaaagtctcggtataaattaaggccaagagtaagaaaattcaattgttaaaacttagctcaacttttgaagtgaaattagctgcaatagcacattaatttatttaagccaatcatttcgatgtccatgtacttgatttaaacgctcgaaaaagcatattgctaacaaagcaaacctctcaaaaatcaatgtcaactttgcacattaagtttaattgccatgtgttgacaaaaatgctaacaataaactgatataagtttttgggtggaggttatgacaattaagttgtcaattgtagcttaaagttttcttgtcagagattaaagtaattactcatacgcagtgtgggctaggaaattataaaaggtacaaacaaaagatattaaaatgtttcaaagacacaaatgtttgcttgatggctaacagctctaggaaatatatattttggttaaaatcatcactagattttgttttgatttcccccaaaatgctgttgagaaactagttgaactcacatgcaatatgctccgctgtccttgagtgataattaatttgggatcgtccttttcccaggaccctgccccgcggccagcttcgcctgcgacaacggcacgctgtgcgttccaaggcgccagatgtgcgacagtcggaacgattgcgccgacagcagcgacgagaatccggtggagtgcggtctcctctacggcagcaaggagattgccgacaagattgtccgtaatgcgattgaaaagaagcaacagcgcctaatctccgccgtttcaaatgcgagcggtgcggattcaacgacgtcgatggtgccaaggaatcagagcctaactttaaacatgacttgtggtgagtgaatgcgcctcaattgcactcgaaaaattgatacattatatatataaatccattagatatcgtcacatatccgaaggcctgtcagtgcggccagggaacaatcctctactgcggtcgctatgccaaattgcggcgatttccgcgtctcagttcggaggtcaccaatctgatcatcatccgcaacaatctgaccctgcgcgacaatatctttgccaatttcacgcgtctgcagaagctgtaagtaaaactatatatatctataaaaatttaaattaaaccatgacttttgtttcgattgattaaatttcattcctctgctaagtaaagtaaaatcaatgcagtcagtaaattagttcaattgtctagaaacctgattttttcctcttccttcaggacgcttaagtacaacaacatatcacgtgtcccgctgggcagcttcagtggcctctttcacctggaacgcctggagctgagccacaacaacgttagccacctgccgcacggtgtcttcctggggctgcacagcctccagtggctgttcttggtcaataaccatctgcaccacctgcccgtggagcaactgcgattctttagacgattggagtggctggtgctgagcaggaatcgtctcacactgcgaaatgtgcagctgccgaaaatcccgacgctctacgaagtgtgagtaaatcgaattgggcgctcgctcttctatttgctagattaaaaactgaaaggactagcagctacgctgatgtattcaagcgtgaaatgctgctaaaagctgctggtgcagtggtgctcattgggttactcgagtattgggtgtcctggcggatagctggttggccctaagccgagccaactgctcggtgattctgttaaggactcacacaatgttgtcaacgtggttgaactcacttggcgaccaaagtgtccgtttgatgtcctttagtggttttgaagttcacgatttaaggttgcaacattgaagtttttagctctcttcaaaggcttacatctacacattaccaagaaacatttttatataaattcttaaagagaatcctagttgccctgcatcaactttgattatcttccgtctgcccaggcctcacattcctcacttgcccacacaagcacacacaatgagcttagggctgtctttgaacacagatccgaaaatatacatatataaaccaaactaggcctacagcttagccagattgttggatgcctgcataaatatctctttacttttacagttatttggatttcaatcgaatcgaatacattggcgaggaaactttttcccaattggataatttacatttgctgtaagtaaaacaatcaacattcacccactcgtcccaaaacaaaaaaaaaaacaaaaaacatggcaaaagatgccagcaagtgtcgaaaagtctattgaaatatgttgtacttagattttatggggcgtatgcgtaatttttactcttcgttgcatttcgctttcgttcgttttcactcggatcttttttttacttgtttatttcgagagatttatgtgggttacattgttgctgaggcagtagaaaagatggatggagcattgcgtatacgcactgttgacatgacactgaggtggatattcgatacttcgacaccttcttaccggcaaaccaaaaacaatgaaattt

SEQ ID NO: 10448 - DNA, 840 bp, DROSOPHILA
atggtctacggcaggagcatcgccgtaggcttctgtctgatgaccgtcgtccttctgctggccgccgtgatattctacttgagtttgggaccctgccccgcggccagcttcgcctgcgacaacggcacgctgtgcgttccaaggcgccagatgtgcgacagtcggaacgattgcgccgacagcagcgacgagaatccggtggagtgcggtctcctctacggcagcaaggagattgccgacaagattgtccgtaatgcgattgaaaagaagcaacagcgcctaatctccgccgtttcaaatgcgagcggtgcggattcaacgacgtcgatggtgccaaggaatcagagcctaactttaaacatgacttgtgatatcgtcacatatccgaaggcctgtcagtgcggccagggaacaatcctctactgcggtcgctatgccaaattgcggcgatttccgcgtctcagttcggaggtcaccaatctgatcatcatccgcaacaatctgaccctgcgcgacaatatctttgccaatttcacgcgtctgcagaagctgacgcttaagtacaacaacatatcacgtgtcccgctgggcagcttcagtggcctctttcacctggaacgcctggagctgagccacaacaacgttagccacctgccgcacggtgtcttcctggggctgcacagcctccagtggctgttcttggtcaataaccatctgcaccacctgcccgtggagcaactgcgattctttagacgattggagtggctggtgctgagcaggaatcgtctcacactgcgaaatgtgcagctgccgaaaatcccgacgctctacgaagtgtga

SEQ ID NO: 10449 - protein, 279 aa, DROSOPHILA
MVYGRSIAVGFCLMTVVLLLAAVIFYLSLGPCPAASFACDNGTLCVPRRQMCDSRNDCADSSDENPVECGLLYGSKEIADKIVRNAIEKKQQRLISAVSNASGADSTTSMVPRNQSLTLNMTCDIVTYPKACQCGQGTILYCGRYAKLRRFPRLSSEVTNLIIIRNNLTLRDNIFANFTRLQKLTLKYNNISRVPLGSFSGLFHLERLELSHNNVSHLPHGVFLGLHSLQWLFLVNNHLHHLPVEQLRFFRRLEWLVLSRNRLTLRNVQLPKIPTLYEV

SEQ ID NO: 10450 - DNA, 8538 bp, DROSOPHILA
gaaccaatcgatatttgcagtagggtagcgcaataaacttacgttttatttattgaaaacaaatcggtgtcaccaccagccgccttcgatagagctgttatcgttatcgcagccacctatcgtttaattcgctgggcgtttcacaatttttttgggaaacacaacaaagcttcacaaaggacacgatgctcgttctggtactcggcgacctgcacatcccgcaccggtgcagcagcctgccggctaaatttaagaagctgctggtgccgggccgcatacatcacatcctggccaccggaaacatctgcaccaaggagtcctacgactacctgaagtccctggccaatgatgtgcacatagtgcgcggcgacttcgacgagaacctgacgtatccggagcagaaggtggtcacggtaggccagttccggatcggtctgtgccacggccaccaggtggttccccgcggagacccggaggcgctggccctcatccagcggcaactggacgtggacatcctgatcacggggcacacgtacaagttcgaggcctacgagcacggcaacaaattctacatcaatccgggatcggccacgggtgccttcaacccactggacaccaatgtggtgccttcgttcgtgctgatggacattcagagcaccacggtggtcacgtacgtgtaccaactgatcggcgacgaggtcaaagtggagcgcatcgagtacaagaagatctagggtcctagtattagccaccagccattcccctccaatccaacccttgacccctgcattctgagctcggcttcattaaagaaattgtaaatgtacgtagcaataaatcaagttctcatttttttatctgataaaaaatgctagcaccttgtttaaatagagaataaaagtacgaacggacgaaagtgaagttttagatttaatgcaataataaacgattacaaagtaaggaaaaacacccccagaaattgtgatactcccacaataatctgataaaaaagtttaaattttattaaatagaatataaaaaggagttacatctgatgatcgagtaaagagtctgctcaaaagttcggatttcatgctcagtttctcattgcaacacactctcgatataaatacattgggttcggtttgtggccatcgcttttccatcgaaataaattatataaatactttccacgagccaggacagcaatgtttggcaacatcatcaatacgaaatgtttgatctaaaaatctttgaattacgaaaactttgcacttagattaaatacaattatgattgctgctgacgacagttggaaaagcaacgaacaggatccccgaggaggagaaccgccttagccgaggctgtccacgcacacagtcttcagggtcttgccggcaatcgtggtcttatactgctccggtaaagccaactcggtctggaaatcacaaaaaaaataaataaatgactgaagacaagagacaaatttttgaactcacataatcgccgctgtcgtcgggcaacaggatgttcatctccgaggacttggagttgacgatctccacgcccagcgagtccttggacagatacatctggcagccgtcggtcttgtcgatcgataccgtcggcaccgagccgagcacctgcatctgcacgctctggcagttgacgaactccacggaggccaccacggaatcgaacagcagggagcacttcttgcaggagtcgaagacgatgttgttcaccttgcccttgacggtcagagtggatccctcacacttgaacacatacaccacgttgttcatctcggcgttctccaccaacagcccggtgttgttcttctggtactcgatgatccacttctttccgtcgcgctcgaaaacgggcgccttggcttgcgcagctgatggagcagcaacggccttgctgccgcccgactgggctggcgatttgaacggagccggtccagtgcgtagagatggatttttatgggtctgcatgtcgccagtgaccttcttcaagcctgcgggtttatcaaaagatacattttcttactataggagcacttaaccatttttgcagttgctgctcacccttggtgatgtcggcaccctggttgatctgggcgaagagggcgctgcgatcatctccggcgctatccagcttgagggcactcagatccagcatgggcggcggtgggggcagaccaccgggtggcggtggtggcggggcacctccggcgggggccgctcccttgccggaccacaccaagcccgtggtgtggtactgccggatgtaggcctgcagttcggtgagcgtctgcacccaggcgcgggcccactccacatgcgtaacatccttctccttccactccttgagcacgcggttcgtgtagaactggccggcgtcgttcatctccttgacatagggacccggggtcttctccacgcacacccagcccaaggcgggaatgctttcgctgatggccgacaggtggttgaagaagggcgaggagcggtgcttctcgcggaagtcctggatggcgctgatctgcgtcgaggtcggcttcagaagctccgcctgcttgggctgcgccggctgggcgatctgggtggccagcgtcacgtactgcagttgggagctgttgcggaattgaacgatggcattattacacttttaccatagatgactcatccagactgactcacccaaaggcgctcttcacgagctccgcatgctgcgccacatcgccgccaattttggcggagagagttaggtattggctcagcggacccgccacaatgtcctcgaatccggcgacactcatgttgctgctgggcggcgagggaggtggaggtggtgtctctgctttttcaaaaactggaagagcttcttcttcttcggctggcggaggcgggagtgtgggcgtgggcagttctatcggctgtggcgctgttagagtccgttccaatcggtcgacgagggtctccagtcgctcgcaaatgctctccaagtggtcgacggcggccgagggcttggcttccggctcgttatctgaaccaaaatgacgcggaggagaacggcaaatgtttagttcgttttggcaattatctcgaattattcaaataacactgagttttataaagaaaataacttgagtgagatgatgcttcagcgtgataaaccccagtgaatcgtgcactcacaatacctgacaaaaaaggcgatataaactaaggcgtctcgagaggaatacctcatcacgagcttgtgtatgatgatgaactggtgcgcttaatacttataaagttcaatatgcaaaaagagctaatcccaacgagtgaaagtaataatccacatgcaaaaacggcacaagacaacgaaaaatcataagagagaagaactaagttgaacctttaaacggaagcacttgacttgcgaacttattggccatcaggaagttacgtgaatcgctagactctcaaaacttcttcacagcgaaaacgaacacataaagaacacagaaagtcaagcatccgcttaaataactgctgagatcgaaaaaaaaaagcaaaagaatcggactctatcgaagctcgcataccccgcacggccacgctatgctccacagccgcatgggcggcccgcaggagctccgtgtagagacgctggcgcttcagctccagctcgtcgcgtcccaccggcgtgaccgggggctcgatgcagccgctggacatggaacgaggacagaggagacgatgtactggcaattcaaagcggggctgggaatgcaggggtcgacctgttctggtttcagcttaactatatggatattttgggcgtgaaaccaaaacaggatcttgggtaagcatacatgtcgttcaggcgctcgtcgtcgaaccacgagggtaatccgtgggcaaagaagagtgtttccgagacgacatccccctcgatgtagggtgcacacatgctctcccgcttgggtggcggcagtgagtcggagaacacctcgtcgtcgtccagcaaggagccctgattctggctggccagcaggagcagtggcagtggatccggctcgatgatctccgcccggttgctgatattcaccttcttcttgatcgactgatgcgttgagttgtgcctggacaggcagctcttggtgggcggcggctgaggaggcggtgtggtcggcgtgaccgtcgccaccaccaccacttcgtccgcctcctccgcgtcgccgctggtcatcgaagcaggtggtgccgtggatgtggaagagtgcgttgagcgggccagtggctccggttctttgggtgctagtgctggatttgctggtgatgatttgctagccgcttcagcctgagttggttgggctgtggaagtgttgcttaagattactctacatgaagcgacgaattaccaagacgatcatcaaggaaagcgccgatacttaagttgattacttcacttcactctctgctcacctcgcttcctgtcttcattatgtttatttatcgcatttaaaagcatttaccatggtcactggcagattgagtagttagtttttactgctcaccttattattatagaatctatagaatcttgaattttctgtctaaattattgaccttcattttagtttctatattcgtcactactatatactatacgttcactttgatggatgagcacgatctaagtgctcaacaaaaagtgtgtatgcaatgtcattagctattcctcattaatcaactgagaatcggcgcaattccttgatattcatatgtataaaattcacagaaataaaccgaagagaaagcacagtgaagacaactcataagtaaatagaaaaggacactcaaggcagcttgaagtgcccggattgaaatgaaaggaaagatcagaagtggtggtcagctgcagtggcattgcagtgagtgagagccggccggataggggccttcgttccggagagcagacaaaagccgagacagctgttgagctcgaaggccggagaacgcgaatagatggggtggtgggtaaatacttagcgttgcgtcagtaccagtgtttggctgggtgcttgtgggcacatcctcgggattatgcgcttccaagagctccttttctggtttcacaggctctggctcctccttcggagttcctggcttgccgttcagctggggttcctccttttcggtgacctgtccgccgttctcctcctctgcgttccgcttttccttctccttcttgcccgccttggggttcgatcggcagcaggagaacattttgcaggcgtgtggctgggcttttccggtgctcaacactctaggtacgaatcaagcacattatgtaagttccgtggctcgactgcggatgcccgtgaagctcaagcggcggtcacaacactgacggcacaccaaaccaaatcgaatcagtagaagcagtaacagcagcagccatataagacactcaacgggtttccaacgaacgtggccactccttgctcactgtgtacatatattcagtgtatggcccaaatttagtggcacattaataaggtcctccgagttgtccgcgccttcaactgggtcaagtgactgccgaccaagcacagaaccaaatggcacacaaatgcgattacacacggagaacagaacacaccctaaacgaagcgcacgcccacgcactcggggattcgattcgatttcgaactcgaactcgaaggtctcaacaggactctgttaggagagctccgcgctgttaactgctgagtttcgccgccttgttgggctactccgcgctgcttttgaccatttggggccagccaccgactggcaatgaaatgtgtttcattaataaccgcttttggcctgacatgcaggattttgtgcaagctccggcgatgtcttgcacttttgcagcagagaaagcttacggtccaggcggaaaatggaaaactctccgagagagttgcgcagacaccactgtgatttcgtgatacccttctcgccacgggtggcgcgacttaagtgagggaaaaccacggcgatcccatagttttatcagccctgtaaggcagggttcgcctatcaattagttgtgacaacaccgagttatctttactatttggaaagtttccaggaatgatcggtaatgaaactatgattccattttgagcattaccataacgtttgtaagccatagagagtagagagatgcaatgatcatatcttagccggctataaaaacagttttaaaatgttcagctttttgtgaagtaatctgccgcagaagagtataaaaacgtcgacgtaactgaaactcccatatcgtttgcttgccagtttttgttttggccttagtgcaatgggtttattgcaccggcaacgttgtttttgtttttaagtagctttaaacaaatggctggcaattagagtgggaaatgcatcagtagccgttggattggagggaggggctaagccgccgaggacaagtaagccgagattcaactttcgcctggcgatactagttctccttgcagtcttgatgcgttttctgcggcagatgcgtttgttgcgtgcagaaagcaaagaagaaatggggaagaaaaactagaaaccaagattaaatgtctgcagctgaggaaccgttattcccgctgcgagagtgtgagtgagctcgaattaccaggggtggggggtgttcgtaatggtagaagaaaaatcgcccaccttataaggcgaggtgttattttcttccaccgaaatcgagtgagtggtaatatctgccgattttcaatcgcgattcgctgataaaagcgttttggccaactttttgactcattcgcgcacgaatacaagcaaacgtgtttgctcttgcgtaaactacatacatgcatacatacatatgcatatcaactatgtgtctgtgagtcagcgaaacaaaaacaaaaaatggccacaacagctgagtagttacttttttttatcgggggttaacaatcgcaatgggagctgctaagggttaatttgcatacacttgctggcaatgaattagttgtgtctttatgccatggaatcggatatgaaatcatcgttaaaaatacaccatgtagatttaattttacaagcaacatgaatcacacaaaaatagccatcacacagctgtctcttgtctttttggctctcttcgctgttgttgttgttgtgtgtgtacaaacacccacagcctgcatcacacacacacgctcaaattcgtgacagcaccacccacccctcaccaataaccgttaattccgcagacactttcagccggcgaacgggagaagagaatttgcgaataatagcaaagccccgtttaaatgaacgtttttagcaacaatcaggcgttactcaccttcttttgctgctgatgaatttgcaaggatctgcagttgtattccaattagaactgacgagaagctgcgtagcgaacaccggcgaaatggcgaaaataataacttggcgtggcctttggtgggaccaggcgtacattcgtggaaatagtcaagcgagttaacccttatgtgggtggcagaatactaaaaatatatgatacaacaaattttagacttaagaaaacggatgtttaaatgtataaaatatgatggaagtgcaatagccaagcttataaactaattcttaaattatttgcaatgcatttaggacttttcgatatacacgtaaataaactatattttgattgaacacggtacatttctactagagttcaccttcagatattgacgctatttcttgtcctgtaaattattttgttaaatcgttcacattgtatgtctaataaagatgttttccaataaaatgttattcccttttcacttagtctaacatattcattaaataatcaatgttttattttttatttagttattttaattagttcttaattataaaactgctctagattctcgatattttgcggaatccggcgcatggtcacactgacgaacacgtattttcattattcttgcgaagcgcatcgcttaaaacttgattacgctcggataacaagatgcacccgcgtctcaagtgactgaacaggtagcgaagtgaccctggatgagcgtgggtaggcagccggcacctctggaaagccctaatcccaggtccgccagccgtttgcaggttatgtccgcttgtgtacactgtgacggggaaccgaagaagcaacaggagcggattcctggcagaagagacaaccgctgtacgagataccgcccctgacctgcgcaacatgatcgaggtgctgtgcctgctgctgggcaggatcctgctgctcctggtcggcggctacgaactgatgtggcggctccgagagcgactgaatgcactggccgtccggtcatatgacctttggcgcagcaaagcggcacgtgaggcgcacgagcggcgcgtgctcgctgactgccgctcccagttgacgaagacgccgcagcatctggtcctggttatctcccccgtagatgccggcgtg

SEQ ID NO: 10451 - DNA, 1920 bp, DROSOPHILA
atgtacgcctggtcccaccaaaggccacgccaaatccttgcaaattcatcagcagcaaaagaagataacgagccggaagccaagccctcggccgccgtcgaccacttggagagcatttgcgagcgactggagaccctcgtcgaccgattggaacggactctaacagcgccacagccgatagaactgcccacgcccacactcccgcctccgccagccgaagaagaagaagctcttccagtttttgaaaaagcagagacaccacctccacctccctcgccgcccagcagcaacatgagtgtcgccggattcgaggacattgtggcgggtccgctgagccaatacctaactctctccgccaaaattggcggcgatgtggcgcagcatgcggagctcgtgaagagcgcctttggctcccaactgcagtacgtgacgctggccacccagatcgcccagccggcgcagcccaagcaggcggagcttctgaagccgacctcgacgcagatcagcgccatccaggacttccgcgagaagcaccgctcctcgcccttcttcaaccacctgtcggccatcagcgaaagcattcccgccttgggctgggtgtgcgtggagaagaccccgggtccctatgtcaaggagatgaacgacgccggccagttctacacgaaccgcgtgctcaaggagtggaaggagaaggatgttacgcatgtggagtgggcccgcgcctgggtgcagacgctcaccgaactgcaggcctacatccggcagtaccacaccacgggcttggtgtggtccggcaagggagcggcccccgccggaggtgccccgccaccaccgccacccggtggtctgcccccaccgccgcccatgctggatctgagtgccctcaagctggatagcgccggagatgatcgcagcgccctcttcgcccagatcaaccagggtgccgacatcaccaagggcttgaagaaggtcactggcgacatgcagacccataaaaatccatctctacgcactggaccggctccgttcaaatcgccagcccagtcgggcggcagcaaggccgttgctgctccatcagctgcgcaagccaaggcgcccgttttcgagcgcgacggaaagaagtggatcatcgagtaccagaagaacaacaccgggctgttggtggagaacgccgagatgaacaacgtggtgtatgtgttcaagtgtgagggatccactctgaccgtcaagggcaaggtgaacaacatcgtcttcgactcctgcaagaagtgctccctgctgttcgattccgtggtggcctccgtggagttcgtcaactgccagagcgtgcagatgcaggtgctcggctcggtgccgacggtatcgatcgacaagaccgacggctgccagatgtatctgtccaaggactcgctgggcgtggagatcgtcaactccaagtcctcggagatgaacatcctgttgcccgacgacagcggcgattataccgagttggctttaccggagcagtataagaccacgattgccggcaagaccctgaagactgtgtgcgtggacagcctcggctaaggcggttctcctcctcggggatcctgttcgttgcttttccaactgtcgtcagcagcaatcataattgtatttaatctaagtgcaaagttttcgtaattcaaagatttttagatcaaacatttcgtattgatgatgttgccaaacattgctgtcctggctcgtggaaagtatttatataatttatttcgatggaaaagcgatggccacaaaccgaacccaatgtatttatatcgagagtgtgttgcaatgagaaactgagcatgaaatccgaacttttgagcagactctttactcgatcatcagatgtaactcctttttatattctatttaataaaatttaaacttttttatcag

SEQ ID NO: 10452 - protein, 521 aa, DROSOPHILA
MYAWSHQRPRQILANSSAAKEDNEPEAKPSAAVDHLESICERLETLVDRLERTLTAPQPIELPTPTLPPPPAEEEEALPVFEKAETPPPPPSPPSSNMSVAGFEDIVAGPLSQYLTLSAKIGGDVAQHAELVKSAFGSQLQYVTLATQIAQPAQPKQAELLKPTSTQISAIQDFREKHRSSPFFNHLSAISESIPALGWVCVEKTPGPYVKEMNDAGQFYTNRVLKEWKEKDVTHVEWARAWVQTLTELQAYIRQYHTTGLVWSGKGAAPAGGAPPPPPPGGLPPPPPMLDLSALKLDSAGDDRSALFAQINQGADITKGLKKVTGDMQTHKNPSLRTGPAPFKSPAQSGGSKAVAAPSAAQAKAPVFERDGKKWIIEYQKNNTGLLVENAEMNNVVYVFKCEGSTLTVKGKVNNIVFDSCKKCSLLFDSVVASVEFVNCQSVQMQVLGSVPTVSIDKTDGCQMYLSKDSLGVEIVNSKSSEMNILLPDDSGDYTELALPEQYKTTIAGKTLKTVCVDSLG

SEQ ID NO: 10453 - DNA, 4134 bp, DROSOPHILA
ctttcgctgatggccgacaggtggttgaagaagggcgaggagcggtgcttctcgcggaagtcctggatggcgctgatctgcgtcgaggtcggcttcagaagctccgcctgcttgggctgcgccggctgggcgatctgggtggccagcgtcacgtactgcagttgggagctgttgcggaattgaacgatggcattattacacttttaccatagatgactcatccagactgactcacccaaaggcgctcttcacgagctccgcatgctgcgccacatcgccgccaattttggcggagagagttaggtattggctcagcggacccgccacaatgtcctcgaatccggcgacactcatgttgctgctgggcggcgagggaggtggaggtggtgtctctgctttttcaaaaactggaagagcttcttcttcttcggctggcggaggcgggagtgtgggcgtgggcagttctatcggctgtggcgctgttagagtccgttccaatcggtcgacgagggtctccagtcgctcgcaaatgctctccaagtggtcgacggcggccgagggcttggcttccggctcgttatctgaaccaaaatgacgcggaggagaacggcaaatgtttagttcgttttggcaattatctcgaattattcaaataacactgagttttataaagaaaataacttgagtgagatgatgcttcagcgtgataaaccccagtgaatcgtgcactcacaatacctgacaaaaaaggcgatataaactaaggcgtctcgagaggaatacctcatcacgagcttgtgtatgatgatgaactggtgcgcttaatacttataaagttcaatatgcaaaaagagctaatcccaacgagtgaaagtaataatccacatgcaaaaacggcacaagacaacgaaaaatcataagagagaagaactaagttgaacctttaaacggaagcacttgacttgcgaacttattggccatcaggaagttacgtgaatcgctagactctcaaaacttcttcacagcgaaaacgaacacataaagaacacagaaagtcaagcatccgcttaaataactgctgagatcgaaaaaaaaaagcaaaagaatcggactctatcgaagctcgcataccccgcacggccacgctatgctccacagccgcatgggcggcccgcaggagctccgtgtagagacgctggcgcttcagctccagctcgtcgcgtcccaccggcgtgaccgggggctcgatgcagccgctggacatggaacgaggacagaggagacgatgtactggcaattcaaagcggggctgggaatgcaggggtcgacctgttctggtttcagcttaactatatggatattttgggcgtgaaaccaaaacaggatcttgggtaagcatacatgtcgttcaggcgctcgtcgtcgaaccacgagggtaatccgtgggcaaagaagagtgtttccgagacgacatccccctcgatgtagggtgcacacatgctctcccgcttgggtggcggcagtgagtcggagaacacctcgtcgtcgtccagcaaggagccctgattctggctggccagcaggagcagtggcagtggatccggctcgatgatctccgcccggttgctgatattcaccttcttcttgatcgactgatgcgttgagttgtgcctggacaggcagctcttggtgggcggcggctgaggaggcggtgtggtcggcgtgaccgtcgccaccaccaccacttcgtccgcctcctccgcgtcgccgctggtcatcgaagcaggtggtgccgtggatgtggaagagtgcgttgagcgggccagtggctccggttctttgggtgctagtgctggatttgctggtgatgatttgctagccgcttcagcctgagttggttgggctgtggaagtgttgcttaagattactctacatgaagcgacgaattaccaagacgatcatcaaggaaagcgccgatacttaagttgattacttcacttcactctctgctcacctcgcttcctgtcttcattatgtttatttatcgcatttaaaagcatttaccatggtcactggcagattgagtagttagtttttactgctcaccttattattatagaatctatagaatcttgaattttctgtctaaattattgaccttcattttagtttctatattcgtcactactatatactatacgttcactttgatggatgagcacgatctaagtgctcaacaaaaagtgtgtatgcaatgtcattagctattcctcattaatcaactgagaatcggcgcaattccttgatattcatatgtataaaattcacagaaataaaccgaagagaaagcacagtgaagacaactcataagtaaatagaaaaggacactcaaggcagcttgaagtgcccggattgaaatgaaaggaaagatcagaagtggtggtcagctgcagtggcattgcagtgagtgagagccggccggataggggccttcgttccggagagcagacaaaagccgagacagctgttgagctcgaaggccggagaacgcgaatagatggggtggtgggtaaatacttagcgttgcgtcagtaccagtgtttggctgggtgcttgtgggcacatcctcgggattatgcgcttccaagagctccttttctggtttcacaggctctggctcctccttcggagttcctggcttgccgttcagctggggttcctccttttcggtgacctgtccgccgttctcctcctctgcgttccgcttttccttctccttcttgcccgccttggggttcgatcggcagcaggagaacattttgcaggcgtgtggctgggcttttccggtgctcaacactctaggtacgaatcaagcacattatgtaagttccgtggctcgactgcggatgcccgtgaagctcaagcggcggtcacaacactgacggcacaccaaaccaaatcgaatcagtagaagcagtaacagcagcagccatataagacactcaacgggtttccaacgaacgtggccactccttgctcactgtgtacatatattcagtgtatggcccaaatttagtggcacattaataaggtcctccgagttgtccgcgccttcaactgggtcaagtgactgccgaccaagcacagaaccaaatggcacacaaatgcgattacacacggagaacagaacacaccctaaacgaagcgcacgcccacgcactcggggattcgattcgatttcgaactcgaactcgaaggtctcaacaggactctgttaggagagctccgcgctgttaactgctgagtttcgccgccttgttgggctactccgcgctgcttttgaccatttggggccagccaccgactggcaatgaaatgtgtttcattaataaccgcttttggcctgacatgcaggattttgtgcaagctccggcgatgtcttgcacttttgcagcagagaaagcttacggtccaggcggaaaatggaaaactctccgagagagttgcgcagacaccactgtgatttcgtgatacccttctcgccacgggtggcgcgacttaagtgagggaaaaccacggcgatcccatagttttatcagccctgtaaggcagggttcgcctatcaattagttgtgacaacaccgagttatctttactatttggaaagtttccaggaatgatcggtaatgaaactatgattccattttgagcattaccataacgtttgtaagccatagagagtagagagatgcaatgatcatatcttagccggctataaaaacagttttaaaatgttcagctttttgtgaagtaatctgccgcagaagagtataaaaacgtcgacgtaactgaaactcccatatcgtttgcttgccagtttttgttttggccttagtgcaatgggtttattgcaccggcaacgttgtttttgtttttaagtagctttaaacaaatggctggcaattagagtgggaaatgcatcagtagccgttggattggagggaggggctaagccgccgaggacaagtaagccgagattcaactttcgcctggcgatactagttctccttgcagtcttgatgcgttttctgcggcagatgcgtttgttgcgtgcagaaagcaaagaagaaatgg

SEQ ID NO: 10454 - DNA, 1297 bp, DROSOPHILA
gcagtcacttgacccagttgaaggcgcggacaactcggaggaccttattaatgtgccactaaatttgggccatacactgaatatatgtacacagtgagcaaggagtggccacgttcgttggaaacccgttgagtgtcttatatggctgctgctgttactgcttctactgattcgatttggtttggtgtgccgtcagtgttgtgaccgccgcttgagcttcacgggcatccgcagtcgagccacggaacttacataatgtgcttgattcgtacctagagtgttgagcaccggaaaagcccagccacacgcctgcaaaatgttctcctgctgccgatcgaaccccaaggcgggcaagaaggagaaggaaaagcggaacgcagaggaggagaacggcggacaggtcaccgaaaaggaggaaccccagctgaacggcaagccaggaactccgaaggaggagccagagcctgtgaaaccagaaaaggagctcttggaagcgcataatcccgaggatgtgcccacaagcacccagccaaacactgcccaaccaactcaggctgaagcggctagcaaatcatcaccagcaaatccagcactagcacccaaagaaccggagccactggcccgctcaacgcactcttccacatccacggcaccacctgcttcgatgaccagcggcgacgcggaggaggcggacgaagtggtggtggtggcgacggtcacgccgaccacaccgcctcctcagccgccgcccaccaagagctgcctgtccaggcacaactcaacgcatcagtcgatcaagaagaaggtgaatatcagcaaccgggcggagatcatcgagccggatccactgccactgctcctgctggccagccagaatcagggctccttgctggacgacgacgaggtgttctccgactcactgccgccacccaagcgggagagcatgtgtgcaccctacatcgagggggatgtcgtctcggaaacactcttctttgcccacggattaccctcgtggttcgacgacgagcgcctgaacgacatcggctgcatcgagcccccggtcacgccggtgggacgcgacgagctggagctgaagcgccagcgtctctacacggagctcctgcgggccgcccatgcggctgtggagcatagcgtggccgtgcggggtatgcgagcttcgatagagtccgattcttttgcttttttttttcgatctcagcagttatttaagcggatgcttgactttctgtgttctttatgtgttcgttttcgctgtgaagaagttttgagagtctag

SEQ ID NO: 10455 - protein, 326 aa, DROSOPHILA
MFSCCRSNPKAGKKEKEKRNAEEENGGQVTEKEEPQLNGKPGTPKEEPEPVKPEKELLEAHNPEDVPTSTQPNTAQPTQAEAASKSSPANPALAPKEPEPLARSTHSSTSTAPPASMTSGDAEEADEVVVVATVTPTTPPPQPPPTKSCLSRHNSTHQSIKKKVNISNRAEIIEPDPLPLLLLASQNQGSLLDDDEVFSDSLPPPKRESMCAPYIEGDVVSETLFFAHGLPSWFDDERLNDIGCIEPPVTPVGRDELELKRQRLYTELLRAAHAAVEHSVAVRGMRASIESDSFAFFFRSQQLFKRMLDFLCSLCVRFRCEEVLRV

SEQ ID NO: 10456 - DNA, 5038 bp, DROSOPHILA
tgggtgaaattaattggtgaacgagatggataataagttctattagttggcagattaatatatggcattttaaacttcttacattatattttacttgattttcatattaaaatgctgtttcctcacttagtatagaaattggggttacatcaaacataatcccatctaaagtgtaacaacacgttataatgatggaaactaggacagaatcactaggaatgcataataatagccaataaaccgtacaagctactgcatgaatcgtaatgaggtgatgaagtttcttcggaaatattcattgccatgtggttgtgtaacctggcatacaccatattttcgcccccgtttgaaaaactcgaggctgttgcaagtggacctacaattgctccgctctctgtgtgcgggtgtatttgtggttgccggatgattttgactttttgtgcaactgtacgtccgtcagtctgtgcggctttggcataaaatgtttcaagtgtcatttatattcattttcattcttttttttaaatgccggctgcagccacgcccaccgcccacaagccagcccagaccactggacgtctgtgcaaattaaaatgtttccgttgtcgttgtcgcaaattcacacacagacagacaccctcagaaggaatgagagagagacccctagtcggacgagattgaattttatggcccgacgtcgggcgccagagtttctgcgagtcctgtggatcgtgggcaggatgtcagggttgtccggatgcggattacactaattatgaaatgacatcgacaacggcgtcgttgattttaatggttttctgttgtcaacccaattaacaaattttctcgcctttcgcttcgattgcaggaaggatgctgctgatgtcaccgccgttgcagtagcaacaccaatccaaggaagccgaaggaaaatcatcatctgctgcacccactcctccccccgagaacaagccacacacatgttgctgccacagctacgatgctcagcgctgccaatgcaactgcaacagcaacacatggagcagcagcagtcgcgattgccgcagccgagacttatgtcataacaaacaaacagcagcaacagcagcagcaacaagtatttgttgttgccgccaacaaaatggtgataccagcaacgggagcaacgatcgccggtataccaacagcaacaacaacagcagccgccgagtcaacagcaacgcagcagcaccagcaacaccaacaacagcagcagcagcaacaacatgtgctgttccagccgcacctacagacaacaaccgcaactgcagcaacctgcagcacacctcagcaacagcaaccacctcagccgcggcagcatcccaagaagcgaaagttcgatccagccgagctggacaagaccgagcagcatccccagcagcagcagcagcagcaagtgagtctgcagaagcagcagaaacccgccgaaacaactgggaacggcgatggcctggccaacggcaatcagcagcatcgcatgatcgtgagttgcggtgcaggcgccggcaacaacagtagcaacagcagcagcagcaacaacagcagtcacagcagcagcgatatcaagcagcagcagcagcaacgtattatcattgcatccccgcaacatgccagcggtagtacttacaagcaacatgttgccagcggcaacaatagtcacgcagccacaatcaatcatcaacaacgcacacacacgcccacaaccgccgtctactaccaacagcagcagcagcagcaacaacagcaacaacaacaacgttttagctttaactcaaacaatcagcaacatttacaggaacaacaccagcagcagcaacagcagcaatccctgctcgatctcagcgagtggaacaacacgcgtgtcctagccaaaatccagaataactatgcacccgggataatacgccacgcccaggaggcgtctcccgactcaatactcgtggaattcgattccaccgacttgggattactgttatatacggatgtgttgcaccagggtcgtaaccatgtgatactcgatgccagcccgcccatggcggatgtgagtactccgaatacggtctcttttgtcgccctaaatgctaaggtcatttcccctttttcgattagattacgctggatgcccgtgtctgcgtgcggcagcgggtggaaggtcgtggctccggaagcttcgtctacgtagagggcatcattacggacattaaccaggccacgaagcaatacagtgtgcaactgatcggcgatgaaatggtaagggcattcagcttgcttaactttaagcttttagagttttaagttgcgaattgataagaattagtttttagttatacgaaattcccaacttataataccttgcattgttacaggccaccacaaaggttgtgcgccgtgccgatttgcggctcctgcagccgccttggtgggacgagctcaacgaactgacaacctcgggtggagcaagtgctccagcctccagtgccaagcgaaaggtgccggcagcgggtgcgggagcaggaacaggagcagcaggttgcgaggcgatgaccgtgcccagtggcaatatcgtttacccgaagacggcgaccggcgcgccattgtccttcgtggctacgcgctacgatggcaagctgcccacggcaccacccacgtcctcccaccagcaggcgcagcagcaattggtgaaacaagaagagtattatcggacgacggccacgtcgcctttccagacgcgaccccccctcgccggcccctcccacggatcggagcaagtggtccaggcgacgcagtcgcatccgcagcagtacaacggcctagcggacatcgtgatctctccgtgcagcaatgggcagcacctcaagatgcagcaacagcagcagcagtcgtcgcggggctacgacgactacgactcggacgatgaactgaaaagggtcggcatcggatactcgccagcggccggcgacctggacacggagaagatgagcgcctgcagcaagcggagcagcatgcaaagccgcggcagcacgtccagtcttctcgaccagaggctcacaccccgatctcatccagcaacaccaaggtgagcggagatctttttgttagggaaataaataggaaagtcacggcacacgaaatttcgtaattaacgaaggtttgccaaaactctacttctcatatggtttttccactctgtttgctataacttctcccctatcctttaacgcttgctaataaaccggcagtgccatccacagatctcaggccactacgccgcaccgcttcaagaagggagacatcgtggagtcggaatccggcgtgcggaagaagtacaacgggaagcagtggcgccgcctgtgcatgctctgcaccaaggaatctcagcggcgcggctactgttcacggcacctcaaccagaagggcaacaccagtgccctgccctcgtccacaggaccgggtcgtctgctcaggtgagctctatttttgctctggatagaactattttaaagttattttagttttggatgagtcttgtataagtgacaacttctcgtgatattttaattttacatatgtaagaagtaaggaattgaagtcattatagtatgagtcagatgagaagaacactccttttgcaatatgccaaatttaatatcttgattatattatcatatttcttaattatttgttgtcacaacctcttttatatctttcaaaactaaatacttataaattctaaaatatttcaaatgttagatttttttttaattttttatacagtttgttgacctcttttatataattatcaactaacctgtgcaaccattttgttttctttatattattagtgacagtcgatcaagcagtaagacgcaaatcgatgaggacacctctcgcgactcggagacgtcgccgaactatcgggtcaaaggtcgctacgatcaggaggagaccgatgcggccgccatgctgggtaagtctcttcggcaccatcacacctcttgactctttacgatctggcagagggcatcataaaagcatttaagacaccgttctggaacccggctcaaacaatttattcatagtttgcagtaattcatttcaaggctggccttcccagccctcgtgccgtcccttttcggcctgtggtgcagcgccggctcaaccgttaatccatctcggttcacgcaattagagagacaaggccagcgatgtattcttcacggcgcttgtggaaaacatttctttgatttcggttagggtccgaagaacttttgtgcaccctacttagctgggggaccgctcttcctcaatcccctcattcagagctcccccattaaggtatttcttcggaatgcagaagacgcgacggtctttcattcagaaccggatttcttaagcactgaaaaaagtctcgtttataagaccataaaatgcaggcctaaggtaaaggtcttgtcaagctccttctgaacagtaaattcgtacccataaagaggcttatttgaccaacgcataaatgtttatgggcgtagcattattattcctgaagctttagcccacagataatataatcgatattaataaaatgtaggacattaaaggaactttacttgctaggaacctattaaagtttcacaaaaggcgagcggacttggacgaattcgataaatttaaatatgaatatacttaaaatcgaagttcaatcaagtaaataatgacaatagttaaatgtgttctacgagtcctacataaattacgatgactttcaaataattggaaatttaagatattttttaagatacgggtactcttcctaatttaacgaaaaggctagcgcacttggtccagtcgtgatggccgagaccttcgtcgtctcttgttttctggttcgatgcatttccaattcaccataaaatgcatatcataaagttttattgtggcagcgccgtagttctttctttttccctccacctccatatctacctctcctccctgacctccc

SEQ ID NO: 10457 - DNA, 2193 bp, DROSOPHILA
atgctcagcgctgccaatgcaactgcaacagcaacacatggagcagcagcagtcgcgattgccgcagccgagacttatgtcataacaaacaaacagcagcaacagcagcagcaacaagtatttgttgttgccgccaacaaaatggtgataccagcaacgggagcaacgatcgccggtataccaacagcaacaacaacagcagccgccgagtcaacagcaacgcagcagcaccagcaacaccaacaacagcagcagcagcaacaacatgtgctgttccagccgcacctacagacaacaaccgcaactgcagcaacctgcagcacacctcagcaacagcaaccacctcagccgcggcagcatcccaagaagcgaaagttcgatccagccgagctggacaagaccgagcagcatccccagcagcagcagcagcagcaagtgagtctgcagaagcagcagaaacccgccgaaacaactgggaacggcgatggcctggccaacggcaatcagcagcatcgcatgatcgtgagttgcggtgcaggcgccggcaacaacagtagcaacagcagcagcagcaacaacagcagtcacagcagcagcgatatcaagcagcagcagcagcaacgtattatcattgcatccccgcaacatgccagcggtagtacttacaagcaacatgttgccagcggcaacaatagtcacgcagccacaatcaatcatcaacaacgcacacacacgcccacaaccgccgtctactaccaacagcagcagcagcagcaacaacagcaacaacaacaacgttttagctttaactcaaacaatcagcaacatttacaggaacaacaccagcagcagcaacagcagcaatccctgctcgatctcagcgagtggaacaacacgcgtgtcctagccaaaatccagaataactatgcacccgggataatacgccacgcccaggaggcgtctcccgactcaatactcgtggaattcgattccaccgacttgggattactgttatatacggatgtgttgcaccagggtcgtaaccatgtgatactcgatgccagcccgcccatggcggatattacgctggatgcccgtgtctgcgtgcggcagcgggtggaaggtcgtggctccggaagcttcgtctacgtagagggcatcattacggacattaaccaggccacgaagcaatacagtgtgcaactgatcggcgatgaaatggccaccacaaaggttgtgcgccgtgccgatttgcggctcctgcagccgccttggtgggacgagctcaacgaactgacaacctcgggtggagcaagtgctccagcctccagtgccaagcgaaaggtgccggcagcgggtgcgggagcaggaacaggagcagcaggttgcgaggcgatgaccgtgcccagtggcaatatcgtttacccgaagacggcgaccggcgcgccattgtccttcgtggctacgcgctacgatggcaagctgcccacggcaccacccacgtcctcccaccagcaggcgcagcagcaattgtcgcatccgcagcagtacaacggcctagcggacatcgtgatctctccgtgcagcaatgggcagcacctcaagatgcagcaacagcagcagcagtcgtcgcggggctacgacgactacgactcggacgatgaactgaaaagggtcggcatcggatactcgccagcggccggcgacctggacacggagaagatgagcgcctgcagcaagcggagcagcatgcaaagccgcggcagcacgtccagtcttctcgaccagaggctcacaccccgatctcatccagcaacaccaagatctcaggccactacgccgcaccgcttcaagaagggagacatcgtggagtcggaatccggcgtgcggaagaagtacaacgggaagcagtggcgccgcctgtgcatgctctgcaccaaggaatctcagcggcgcggctactgttcacggcacctcaaccagaagggcaacaccagtgccctgccctcgtccacaggaccgggtcgtctgctcagtgacagtcgatcaagcagtaagacgcaaatcgatgaggacacctctcgcgactcggagacgtcgccgaactatcgggtcaaaggtcgctacgatcaggaggagaccgatgcggccgccatgctgggtaagtctcttcggcaccatcacacctcttga

SEQ ID NO: 10458 - protein, 730 aa, DROSOPHILA
MLSAANATATATHGAAAVAIAAAETYVITNKQQQQQQQQVFVVAANKMVIPATGATIAGIPTATTTAAAESTATQQHQQHQQQQQQQQHVLFQPHLQTTTATAATCSTPQQQQPPQPRQHPKKRKFDPAELDKTEQHPQQQQQQQVSLQKQQKPAETTGNGDGLANGNQQHRMIVSCGAGAGNNSSNSSSSNNSSHSSSDIKQQQQQRIIIASPQHASGSTYKQHVASGNNSHAATINHQQRTHTPTTAVYYQQQQQQQQQQQQQRFSFNSNNQQHLQEQHQQQQQQQSLLDLSEWNNTRVLAKIQNNYAPGIIRHAQEASPDSILVEFDSTDLGLLLYTDVLHQGRNHVILDASPPMADITLDARVCVRQRVEGRGSGSFVYVEGIITDINQATKQYSVQLIGDEMATTKVVRRADLRLLQPPWWDELNELTTSGGASAPASSAKRKVPAAGAGAGTGAAGCEAMTVPSGNIVYPKTATGAPLSFVATRYDGKLPTAPPTSSHQQAQQQLSHPQQYNGLADIVISPCSNGQHLKMQQQQQQSSRGYDDYDSDDELKRVGIGYSPAAGDLDTEKMSACSKRSSMQSRGSTSSLLDQRLTPRSHPATPRSQATTPHRFKKGDIVESESGVRKKYNGKQWRRLCMLCTKESQRRGYCSRHLNQKGNTSALPSSTGPGRLLSDSRSSSKTQIDEDTSRDSETSPNYRVKGRYDQEETDAAAMLGKSLRHHHTS

SEQ ID NO: 10459 - DNA, 4351 bp, DROSOPHILA
acctggaacgtgattcgtgaggcaatgggcaacattatgtaccagctgtcatccatgaagttcaaggtgggttaacacgcaaatttatccattgcctagacactgggtgaccacatttttcaatccatttcaggaccccgttaaggatggtgaggccaagatcaaggctgacttcgagcagctgcacgaggacctgcagcaggccttcagaaatctggaggactagagaccgcgctggccctacttttacactctaatcttatatttgttatatagttaacgtttaaaaatgaaagcagtcaaaaaccatccgaaaaagcctaatcaaacaccaacaattccgtgctgcattcgatgaaaaacaaaagtccaacaaataccacaacttcttggtgcctgcgagagatgtaaacattccggcctgcggttaatactttcccctaaccacgccccctccgccccttgaagggcaactctaggcaacagcaactacaacgtcctgctatgtacttccatttacaacaacaacaccaacatacacttgaataaaagtacacggacactggcgcacacacaacacatacataaaagacacaaatacaaatgcatgcataaatagtattattgtttaatgaatggaaattcttgtttatttgtgaaaaaagtcatgttttctccctgtttgtttgttaaatttatgtaaatatttaaagtatgaaatattaaatgtacgaataaagtgcaacaacaaatacatttaatgtaattgaaagtgaatttcactggcagcagaatggatattaaaaatgtgtcaactcgataaaaagataataagttaaaatatttttttgaattttaaaccttcattatataaacatacttgactatatgaaagctaagaaaatgggaatatattgaaaagcataatctaaaatcctatatcattctcagtcatcaccttagtctttccataaacttctgccccatttattttatttatttgacaatattagtaaaaattgtaccaagtgaaaaaattgtatatatttaaaccaaatggaaaagaagtcctgggttgcaccgcttacctcgttcaccaacagtaacgcaagtaacgaagacagagcccgcaactcgggatcgttaaaccaagatggggagccaaggtccgtgcctcacccaacggttccggctaagaagtgcacatgtccaacctgcgcttgccaacgtaatgaccataaatccaatccggtaccccctccccctcaatcacgcaagcctgtagccgagccggaaagtccccatgatacagtcaatgacgaggacagtttgaaggacttgagacgttcgacggaccaatcccacaagagcgctcacatcgccttggagaagaatgaggactcgggttttgtgatcgagcaggtggttgatacgcacaaatattcgtcggatgaagaagaggaggaggcgacgatgggtcgcattttcggagtctccggtccggtggtcaatgccgaggagatggccggcgcagccatgtacgagctggttcgcgttggacactcccagcttgttggtgagatcattcgactggagggtgatatggccaccattcaggtttacgaggatacttcgggtgtgagcgtgggtgatcccgtctaccagacgggaaagccgctctccgtggaattgggacccggcatcatgggcagcattttcgatggtatccagcgaccattgaggtccatcagtgaactaaccaactccatatacgtgcccaagggcatcgatacgccctccctgcccaggaacattgcgtacgaattcacacccggaaaattgaagatcgatgctctgatcaccggcggagacatctacggatctgttttcgaaaacagcatgatgcacgatcaccgcctgatactaccgccccgcaccaaggggcgcatccggtggttggccccgcccgggaactactgcgtggacgaggtgatcgtggagacggagttcaacgacgagatcaccaagcacaccatgctccaggtgtggcccgtacggaggtgtcgtccggtggaggataagctccccagcaattcaccactcttgactggccagcgcgtcctggacgccttctttccatgtgtccagggcggaaccactgccattccaggagcgtttggatgtggaaagaccgtcatctcacaggtgagagggtttctaagagtttagttgacaaatgattacattccaatcaacttatacccctaggccctgtccaaatactccaactcagatgtcatcatctacgtgggctgcggtgagcgcgggaacgaaatgtccgaggttcttcgggactttccgcagcttgaggttgaggtcaatggcaccatggaatcgattatgaagcggactgccctggtggccaatacctccaatatgccggtggctgcccgagaagcctcgatctacacgggcatcaccctctcggaatacttccgcgacatgggctaccatgtgtccatgatggcggactccacatctcgatgggcggaggcgctgcgtgagatttccggacgtctggccgagatgcctgccgatgctggctatccggcttacttgggagctcggctggcctccttctacgagagagccggactggtgaagtgcctgggcagtccagatcgtgagggatccgtgtccattgtgggagctgtgtcgcctcccggtggcgacttctctgatcccgtgacctccgccaccctgagcatcgttcaggtcttttggggtctggacaagaagctggcccagaggaaacactttccatcggtgaactggctgcaatcgtactccaagtacatgcgcactttggacacttactacgaggaatccaatccggagtttacgcatctgcgagctaaggccaagaaggtgctgcaggaggaggatgacctggcggaaattgtccaactggtgggcaagtcgtcgttgaacgaggaggacaagatcacccttgaggtggccaagatgctgaaggacgatttcctgcagcagaactcctacagtcagtacgatgcctactgccccttcttcaagaccattggcatgctgaagaacatgatgaccttctatgatgcggcgatcctgtcggtgcagaacacggcggacaatgaggcgcgtgtaacttggggcttgatccgtataaaagccgctaacattctgtacgagctctccaccatgaagttcattgatcccaagctgggcgaagcgactgtcctggagagcatgaacaagctgcatgacaatatcctttcaactttccgggagatagaggataatgtcgaggactattagaagttgtgatggataagtgaagacttaaattattgtatcgattcgtattttaaaaattaaagtgcatcatctgccatagaaatgttacaaagcaaaatgaaatattagtattcctatttttatatattattacaaaaggtaaatgaaataacgaatgtatatataacagatattaggacattacaatctctttgataaaactacgatttaattgaattttaagagagaagccaacattagataatcataatcaaaaaagtacttacgtttgcatgcgagaggaaaccactttgaaccgaaccaccaccgaacagcgattatcgagtagtaattgcagccaacttatcgcaatcattttccagttggtgaaaagtcatttacccgccaacgcgttttgctcattagaagccataatggtgcatcgtctgcctgctctgaaaatttccacccagctcccctgcggatgccagccgcagttaatcctttgcccaacctcggcgggaacgcaaaggagattataaaaaatttggttgatttataggaaaagtttgttaatgcgccaaaagcgcggccacgccccgacaaaaacgggaaaacggaacgaatttcccagctcacacctctggcagccgcaatcggaaaagcaaacgtcaaggccctgtgaagggcttttttccgcagcaagggagcgagagatcgatttcgattcaattagtggaaattaaatgtaagtatatatgtacaagtcgccaccacgctcgctgcaacgccgctcctcccgcttcctaccccttacccccttgtgccgcccactcggtggatagcgatgattacatttccgcagtccgcccgacgcccgcccactatggcaaaccaagtcagccataaaatgagcgcccagcaaaagaagcaagccaaaaaatcagaatcagttcaattgcaaattgaaaatccccttacaacttccgtttccgctatgcgaggggccctcactgagagg

SEQ ID NO: 10460 - DNA, 2288 bp, DROSOPHILA
ttgacaatattagtaaaaattgtaccaagtgaaaaaattgtatatatttaaaccaaatggaaaagaagtcctgggttgcaccgcttacctcgttcaccaacagtaacgcaagtaacgaagacagagcccgcaactcgggatcgttaaaccaagatggggagccaaggtccgtgcctcacccaacggttccggctaagaagtgcacatgtccaacctgcgcttgccaacgtaatgaccataaatccaatccggtaccccctccccctcaatcacgcaagcctgtagccgagccggaaagtccccatgatacagtcaatgacgaggacagtttgaaggacttgagacgttcgacggaccaatcccacaagagcgctcacatcgccttggagaagaatgaggactcgggttttgtgatcgagcaggtggttgatacgcacaaatattcgtcggatgaagaagaggaggaggcgacgatgggtcgcattttcggagtctccggtccggtggtcaatgccgaggagatggccggcgcagccatgtacgagctggttcgcgttggacactcccagcttgttggtgagatcattcgactggagggtgatatggccaccattcaggtttacgaggatacttcgggtgtgagcgtgggtgatcccgtctaccagacgggaaagccgctctccgtggaattgggacccggcatcatgggcagcattttcgatggtatccagcgaccattgaggtccatcagtgaactaaccaactccatatacgtgcccaagggcatcgatacgccctccctgcccaggaacattgcgtacgaattcacacccggaaaattgaagatcgatgctctgatcaccggcggagacatctacggatctgttttcgaaaacagcatgatgcacgatcaccgcctgatactaccgccccgcaccaaggggcgcatccggtggttggccccgcccgggaactactgcgtggacgaggtgatcgtggagacggagttcaacgacgagatcaccaagcacaccatgctccaggtgtggcccgtacggaggtgtcgtccggtggaggataagctccccagcaattcaccactcttgactggccagcgcgtcctggacgccttctttccatgtgtccagggcggaaccactgccattccaggagcgtttggatgtggaaagaccgtcatctcacaggccctgtccaaatactccaactcagatgtcatcatctacgtgggctgcggtgagcgcgggaacgaaatgtccgaggttcttcgggactttccgcagcttgaggttgaggtcaatggcaccatggaatcgattatgaagcggactgccctggtggccaatacctccaatatgccggtggctgcccgagaagcctcgatctacacgggcatcaccctctcggaatacttccgcgacatgggctaccatgtgtccatgatggcggactccacatctcgatgggcggaggcgctgcgtgagatttccggacgtctggccgagatgcctgccgatgctggctatccggcttacttgggagctcggctggcctccttctacgagagagccggactggtgaagtgcctgggcagtccagatcgtgagggatccgtgtccattgtgggagctgtgtcgcctcccggtggcgacttctctgatcccgtgacctccgccaccctgagcatcgttcaggtcttttggggtctggacaagaagctggcccagaggaaacactttccatcggtgaactggctgcaatcgtactccaagtacatgcgcactttggacacttactacgaggaatccaatccggagtttacgcatctgcgagctaaggccaagaaggtgctgcaggaggaggatgacctggcggaaattgtccaactggtgggcaagtcgtcgttgaacgaggaggacaagatcacccttgaggtggccaagatgctgaaggacgatttcctgcagcagaactcctacagtcagtacgatgcctactgccccttcttcaagaccattggcatgctgaagaacatgatgaccttctatgatgcggcgatcctgtcggtgcagaacacggcggacaatgaggcgcgtgtaacttggggcttgatccgtataaaagccgctaacattctgtacgagctctccaccatgaagttcattgatcccaagctgggcgaagcgactgtcctggagagcatgaacaagctgcatgacaatatcctttcaactttccgggagatagaggataatgtcgaggactattag

SEQ ID NO: 10461 - protein, 743 aa, DROSOPHILA
MEKKSWVAPLTSFTNSNASNEDRARNSGSLNQDGEPRSVPHPTVPAKKCTCPTCACQRNDHKSNPVPPPPQSRKPVAEPESPHDTVNDEDSLKDLRRSTDQSHKSAHIALEKNEDSGFVIEQVVDTHKYSSDEEEEEATMGRIFGVSGPVVNAEEMAGAAMYELVRVGHSQLVGEIIRLEGDMATIQVYEDTSGVSVGDPVYQTGKPLSVELGPGIMGSIFDGIQRPLRSISELTNSIYVPKGIDTPSLPRNIAYEFTPGKLKIDALITGGDIYGSVFENSMMHDHRLILPPRTKGRIRWLAPPGNYCVDEVIVETEFNDEITKHTMLQVWPVRRCRPVEDKLPSNSPLLTGQRVLDAFFPCVQGGTTAIPGAFGCGKTVISQALSKYSNSDVIIYVGCGERGNEMSEVLRDFPQLEVEVNGTMESIMKRTALVANTSNMPVAAREASIYTGITLSEYFRDMGYHVSMMADSTSRWAEALREISGRLAEMPADAGYPAYLGARLASFYERAGLVKCLGSPDREGSVSIVGAVSPPGGDFSDPVTSATLSIVQVFWGLDKKLAQRKHFPSVNWLQSYSKYMRTLDTYYEESNPEFTHLRAKAKKVLQEEDDLAEIVQLVGKSSLNEEDKITLEVAKMLKDDFLQQNSYSQYDAYCPFFKTIGMLKNMMTFYDAAILSVQNTADNEARVTWGLIRIKAANILYELSTMKFIDPKLGEATVLESMNKLHDNILSTFREIEDNVEDY

SEQ ID NO: 10462 - DNA, 2836 bp, DROSOPHILA
ggtgatcctttgacagacatttggggccagggagtttgaggactgcggcagctcggcaatcactgtctttaggccaatactcgatatgtcgcgcagctgctccgtgttggacatcatgttggcgcacagcgagtccacgatggtctccacctggatctccttcaccttgttgaccaggggacccaggcacttgacagccaggttctgaacttcgccgttcttgtcttccagcagcttgagcaccattcgcaccacctttttctcggactcgtcgtccaggatgatgctatccttctgtagctccgtcatcagatcgtttgtcgccatgaaacggaagtccttgtccgtcgacgtcatctgcagcagacgagagagcggaattagaatttcgttatgttgcaaaaatgaaattctatacatactttttccagcaaattggcaatttggtggtactgatgtgacgccatagcgaaggctttgaaacgttcgatcgatagcaattaactgataagtgaaatattgtgtatttgtattgggctgccctatttttggtgttctaaaacttgaaaatttactgaaatttttccggtattgaatctccaagttttatattcactcaattttgttataaaggctgcttaagtgggcccactttgaaaaactaaaaaacccactttataatccctaatgccttttggatgccgataatggttttggtacattttcgtggtataaaatacggtggagaaatattttggaacaagattttatgtactagtaaatttttatatttaggttattttatttttgagttaatacatgacaatcaaaatataaatatatatattatcaaatattaattcccaatttatttactagtaaaatactttgtgtcattaccatcgtttcagatgaacgatatatcagctatgtggcactaagagtctcccatctctagaaaagtgccgctcgttttcaggaattattttaaactaaaccgcagctcactgctagaattcaatcaaaatacctttttaacaccaataaatgctaacaaaatggatcagattttaaacaaggaaaacaccggcattaattgtaagttgaattaggttcgactcccgttcgtgttagtaattacatagccatttatcattgcagtgccagcgaatcccattaaaaatggagttcctacaaattccgtattgaagaaacctcttggtaaccttgacaatgtgatgcaccaaactcctggaataaccccgttcaaaagcacttctctgaaactcgagggtagtattgccaagctttcgctgcgaaaggcccccaaacaaaatgtggtcagcagggatcgcgaggaagttaggtataaaacaaatagctgctttttgggcgcctacgtattgaattgcgaatacagagtcgtcaatttgttcaactacactgactttccgaacgagaaatgtttgaagaactgcagcaagcgtaagtaccgctcatattaaacaactccccttgaaaattgtactataagttgtattattacagcggtcacagagacctggtcggaaaatcaagagggctatgaaggactattggatcaactttatcttgatctgcgcacattggaaaataatttggaaaacagatgccttccgcccctagattttactgacctgccatacatatacaacacagaaaacatggagcctgcagagcctgaatacttattaaatttatatcccccattgcctaacttggaaggcattgatgttctattttagatccttgtttaaaagttctatgattaattgtagtttaatattttttagctaggtatctttgtactactaattaattatttattaatgttatgctaagagaaactgttataccattagctatccaagtttgttgtctcgaatcacatttgtgaaaaatattttttttacgctacaatatatttagtagtttaagaaccgacattaagcctccaacaggcaattatatgtgtacgatgtacctcgtttggaagtgattttgaattaaagcaactataaaaactaactgggagattaatttatggagctttggagttcagttgtgaatgtaaacagagtttattgcttccaccttttgtctcttgatatttatcagcattcgcggggcttaagtatattcactccgtttatattgaatttgatatttggtggaataattctaatctatttttagggtttcctctgtgtttgcctaatatgaaaagtttatatttatttgggaattaaacatttttgttcagtaaaccaaaatattttcccagctagctagcttttgtttgcatcttgttagccttttcccgctaaatgacgtctggcttttttctggtggccaacagttggcaacactgcggcacagtaatgtatccagttttttttacattgctgcagaaaggtttctcgtctcgctggtgaccttagtggtccgttctcctggataaaataaaagtgaaaattaacaatatgagtgtataaaacgaaatgtaaatgcaaaagaggtataaatctaacaaataaacatatactcgtgcaaatgaacataaaaagactcacttaagatgtgcaattgttcactaataattgtgtttgtgttaaaattatgacctaatacggcaattggtacaaaatacatacgcatttaacaaactttccgaccacaccgaatcgaaagacttaggcgacaaactcgtaattgccgagggatgttgcgatgtacatatgtttaaagacgtggcagtgtcaccagtgcaacaatacatctcttgtatgtatgtaaa

SEQ ID NO: 10463 - DNA, 710 bp, DROSOPHILA
cagctcactgctagaattcaatcaaaatacctttttaacaccaataaatgctaacaaaatggatcagattttaaacaaggaaaacaccggcattaatttgccagcgaatcccattaaaaatggagttcctacaaattccgtattgaagaaacctcttggtaaccttgacaatgtgatgcaccaaactcctggaataaccccgttcaaaagcacttctctgaaactcgagggtagtattgccaagctttcgctgcgaaaggcccccaaacaaaatgtggtcagcagggatcgcgaggaagttaggtataaaacaaatagctgctttttgggcgcctacgtattgaattgcgaatacagagtcgtcaatttgttcaactacactgactttccgaacgagaaatgtttgaagaactgcagcaagccggtcacagagacctggtcggaaaatcaagagggctatgaaggactattggatcaactttatcttgatctgcgcacattggaaaataatttggaaaacagatgccttccgcccctagattttactgacctgccatacatatacaacacagaaaacatggagcctgcagagcctgaatacttattaaatttatatcccccattgcctaacttggaaggcattgatgttctattttagatccttgtttaaaagttctatgattaattgtagtttaatattttttagctag

SEQ ID NO: 10464 - protein, 199 aa, DROSOPHILA
MDQILNKENTGINLPANPIKNGVPTNSVLKKPLGNLDNVMHQTPGITPFKSTSLKLEGSIAKLSLRKAPKQNVVSRDREEVRYKTNSCFLGAYVLNCEYRVVNLFNYTDFPNEKCLKNCSKPVTETWSENQEGYEGLLDQLYLDLRTLENNLENRCLPPLDFTDLPYIYNTENMEPAEPEYLLNLYPPLPNLEGIDVLF

SEQ ID NO: 10465 - DNA, 3078 bp, DROSOPHILA
aggccggcaaccaattgcagcgggttttccacgaaaatcacgcgatattcgtccagtcccgcgaggtaatttttaatggatcctgcccccttataagctgacacgtgctggggcagtcattttcatgtacatacacatatgtacatttgcaccccgtgtatacgacattattgattttttccggttgtcggactttcgccttaaactctttgaacttcctgtggcacgtgtccttgacagcggtggggcaactaacccaacaatgttgtcggtgtcccattcaatgtgaaggtaagagcgaagttgctacttacccccatagctacatgctaagtcactaaaatttctttcagtgtacagctaaccacgcccctgccccaaggtccttgctcaagttgtggcagccagttcgtctggtatttcagtcaatgagttgcataagcaaatcgacgattttaaaagagccatcagcgatttacaaaacaacgtaaaaaataattctttaaaaatgattgtacacaacaagtctatatgtacatatgtatgtacatacatagatgtgtgtgcaagatctatataattaaaaaaacaaacacataacaagctaataaaacaatatatttttcctcattaaaaattgattgataaagacacagttccaggaaatctgtgcatatactccattaaaagctatttacattttattttacgagaataagagaatttcaagtaattaagtttaataattaaataggaataagggtattttataagtgaaagggtatttcaaggacagtattgctttcgacacagtagggcaacctgaaaatccttgagaaccattcgagtgtgcgtgcaaatcgccagttaacccctgatgtccttggccgattccacgtatttgttgcgaaaaaagcaaggaaagctaaagatttaacttttatacactgaggtagcgttgattaaaacttcattatatttccagccttttttcgaagtggcaaactattcagtagggaatgtaaggccaattttcgtatattttttaatttggtatagcaaacgcaaacgctatacaagaaaatttaagttttttttttaacactttaatacacggctgaattaatggatagacaaggtgttcataatagctatgggtcaatagcgaaagacgcaatagatgagcaacggatggtgctatcgatgccacaactgtccatccagaggaaatccgttacaagcatgaagttattcaccatggtggtgttgcactcgtggcgccaacgccgaaaggaggttcgtgaactcaaagagatggtgcaacacctccaggatagcgttagtattgatggttttaacaatttgtttatacgaattatacgtataggattatgttactcaccactttcttccagtccatgaagaccaaaaacgaactgcacgtatgtggcacattgatgcgtgtggaggaaaaacgaaacagggaacttcaaataaagcttaagctatcgacgatgagcattgaccaagtaaggtcctcctgtgaatctcttgtcaactcggtccgtgacctcacaacagagaaaaggcgattggaaaccgatttggaacagcgcttgcaggaggttagtagaattatttaggattatatgaaagtactaaacgaattcatttttccttcaacttaattaataagtatcacttcttcatactaacaagcatactttttgcagctgtgtctatattattatagaaaattgatataaatgtttcctaatttgcagtacaatgagctggaggaagtatctgacaaaaccaaacggctgctcttcagcgcctacgtggaacaatctagcctgcaaaagcaactagctgaggagcagcgtacgacgcagagattgcaggcggaaaaggaccagctaatccaggaagtgatactggcggagggcagagataacaagtaccgccaggtgcgggaatggtaccagcgtgtactgcacaaaaaggaggtgtgcatttacaacctgggaaggagattgcatatgctggaggagcaactgtttgacattaatgagtaagattatttatgctcatgctcattatcgttatactttcccatctgtataacgaataacacagcactattacaataacaatttctttgcattactgtgcactttaatgtacacttttaagcgcttttatcatttattgcatcatgtcgttccttttgacatatcacccactcctgtaatcgaagggcagcagcttctcggtaatccaatttgtaaacttggacacctccgtatatatggccggaatgccctcctgcccgcacccaacgccccagtttactattccagcctgctcgtacacaccagagttctcccctccgattgaacagaatagggccgatcctccatcaccggtgcaggtatcgcggcctaactcgcctccggcgcaaatgatgttcttgggcagctcaaatttagcgcccaacctggtcgacctcaagaacttctcgcaaacatttcgatttaccacgagcaactgaactttcttcaggacggtggagtatcgttgatcctcgtatctcatttttccccaaccggccaccgtgcaacgacgtcctgcgaacgatttatttggtgtaggcaaacagatagttctgatgtgatcattcagtttgaagggcgaatttaggaaaagtaacgccaagttgttggcacctgatttgaagtcaaatccttcatggattactgccctttcaacttcgcgctgctcagacaaaaatatctctcgatcggattttaagtcccaatcgccggccctgaccacaagttcggtttcgattgtaattacccggtgagctactgttagaacgacatttggttgaatcagggatccgccagccaagtactgtccattgtgaaaaatagcaacagcccagggatattgagctggtcgtgcttgatcaatggttattccttctaccatttgcaagccatttgcgttgctcatgccgcaacttggtgacaaaagctctgagcttccaacattggtagtcgggttccctcc

SEQ ID NO: 10466 - DNA, 842 bp, DROSOPHILA
gcaaactattcagtagggaatgtaaggccaattttcgtatattttttaatttggtatagcaaacgcaaacgctatacaagaaaatttaagttttttttttaacactttaatacacggctgaattaatggatagacaaggtgttcataatagctatgggtcaatagcgaaagacgcaatagatgagcaacggatggtgctatcgatgccacaactgtccatccagaggaaatccgttacaagcatgaagttattcaccatggtggtgttgcactcgtggcgccaacgccgaaaggaggttcgtgaactcaaagagatggtgcaacacctccaggatagctccatgaagaccaaaaacgaactgcacgtatgtggcacattgatgcgtgtggaggaaaaacgaaacagggaacttcaaataaagcttaagctatcgacgatgagcattgaccaagtaaggtcctcctgtgaatctcttgtcaactcggtccgtgacctcacaacagagaaaaggcgattggaaaccgatttggaacagcgcttgcaggagtacaatgagctggaggaagtatctgacaaaaccaaacggctgctcttcagcgcctacgtggaacaatctagcctgcaaaagcaactagctgaggagcagcgtacgacgcagagattgcaggcggaaaaggaccagctaatccaggaagtgatactggcggagggcagagataacaagtaccgccaggtgcgggaatggtaccagcgtgtactgcacaaaaaggaggtgtgcatttacaacctgggaaggagattgcatatgctggaggagcaactgtttgacattaatgagtaa

SEQ ID NO: 10467 - protein, 216 aa, DROSOPHILA
MVLSMPQLSIQRKSVTSMKLFTMVVLHSWRQRRKEVRELKEMVQHLQDSSMKTKNELHVCGTLMRVEEKRNRELQIKLKLSTMSIDQVRSSCESLVNSVRDLTTEKRRLETDLEQRLQEYNELEEVSDKTKRLLFSAYVEQSSLQKQLAEEQRTTQRLQAEKDQLIQEVILAEGRDNKYRQVREWYQRVLHKKEVCIYNLGRRLHMLEEQLFDINE

SEQ ID NO: 10468 - DNA, 4836 bp, DROSOPHILA
cacgccccgaaaaaaataggcaacaaaaaacaagcgcaatattcagtgggctttcgggttttccactcccagtccagttctctcctccagcagttgctctgcccgtcctacacaagcctcgccgttgtccgtcgctggcttgcccgcatcctgtatccaggtgtcctgcctatgccgcaggagcaacaatttgccactggctgccacgcgaccagccctcgtttttgcttaatatttaatgcacaattgcagacccaaaatcaataggatttctttggttcgacacagcacggttgcaaggatcgcggttggctacgattcgtttttactgagactgcgaccaactctgggactagctccctggtacttggcctccaaagctctgggcacggacgattatttccggattaattcactgctccgcgaaatattgcattgttttgtgaccgagtaagagtgaccgttcgcggggtggtcgaatattccaggttgagtcaagcggtgtgaccaggcgacggggcaagccattctgaaaaaatactgaagtcctcgaatcacataagcttttccattaattatattttttaaatttaatagcttatgttctcacaaggttttacacaaatttgtgcttcagtgtgcactcactatttggtgaaaagcgaaaagacgtttgcatctatattgtgttataagaaacaattttttttgttaaccaaatagacaatattcaattggtggtacaaaaattaagatcatcatttttatgagcttaaattagaattcttaaattagaaaaggccatgtaggaatttcaattatcctaatataagcacataagcctattactagggaaaaaatctcaaaaaaattttttaaaataatagcaagtacctgttacaacaacatgcaatcccaattggcattgctatcgatagcttgaaaaacacctgtttggccatccctggttggctgttggtgcaatcgatttttggcatcgactggatgcccatgccaacaacaatgtttgcttttaaaatttagattaaatccgttaaaaatccgtgaaatcaaaacaaaagcagtggagctgcttcacaacaagattatcgtgcttactagaaagtgaagaaccacggagttaccgcgccggaagtacaaaagtaatcaccaaatcggaaatccgaaaagtgaatcagaatttttctagctcacacacacacgcgcgcatacccgcacgcccagcaaacactcatgcaagcgtatggaaccagtcgtgttgttgttgttgctgtgaataagtgcaagtgaagaagaagcagaaactgtgatcggaaaattaagcaaaaaagaaaaacaggcgaggaaaagtggggttggggaaaagcagacggaaaagtggaaaggcggagtgcagctaacacgcttcgctggctgcgcgacagcagaacgccagtcaagcgccaaaaaccattagtagaaccccatttccagctggagcggcacaagaaagcaattttctggtagcagaaacaccaagaaacgaaaataattggccgatctttagagactcgactcgacgacaattagccggaatggagctgaaagtttgggtcgagggcatccagcggatagtttgcggcgttacagtgaacaccacatgtcaggtatgtgagctacagcagaggtcaaaataatagcactattatcttgttaaagcattttacactgctgcagtgctgttaatgtgacccgaactgtatgcgctctgtttgctagtcagtttgccctaattatcgttttattttccacaggatgtggtttttgctttggcccatgccactggaaaagtgggcagattcactttaatcgaaaggtggcgcaataacgaacgccacctggcccccaatgagaatccaatgaagctgctgctcaaatggggcgagtatgcaaatgatgtgcagtttatattacaacgttcggaaaacaaaacacagcagcagcagcagcaacaacaacagcagcagcagaacaataataataataacaactatgctgtgatgacaacaacaaaaaagccgctggggccgaacaacaataacaataataagccagcgcccactttgctaaagcaaaagtcgaacgtcgaactcagctaccgcacaaaggaattgaaaaaaagtttcgggtgggtggtttttatatgctagttagtttggaaactaccccttaaagcgcttacctagccctaattgttaataggctaacaaactgtgtttaaatatgcacctgtgcggctaccatcaactgacaaaacttgtctctttcaggggccacgatgccaagcagtttgacaacattggaatcgtcaagggaattccgcagcagcagcaattgcagtcacaacaaacggccatgggagcaccggcgagtccaccacaggagcagctgacaccgcaggataacaataatgtagcaccactggtgccaaagcatgagaaatcgctgtccaatccgctggacatgaccagcacgggtagcaatccacccgcacctacaaatggctacaatgacttctacaacaataacagcagcagtaatcagcatatatacagccagctgagcaaatccagcaatgaactccgacgctccagtcccaacgaaatgtactacaacaataataacaatattgttaataacaataacaactcaccggagctgtacaagcaaacgccgacgatttccgcgaatggagctctagtcccaccaccatatcgtgacccgccacccccgagaaacagccccatgtgccaggggcagcgtttggccagcagcaatgcggacaccatgtccaatgcctcctcctcgacgaatccgtttctcagcgactacgatcagcatagcagccacaacactaatagcatcaacaataatagccaggccatggaggagggtgagcccatgttccagaccacgcagtataacgatttgctgcagctcatcaagtttcagcgggagaagatcacagcccagcaaatggaattgcaaaaggtacaaatattcaagtttctaaattgatttggaatgttattattttatttttgttttatctgcttagttcgatacggaaatagtttatttggagagcaaagaacgcgaccacgcccacgagttggatgctatttcgcgtgagatttccaaggcggatcaaatctttcggcaaggaagcgaacagctccagactctgcagtatgtggaagaggaaaacgaattggtcaagcagcaagagaagactttgaaatcagaaatagctctactgcgatccaagctggccaattgcgaaacagagctgctacaatgcaagaacaaaatgcgcttgctgatggatgacattgagctggagcagcaacatcaacagcagaccaataggtgagtgcatagcaatttacttgctttgttttaagtttttcacacttcttggttgtttcaggcaaactgtggagcgagacttcttgatggaaatggagcgcattcagagtgaaatcgaccaggctctgcacaacactgacacttcaaacaaaactgcagatagtttaaagaaggaactactcatgatcgagcatgccatcgcggacaagaagcggcaggtggagcagctggtcaacgagatgaaggaggtgaatttgcagagcctgactgtgaccaccacggaggagatcaagcatctattggaaggacccaacaagcagggcagcagccggcggatcatcggttcgcccaggcaacttgaaacggcggttccaaccagtaaaaatcctcatggtgtgtgggtttaagtcacacatacccagaactatttttctaaacgtatttctcctccaacaaaataatgtttttgggaacaaattgatcaacatatcttgaatgcataatggagttgaaacgaaatggattccttatgaatatcacaattttaaacaatattctaaaaatatttacaataattaacgtgcttgattgttgttttagtatgtttacattccaatcacactctatggatctctcaatgcaatgatatatgttacaaatttgaaatcacaatcgttttattactctacattccgcactgtactttgtatttaatagtagttaatgagtcccatattcacatgccctaatcttaattttgtgtgctatacttttggttaatttttgctgctagtctacgtgttaacaaaaaccctttccaatctctacaattcgccattagttgttaacttgacaatgaattttaattgttgcaataattcgagagtatcgtaatttaaaaacgcctttctaacgaataagtagtgcccttagtgatttgtctcctacagaattattcattgtagaattcacaattcgaattacacaaaacttattgtacttagcaattagcgcagctttaaaaaaacaaattagcaatgctttgttgaaaagtttaacttttaaagtgcttagccttagccaccggatatcgaaacaaaagaccgaagcattaacaattgcaaaggtatcaagcattagtacatacataattgctagcgtacaattaaaagacaacccacaagtcgctttgatgtattatgtttttaattagcaatatttaatatttacacaaactgatgatgatagtgaactacaaaacaccaacggaaatgcaatttatcgaatattatatattactattacatttaaactaaaaacgatttagaacaaattgtaattgcattacatctaattagctaataaatacatttttatgattttctcgaaacgaactgtctgtattta

SEQ ID NO: 10469 - DNA, 2419 bp, DROSOPHILA
actggatgcccatgccaacaacaatgtttgcttttaaaatttagattaaatccgttaaaaatccgtgaaatcaaaacaaaagcagtggagctgcttcacaacaagattatcgtgcttactagaaagtgaagaaccacggagttaccgcgccggaagtacaaaagtaatcaccaaatcggaaatccgaaaagtgaatcagaatttttctagctcacacacacacgcgcgcatacccgcacgcccagcaaacactcatgcaagcgtatggaaccagtcgtgttgttgttgttgctgtgaataagtgcaagtgaagaagaagcagaaactgtgatcggaaaattaagcaaaaaagaaaaacaggcgaggaaaagtggggttggggaaaagcagacggaaaagtggaaaggcggagtgcagctaacacgcttcgctggctgcgcgacagcagaacgccagtcaagcgccaaaaaccattagtagaaccccatttccagctggagcggcacaagaaagcaattttctggtagcagaaacaccaagaaacgaaaataattggccgatctttagagactcgactcgacgacaattagccggaatggagctgaaagtttgggtcgagggcatccagcggatagtttgcggcgttacagtgaacaccacatgtcaggatgtggtttttgctttggcccatgccactggaaaagtgggcagattcactttaatcgaaaggtggcgcaataacgaacgccacctggcccccaatgagaatccaatgaagctgctgctcaaatggggcgagtatgcaaatgatgtgcagtttatattacaacgttcggaaaacaaaacacagcagcagcagcagcaacaacaacagcagcagcagaacaataataataataacaactatgctgtgatgacaacaacaaaaaagccgctggggccgaacaacaataacaataataagccagcgcccactttgctaaagcaaaagtcgaacgtcgaactcagctaccgcacaaaggaattgaaaaaaagtttcgggggccacgatgccaagcagtttgacaacattggaatcgtcaagggaattccgcagcagcagcaattgcagtcacaacaaacggccatgggagcaccggcgagtccaccacaggagcagctgacaccgcaggataacaataatgtagcaccactggtgccaaagcatgagaaatcgctgtccaatccgctggacatgaccagcacgggtagcaatccacccgcacctacaaatggctacaatgacttctacaacaataacagcagcagtaatcagcatatatacagccagctgagcaaatccagcaatgaactccgacgctccagtcccaacgaaatgtactacaacaataataacaatattgttaataacaataacaactcaccggagctgtacaagcaaacgccgacgatttccgcgaatggagctctagtcccaccaccatatcgtgacccgccacccccgagaaacagccccatgtgccaggggcagcgtttggccagcagcaatgcggacaccatgtccaatgcctcctcctcgacgaatccgtttctcagcgactacgatcagcatagcagccacaacactaatagcatcaacaataatagccaggccatggaggagggtgagcccatgttccagaccacgcagtataacgatttgctgcagctcatcaagtttcagcgggagaagatcacagcccagcaaatggaattgcaaaagttcgatacggaaatagtttatttggagagcaaagaacgcgaccacgcccacgagttggatgctatttcgcgtgagatttccaaggcggatcaaatctttcggcaaggaagcgaacagctccagactctgcagtatgtggaagaggaaaacgaattggtcaagcagcaagagaagactttgaaatcagaaatagctctactgcgatccaagctggccaattgcgaaacagagctgctacaatgcaagaacaaaatgcgcttgctgatggatgacattgagctggagcagcaacatcaacagcagaccaataggcaaactgtggagcgagacttcttgatggaaatggagcgcattcagagtgaaatcgaccaggctctgcacaacactgacacttcaaacaaaactgcagatagtttaaagaaggaactactcatgatcgagcatgccatcgcggacaagaagcggcaggtggagcagctggtcaacgagatgaaggaggtgaatttgcagagcctgactgtgaccaccacggaggagatcaagcatctattggaaggacccaacaagcagggcagcagccggcggatcatcggttcgcccaggcaacttgaaacggcggttccaaccagtaaaaatcctcatggtgtgtgggtttaa

SEQ ID NO: 10470 - protein, 607 aa, DROSOPHILA
MELKVWVEGIQRIVCGVTVNTTCQDVVFALAHATGKVGRFTLIERWRNNERHLAPNENPMKLLLKWGEYANDVQFILQRSENKTQQQQQQQQQQQQNNNNNNNYAVMTTTKKPLGPNNNNNNKPAPTLLKQKSNVELSYRTKELKKSFGGHDAKQFDNIGIVKGIPQQQQLQSQQTAMGAPASPPQEQLTPQDNNNVAPLVPKHEKSLSNPLDMTSTGSNPPAPTNGYNDFYNNNSSSNQHIYSQLSKSSNELRRSSPNEMYYNNNNNIVNNNNNSPELYKQTPTISANGALVPPPYRDPPPPRNSPMCQGQRLASSNADTMSNASSSTNPFLSDYDQHSSHNTNSINNNSQAMEEGEPMFQTTQYNDLLQLIKFQREKITAQQMELQKFDTEIVYLESKERDHAHELDAISREISKADQIFRQGSEQLQTLQYVEEENELVKQQEKTLKSEIALLRSKLANCETELLQCKNKMRLLMDDIELEQQHQQQTNRQTVERDFLMEMERIQSEIDQALHNTDTSNKTADSLKKELLMIEHAIADKKRQVEQLVNEMKEVNLQSLTVTTTEEIKHLLEGPNKQGSSRRIIGSPRQLETAVPTSKNPHGVWV

SEQ ID NO: 10471 - DNA, 3079 bp, DROSOPHILA
tcaagtatatgagtacttgtgaaataaaaatgttttgaaaatttaacttaatttacttaaaatgagtgccacagatgcatctacagccgatagtggcgctaaacgaaaatcttctgaagatatcacacacaattgcaacgcaaattttggcgcagaaaacggcctaagaaagcgcgtaaaatcggaggagcctgtggcgtccattaaagatgaaacaaatcctgaagttcctatgaaaataaaagctgagccagtggagaatgcagatgagcccacaagcactactcctgcgatcaagattaaagccgaaccagcggacaatggaaactcacctgcagctgcgatggtaaaaaccgagcccactaatagcaatgcacaggacgccgccgacgagtctaccgtatcttcaagcagtattaggacttcttgtcgcttcggcatacgatgctacaggtgattcacactaaccaactcccatattaccaactaaaaatatacctttttccaatgacaggcgaaatccagctcatcgtagtgcagaagctcatccgggggatcaggattaccggcgaccaaactttccagcgccacccctcggaactccagcttgtcctttcggtaacgcatgctatcgccgtaacccagttcacttccaggattactcccatcctgcggattgtaagtagaaggcttggcatacttcggcttcaaattggctaaagcccattgtagtcaattccgcgcagaacattcgaaatcgtctgcgtcaacggcgagcccaacggcagaacgacgatgactcggggacggatgaggaggatgaaccctttggtggcgacaatgacagggatgcggactaccgtccaggcgcagacataaacgaagatgaggatgatgagctggagtttgatagccaaccaataagtggggatgactatgattagactataaattcaaattcgctgttaacttagatgatacgttccatttgccgaataataggctttatatatatatattatattctgttgatgaaaacttatgtctatggagttccattagtagaagccctcgtcaacttcatcggctggcttttgatcaaaagtggcgccccattttgcagcctctccgccgcgaacttttacattgtagcaaacattctcggccttaagaacgctctgcttcatggtagtgatcttacgccatagttcacgggctctctgacagtttagactgatgtaactgaaaacaataggaagttaattgagtttcttaagggagaactaaccaacccgctgtagaaatgctgcagggccttgcaggtgtccaaacaggtgtctgtatctccactgcctagcgaatttatgcagcggcgcatcagttcaccagtaagatccgaaagtccaagtatatattccgtggggtctacgaaaaactggaacttctttgggctctcaacctgagctatagcctgaacatcttcgccttcagttggttcttcctttggctggctgctctcctcgacgtactgcatcaccgcctgaatggcctgccaatctgaaacgctcttggtttcgttctcgccctcagcatcctcgtggcacaggtactccatgtaggtgtaggcctcgataaactcctgcaatcctggagagtaggagctgcggaactggtagacatcctggtcgcgcagttccagggccacagccctaaagttaaccgcgatcagcttgttcagtcgctgacgtgcctcctccaggaccttctccttattctgcttacgcgagtcaatggagtgcagcaggaagatgatacgcttggactcgatggtaatgtcacggctcagcttgacaattcgctcgtggcgatcgtgtttcatgatcaattcattagaataaattcgaaattgttggacaatgggactgtcttcatccagctgggcagccggtatttggcgcttcctgggagcagtgttcctgtgaccagcacctccgtttttcggcattattgatatcttacgcgattctatttgaacggcttaaatatgtttttttttttgtttttatttttttagattttcaatcgcgtcggcaaaaaatttattgtaaacaaatgtccgataattgaggtattaaccatatcgatagttgccgacaaatatcgccacctgatatcggtgctaagacccgagaaactttcgtggcaagaatttgttaaaaatatacaaataattaaattccagccctaaggcaatgcatgatccggtcaaaaagtcggctcacttgaccgctggctccaccagcacagcggagaagctgtgcttcgacaagaatgagtttatgaaggtcagtaatccatgtcagatatgtgttcccttgctaaaattacttcgaacaggcaaacttctcggtggatgagtttctgcacaagaaccgcaatgcgcccagtctggagcagctacgcgacaacctgggcctttacctcaaaggtctgcgggcggccatgatagatttgatcaacgaggattacgcagacttcgtaaacttgagcgcaaacctggtgggactggaccagaatataaagaccattcaacagccattggagcaattccgcagcgacatcgagagcattcacggcttgatagatgagaacgtgaccgagctgcgggcccagttggaggaaaagcgtcagcttcgcgagttcaaacgcggtctgcagagcctcaagaaagtgtatgagaccattaacaagcttcaggatctaatcgaccgaaagctcagcggggaacaaccaattaaggccgttgacctggagcgcgctgctctggacctgattcaattgaagttccatgagaaacactgtttcaagcacttaagtcccgaccatcaagggaagatccaacagctagaagagcaattgcatcagcatctgcgacgcttcttcaatgacgcccttagccaggcacgcaactcggcaccggaatccttagagcgctgcttgcggatctacataactctaaatgcctgtgatcaggcagagtgcgccttccgcgaggatgtggtggcaccgtatatgacgg

SEQ ID NO: 10472 - DNA, 1029 bp, DROSOPHILA
aaaatctaaaaaaataaaaacaaaaaaaaaaacatatttaagccgttcaaatagaatcgcgtaagatatcaataatgccgaaaaacggaggtgctggtcacaggaacactgctcccaggaagcgccaaataccggctgcccagctggatgaagacagtcccattgtccaacaatttcgaatttattctaatgaattgatcatgaaacacgatcgccacgagcgaattgtcaagctgagccgtgacattaccatcgagtccaagcgtatcatcttcctgctgcactccattgactcgcgtaagcagaataaggagaaggtcctggaggaggcacgtcagcgactgaacaagctgatcgcggttaactttagggctgtggccctggaactgcgcgaccaggatgtctaccagttccgcagctcctactctccaggattgcaggagtttatcgaggcctacacctacatggagtacctgtgccacgaggatgctgagggcgagaacgaaaccaagagcgtttcagattggcaggccattcaggcggtgatgcagtacgtcgaggagagcagccagccaaaggaagaaccaactgaaggcgaagatgttcaggctatagctcaggttgagagcccaaagaagttccagtttttcgtagaccccacggaatatatacttggactttcggatcttactggtgaactgatgcgccgctgcataaattcgctaggcagtggagatacagacacctgtttggacacctgcaaggccctgcagcatttctacagcggttacatcagtctaaactgtcagagagcccgtgaactatggcgtaagatcactaccatgaagcagagcgttcttaaggccgagaatgtttgctacaatgtaaaagttcgcggcggagaggctgcaaaatggggcgccacttttgatcaaaagccagccgatgaagttgacgagggcttctactaatggaactccatagacataagttttcatcaacagaatataatatatatatataaagcct

SEQ ID NO: 10473 - protein, 298 aa, DROSOPHILA
MPKNGGAGHRNTAPRKRQIPAAQLDEDSPIVQQFRIYSNELIMKHDRHERIVKLSRDITIESKRIIFLLHSIDSRKQNKEKVLEEARQRLNKLIAVNFRAVALELRDQDVYQFRSSYSPGLQEFIEAYTYMEYLCHEDAEGENETKSVSDWQAIQAVMQYVEESSQPKEEPTEGEDVQAIAQVESPKKFQFFVDPTEYILGLSDLTGELMRRCINSLGSGDTDTCLDTCKALQHFYSGYISLNCQRARELWRKITTMKQSVLKAENVCYNVKVRGGEAAKWGATFDQKPADEVDEGFY

SEQ ID NO: 10474 - DNA, 27315 bp, DROSOPHILA
ccggggcataattttccattttcttcgttcatgtgctcgtgtgttcgtgtgttcgtgtggtgttgatggcataaacaaaacacaccaaagaatggaaaacaagcagcatgaacttgattgacaaagctccccttcccctttttccttaacttacatatatctaagcatatagatttggatcctaccttgacggtggtgttcttaatgggcttttccgcatcgtgcacatactccagcgttattccatagaattgacccttgttgatgtaggtgatgcgatcgtcctcgcgcctctgcgatgaactgatggggctctccaggtgatatcggaagcccacgtttgtgaagctaatgggttgtatttggaaaaggtatcatagttagaagattgttaatgaaaatgataagaattgtataataataaagttgccaaacggggtccttataagtatattactaattttcaataagtatcaatgatttagttttctttcagcacaagttattagtcatttaaggatcttcatatgacttacatttttggtatttgtattttgtcggcatcattctgacgtccaaagtcgtgccagggccgcgatcgcgtggatccattggtgctggtgtccaccagcgatgtggtgggactgttctggctgccatggaccgccgttctctgctggatgctgttcacgctgacgggtatgctgccattggcatcgatcagcgtgcccggctggcacaattccgtataatcaaaggactgtttgtagagaaaaattttagaattatatagaaatttgttatgacaagcacttattagattatataagagatacaaaaagactacctttacgtttctagggcttaatggacacgtcacgcttttgacaaacactctacaatttcgctacaaatctacttaaatgtgattcttatctgatttagtgttatgtacaacacactacctctaagttatggttttctattcatattctatattttaatggacacgcaacgcattaacaaacataactactttgttttgattgtggcacatttgggattctatcgtggggtatacctgttggatatttgtctgatcccgcggtgtaatggcatccgtaccaatgcccgaatccggacttggcaaatccaccgttagacccgccgccgtaatggctttggcatagagtggcgttgctccgccattgctcttgccatcctgcgaatggtgctgttgctgctggtggtgctgttgctgctgctgctgctgttgatgctgctgttgttgctgctgctgttgctggtggtgatgcacgctggttagcacggtggtggtggcgggcgggggaacgctgccggcaaagcggccctcataggtgaccactccgccgggctgagatacggatacgtccacgtcgccatacaaagacctcgtgctggccggcacatagccaccttggccatccggtgcaaagtattcccgatagtaggagggctccgctataaacgtggtggtgctggtgggcgggggaccgggtggcaggcgactggccgtgtacatgccatagtcattggccgtgatatagggacccggactgggactttgcgcctgcatggacacaccgccgccgccggcggctccagcgggtccggcgccgccgcccgctccgctcgccgtgctgggatgtgaggtctgcaggtggttggttgggtcacacatggcactaactcgcttgctcgtctcatcgagtgttctcacctgtagatagatctgtgtgccgcccgtggttgcatacatctctagtgtggctgtggtcctggctcccggcgatcctgattctgatcctgatactgactgtgagtccgattcagtgttttcagtgctgttgatgctgctgctgggtgtgctgggcctatcagcttcacttgccgttggtgcatccacgtgcaagatctgcgggaaaggtgtgtggttgttgggttgggattttttagcttgaatcacttaaagctaaggtctgattgagaaacggtggctaaggaaatgatcgattgatcaggaatccaccgagattccaagatattctgtcattgtggctaatagtccaacagaccaatgattgatgattgatcgttgtttatggccagcatagcacagcacagcacagaaggtcgcacagaaaccccaaaaaaacgaggtgacaaaattgtgcgtgcgttcttttgggccatgatgtggatttttctttcagccatgattcatacaacaacagcagccagcagcttattgaatataacgtcaacaagtacagtttataataaaaggctataaacacaacaaaaaaaatgctatatacgaaaacgaaatgaaacagtcgccgtcttcgttgtttgtcggtcgagtgggaaagaaaccaattaaaaaatatacagaaaaaaagcgcgaaaaaatcaacatttatatacggcacatgtatatacggtttgaaatatatatatatatatatatgactatatgcatatgttaattatcattgtttttttttttttattggccgcccgaaaatgtcaaacgtttttggagacaaacgcaccgaagctaaatgaggtaatacagagcaaagtgtggtcaatccatgtctttttctatatatatatatatagatatcgggggtctaagattgaaattagcaacgaactgctgattgccattggtctaaagaaagtgaaaccccgaaagagacacaggtccagccgaaagacgtcactatttggctggccttttgatcgaaaccggttgacagcgttttgggcctcaactttttgggggtaattttcgttacacttttcggccatctcaacacacactggcagaacccttgtaataatttatggtctttactttgattatttcggttagcttttgtgtgtgtgtactgtcagtctgactgatttaaatttatacagaggtttttgtgtctgcgtctgtgattttttggattccattttttttttatttttgtattcgttgtggttgaagtctcttgtataatttagcatcagtaaaagattctagctgcgagctaattaaatttgttcatcgaaatcaatttgcattttaaacttttaacgtgcaacgtcagaaaaggccttgacgaatccgatcgacgatcgatccgccagagcagagacacggagacaaagatactttgttgctgttggttagtcggattttcggtctttcgatcttttggtctttcggcattcggcattcggcttttggtttttaacttttggcttttgtggtgcgtgtgtctcggactcaatcgcatccgaatctttagccattgttgttgtcaacatcagctatattggctatgtggtataactcagctatcggttatgagccgtgcggagttgggcttttagaattatgctaagtagcgaccagcgacaaacgattctggcacatatttatgtatgaggaaggaataaaaaaaacaccaaaatcaagcaacaacaagtagcgagacaaaggcaaaaataacaaaatatttaaataaagccaattaactattttaatgccttttggaatgataaaaagtgaaacttttttcttcttcggcccgagttttatgaatatcgttaattctcggaaataaagtgaacgaaaagccgagaaaaacaaaaacatcttcatatatggatgcgaacaaaaaaaatcattttttttgcattcataaaatattttttttaatggttccttgatgttgtaattgtgattctcggtaaggaaaacccgtgactaacagccctcgaaaagtgctcacttttgttggaaatttactagatgctggaacttaatttcagttcaactctttataagagcaataaaccttcaaggttgtcttcgaattgtttggtcgatgctaaaacttccgttgagagagcatttagttattgatagacaaaacctattatattgaagacattgtctcaattagttattaggtattcgaatttattcgaattgtttttcttttgaaagtcccatctgcctgtctaatttatcaatctgtttgttggatcattgtctgtgcaattatcttgttacatcatgtaggctttccattattaattgaattattattaataacgctttccggtttttagcgctttgcattacgtttctgattcttggaatcttaatcgttcatattttgataatggaaaatgagaaatatctattgatgttttctattaaagataagtttattttattgggagttcaggaaaaatttttgaatgttgactcactcaaatatcgtatgattcattttgggaaattaaggaaattctccgaactaaatgagaaatcggaaattatttagagaaactgtttacaatgtttggcgattcgatccaaaaacggggaaatccgccgaatgctataagcaactgataagccacacggagatttggatttggggcaattagaaaggcatccgatgaggcaattggatgtggcgatatatctctacctatttatatagagcaacgatagagagagagagagagttgtttggctaatccaagatctaaatgccagagtctaatgattacactttccggtgcctggggtgcaataaataaattgccaagagtacaaaattgatatgttttccgattctcgatcataaattaagctggcgaaaccttagactttaaactatggcgactgtgtgtatgtaaattaataagacaaatattaagaataattaactgtcaatgcaacaaatgcacaataaattagagtgcatgcaaattgtgcaccgactgaggcaatttaatatttatatgcgtatttttttttgctgttttgtttttcgctggcaagcaaattaatgcccaataaaaacggagacggcaattaagccgcgctgggttctgctcaatgaattttataagccgcactcttgcccacccaccctctaatattcgattcttgattcttggccttaacaaatgcgcgccaaacaaaagacttaggcagcgaacttgttcgcagcgtgggtgttgaaaggcaacgcgttgcgcccacacaatattgttgttgctgcaactgctctgtgctgctgctgctgtgaagttgttgttgttgctgccgtgctgtttttgttgctgttctgctgctgcgcgtgcgctgttgttgttgtttgattcatggtttagatttgactcgcaggtggattggcgttattgatatgccacagaatattgcactactgcccacattccaggcaaaaaaggtactcggtattcgatatcggtatcactcacactcactgtctatttttttttttttttttggttgttgtatttcgttttggatcccctccgatcgatcggtattcggttacaatctacgatgtgttacggatcgcggcgaggaaaatagcgaacggctattacggaatcggattcgaatgcgatacgatcctactccgacagcgtgatacgactgactaaaggccgccgatcgctgccaggtatgacagccgccgctgcgacgtcgccagtcggcgatccgcagttgttgcgtcggccagttggaacacagatacacacgcacacactcgcgcatgcgcacacctcggccgtctctcatatcagttcaaaatggttggaatccgcgcctgtcgcaatattctcaacgggagcgacaaggaggggccggacagggcgttgcagctgcggcggcatggcaatattaaaaaatagctgcacttgctgcataacgtcggacttccttaacttgaactgtccataactaagacggcttattcatagaaggtgggttctccgaatctcactctcatgactaaatcatattgtatacatatatacatatttatatatttctagcgagtaaaagtataaagaagtaatagtatagattctatattcctatcctatatcctattaaatatctttaagtttggtttaaaacgatatcgttgattctcacataaaagttttgaagtttggaaaacagtatcttctatttccataattcgaaagagagtttaatctaattgtgatttttctaaattgattagataattcactgatgaatatatcaagctaaattgatagttagatttgtaatgaattggttttgaatggttttgccatacagaagttcgactgtagttacacttgctgcacttattgagccaaatcgaagccaggtcgaaggaaaaggaaggcgaaccgccggaagtgcgcacttatcgctgccgattgtcgcccagagtttgctactgcaatttcccatttaattatggttgttccttttttctttgcgtgtgtgttcgacgggagtgtaataaagtgccttccaaccagtccgcttgcaacttacaactcgaactcgcgcaaaggaagtggttcgatgtgtgactgcgatggtgctatgtagcgagctctgtgcgggagcgagagcaccatacaaatcacgtacgcacacatacgatcgtataacagcgtgcgagcgtataacagttgaccgtgcagtggcagcagcaaaggctcattgttgttgttgctcgcgtacatagttgttgttgctgccgctgtggttgttgctggcactgttgttgttgttgtttttgttgttgctgccgctgtttcaatagaaccgaacgagcaaacgacgacgacgacgacggcacgacaacaaaaacgacgctgattcgtattggctgcagccactaatactcattgctcactcacaccagcaattgacagaccaattgcaggtctgttagacaacagcagcggcagcaacaactacatcgcccagcagcagcaacatcagctagcgacaacaacaacaagagatacaacaaatatagatcgttaattgatgtagcacacaggatgcgccgctgattggggttgtccactccgctgatgatgattgtgaatgggcagtgggaatgggaatgggtatgggtatgggtatggctatgggaatgggtctcggaatggcattcgaaatgagatcgcatggactgccgatctaagccaaagcttatccgcaaatacaaatttatattgcatacagcatgcaatgtacacgaagagaaaagatagtatgagttatatcaagaatgtatcctaattgccatatgtcagttggactcttcttttcttaatcgtggttgataaataatatagaagctaatcggtttgcttagtgcaccgaaaaaaaagagataatatgttttactatcttttcacattttctttaccaaactagaaacaaatattgtataatataaatttgtttataagattcgctttcaattgtaagcatcatttcaaaataatttcaatagaatgcttaaaataagaaatccataaagtgaaaaaagtatgtagattcttgcttaaaaggatttgtgaatctgtttgttgattttttcactgtgtagaagtgcttgcttctaaattgaaatttgcgtgcgtgtccattaacttttttttttattcataaaagagcttccagctgagctgcactcagcattcgaaaaaactatctttcattacagttttgcttttactcattattaattcttaaggatgctttgtttttaatatgttttgttggcctaccttttgggttatgaccgaaccgggtccatttgctgttgctgcaccggcaatgttgccattcttgggatccttgcgcaagtcttcgggctctcgtttgatgctaattagttgctgctgctgctgctgttgcgccgcagaggagacaatggagcccgtgctccccacgccagcggcactaacaatgtcgccgggatgttgctgctgctgctggtgttgctgctgctgctgctgctgttgctgttgctgctgctgctgctgttgctggtgatgcgagatcgttgtcgtggagacaacgccggttgtgcttaccgtcgccgatgacgaggggtgtgagccgagcaaaaagccttgaatctcattttgcgataggccagagacatcgataggtgtggtctggccattgagctttccactgctgttcaaaaattcaaatgcagagagagagagagagagagggagagagagggagaggaatatatgacattagttggtgtttaataggtgcaattattactttaaccagcgtatgcaaagtatctcatgcaaacaagaatttataaaaatagtttaaagactgtggtgtctttatagagccagcatctacacaatataaagtgacgttttaaagagttcatatacaacaataatccaatttaaggtttatagcccattataacagctaatctatctatctattccagttgcagtaatggcgcccaattgcctggtatattccgacacccccacaaatggaataactccattaggctgcttatcaatcaaacccgcgctcgccaatcacctgggcaatcatgcaatcaagccgcaaacagcgaggcaaggctaatttcattcaccggagccggagacacctgtgcgctgctcacaaaacctggatgcccgcccaaatgggagcaatcggggcaacaaccagccaccataaaccagaatccagcctgcagcaagtgcaaaaaaaaaaaataaggaaaagaaaagaaaaaaagcacaaaaatacacacgagcggggagaaaaacaaaaaataagaaaaagaaaaaaccagacagaaaaacctgacacaaccaccagcaacatcggaatcaaaatcaacaactgcttttggccagcatccagctcgagttggcaacgaacacaatcagccaagggggttgggtggtgggaaggtggggggttggctagcggcatcccccatgacttacttgccccatcgattcgatctcttatcgctttatcgccgacaactctaggaagagtcgtaaattagctgcgatgatgcctgtcgccgtctgtgataatcgaatatggataacttttggcatttttacagccatccgagggggcttaaatcaaaaaaaaaaccaaaagggagagggaagatggccttagagggagacagcactcatcgcaacaaggtcaagcaaacaagcaaacaaaacaaaacacaacaaaccaaaccaaactaaaccaaaagtcctggcagctggaaaaccggattcgattgtggaattatttccaccaagttttcagacacaattaaagctcttttgagggaaaccccgccctttgaccagcgaaaaaaggccaaccgacatatttttgtgtcaattgtgcagcaaagtgagcagatttgcgaatgagcgccttttcaggtaaacaatatttagtaacatattcataaggattcctaaataagatggcggtttgcttgctgcgcaaagatgggtatagtttagcttatcctgtaagtttatttggctagttcaaagatttccaacatatttggttttgaaaagtctttttttttgaaccaacataaatatgttcttgcattcattcacagataaagggaccagaactgatctgatttgaccggctactttcttataaatatctggattctggttctgcgactggtttttcgttgattgattattctactttgttttgattatttcattcttgactcctgttctagaatttatttactttatatatatttaacatttatcacctacatgatgggttcctttgcattcattttcttaaattatacaatattaccctccttaagatctatatccaaataataatatatttgccaatttagctccattcgatgtgcccaattgagcaattcgggtaatagtgtttatacgaatccatcagatatgcccgattttcagctggcttttcgacaatttgtcttaatttgtgcatagatattgattgcatatatgcaaattccgagcgttactgaaattgcgccacaccttggctcacacagatacaaattctgctgggagtgtgtcggtctgtgcgtgagtatgtgtgtgtgtgtgtccgttcttccgttagcagctgttgcaagatatttcagcgctgtctgctcatttccattcggttcttttgctgttttttttttaccacagtatcatttcgaggtttcatttgtgttttttccttttttttttttttttggcattgctcaagttgacaacgctgcctgcgattgcgatcgcttgccccattttgtggcacttgtctccctcgtgcccggtgtcccggtttttcacccgaagttgttttctggcttctcaaactgaaagcgtacatatataaaaagagacaaacaacaaaacggacatcgacatggacacaaaaaaccaaaaaaaaaataagaaatgtttttgtttttatgttctgcagaacattttcgctattaaaaatgacactcggattgcccgcgttataacatttttccctcttttttttcgtaatgcgatatgtgagcgatgttattccgctttttagggtcagtccgtgtaaatcacgtagcggatatggggaagcgaactgagcgcggcaactcgcacatttattagatagccaaagtgctgtccatatctcgtcgccgtcttttggcctttaattgtgtttctaagccaagtgccgagacgcgcgaccttttccaggcccccggccgaactacggttacggtttcatcacggctccataaaaccgaatccgaggcacagaactcaccagcgatccatgtgggcttgggccacttggggttttggattttgggcttggactcgggtttcataaccccagctgaggcaacgtgccgcgctttttttttgcgcatttccacgaagttcataaacgctgcacttaaaaaccaacagcattttcgccagaaaacgaatatttttctaaacatatagagttgggaaatatttgatgtttgcatgtaaaaataccgatttttaaaccttaatttcaaatgatagtaataatgatagaaattctcccaaaactgtattttcttaacaatcaatttttttcaatcaacaactctcaattttttaaatagatatatgtttttaaaatgcacttaatgtagtgcaaaattgtgtgaaagtaaaattcaatattgactttgcccacttaaaatatgtaaactatctgcagtcaaaaaccagtttttatgccaaattaaattataacattttataagagcacccatgttttattgatgaattaatacggttttggcaaatggtattatcgcattaaaataaaattaaatagagcacgccgagattgatttcgaaaacgaaacaggatttgctggaactataactattcgaatccaaactggagacttacctccagggcagatcggcaccgggagaaccattattcgccctttcgccttcgctgcgatagtagctatagatgggataaggactattttggttggcattgggatgcagttgatcctgatcctcgtttagctgaatctcggcggcaacggcctgcatcaaaccggctgcggtgagatggtgaccatggtgatcctgctggtggttcaggggcaaaaccaatccctgatccttgacctgatcacctgggctgtagtagtgatggagtagctgctgatggtgctgctgctgctggggatcgctttccacgtgccccgcgtgcagtgagtccaagctgaagcctctcctgttttgcgaggggggtttttaaaattcaaactgggcgtggcagaaaataagatgatcgccgacaacgcccatgtgcgtgcatttagtttttggcaatccagcatcattagcatttccatttctatttatttactatttacataatcaatttcgggccaggtgcgtccgataatatcgatcgatgtgtgtgtgtgtgtgtgcgtctcagttacggatttgtaagttttgcggcaactttttactgctttcggcatcggaattgattcgtttagcgctattagcgtcatcaaataaaacagaaagaaatacaaaaaaaaaaaaaccaaagagcaggggccgaaaaaaaagcgtcaattttttgttaacactttgccccgcccctggacgccggtggaccccccttcttcacagacgcccctgtactctgcaagtggtccgcagcatttattcactaattatttatttcccatgaagctttttttcacacccggtactggcagaatgtacggggtatatgcggcttttgcacatttatgcaataggaaaaggaagtggttacgattttaatggatttgtaaatgtcattaaatccaaatctgattaaaaacatgacttacattaggaaatttaagcaagacattttatgaggcgcgaactctgaagtttcaaaccatcacactttgtctgtcaaaagtatgctaacaaattttggtttctaatacccatcaatacaataagaaatataagtttatattgagaaataagaagaatattgcatttataatttgataatcagaataagatgacaagatataagaaacttcaaaggattactttcattgtgcttccctgtaattctcacagtactacccattcgaatccttcgatttcataacattttcctcaattttttttttttagctatgtaagtgcatggatggcgaacccgtgattaggccaacacctcggccactcgtccgcctcctgggcaactcccgtcgagcggtccaattgtgcaacaagtagcgaacagtttggcgaaaacaaaaacacaacaaacgccgaggagcacaaccctaaatggcaaccctgtggcgcatttgctgccacctgaattcgcgaggaatcgcatgaatcgaatggatggaacaggaggcaggactgctgtggtctcgatggcaatctcggaaacgcgaaatcaagatcggcgggcctcgaaacggggctttcagcgcggcctgggaagtgctggcccaaggcaaggtgatcgccgggtactttcggggccgccaaccggttcgcaggatccgcggcagctgcccaaacctatgcatgcatatatccctaatcccaagacgcggaggtaagcgtaacggttaaggaaatcatgattgatattagctgaggctcggcgagaagacaacgcagcttgctcggacaccgtccgaggaagataaaggacgaggaggcagcgatcaaagttctcccgagggcgaaacaaaggaactgatttgcataatgctttcagctagcagacactggaaaaggattcgttcgggattcacatgcaagtaagtccaacgactttcctttcctttttcctttaccttgggcccatttgtcacggccgagtggatgcgcgctgcgcctttatattgtcattgtttctcaacgttggacatcgcaccttcggcccattgagaccgctgtccgtgtccggcggagatgaaccaccccttttttttgcggctcgggtccgagggtcctgcgatgtaatttgcataaaagcggacatgggcttaggcccgaatgggcctaaagttttcaaccccttcgcatggaagctgcggattgatcgcgattgtgtctgggcgcaaacaataataacagatatagaaacgaggtccattaattcgtgtcccttcgccgcatccatgtgccatctgttcgcttttctgaccgaccaaccgaccgatcggcgagtgtgggaaacctctcaagattctgattgggaaatggaaaccgcgctcgagcgcggaaaattatccaactcttaaggcattattttcgttgctggctttgttggtttctttctcagttgttattttttttttttgtcttttcatttcttttatttccaaccattttacatctttcttttttggtctgtgtcatttacatgatcatattttatgcaaatggccccgggatctgcggggcatatgctcgtacaaatacgatggccagcagcgctgtcgggcgtgggcaataaatttctcattcgtatcgcattaattactacaatattatcagcagatacagccgaaagcccgagctgcacagacaccgagatacaaagatacatctcgctgccatattggaaacgcggtagatacgcgagagtttcagatacagatactctcggcgaatggccgatatatgcagggtatgtacctagagcgaaagcttcgcttcgagcttaaaaaaaagttacacaatccgtaggagcaacgcacacactcttcagatccttcaagaagttagatatacatttgtatcttttaatgccagcacatgtgactttgtcgacgatgttagtcctttttatttcatttcatttctaccgtggctcggacatccaatccgtatatgatagggcataattcgttgtgcttgtggcttcctgcatgatggactttaataaaaaccgaactctacgatcccgcggatcattcactgatcaagctctccagctgatgataacacttcaccatttttccatgcacttcatcgcgttaccgaaccgaaagatgcaaagatacatacgtatgggctttaagtttaatcggattacgcgcgttctttcactgatttcaaaagaacaacaacattaagtacatataaacaaatattgtcatatgtaagtatgctcaggcatatatgtttatatacatatatgtataaatatgtgtatatatatatatatataaacttgatgctgttgtcgaccttgtggcttttcgatatcaactgaaaaccactttgagcgttcgataaacttgtagcgccaattcagagttttggagtggagcgagagactaaaataacaacaaatttaacagcaacaaaatgacaacaaaataagaacaacaacaacacaaacaacaacataacaaatacaagaacaacaggcgacagtcgaaagcgtacgagacgctgaattgtgttaacatgtttctttcttgtctcctcaacgttgtccccatctacctttctcgctctctcgcgccatctgtatggcgctctctttccttctcgctgtcgccatctctctcgtgcagtcgcttttgctgttgttgttgttggtgctgctgcaggtagactgcgcaggtgaacaggtttgtttttgtatcaaaatgtccaaacgctgttgcaccttttaatattaataataataaaatgagaagcaagaaacaaaaagacactaacaacaagtgagaaattaaacttgattaactcaacgacttgcgaatgccctttgattgagtttagatgaatatttgtaacatttagtgcttcagtaagttaagagagcaatattatatcattatattgatcaatatttatttcttatatgaaatgttcttacaaattatatatgaactatcaagatcatttgagaatattgttgtgctaccaatgttaaattgattaataatgagactttcgacttttttgttatatcctgagtataagttagggtattaaagtgctccatttgcaagcgcatgcgtgacagtgacttggggcttgtgtcgtcgcccctccccttcactcctctgcacgcctgacacaccaccccccccctccccttcgtcttgaaaaccccctcgatttcagatgctgtgaaatggcgacaacagtaaaaatattgaaatattgtcaatcaaggggttaacatggtgaacaggagagatttggcgaggggtggctcgtgaattgagcgtcagtgacagtcgcgttctatcttcaagataagagacactaaaagtgtcgctatgccgccgaaacgcactgtatggcaaataaaatgaaaacttaaaataaagcaaaggagtagcgaaaaaaaaatgttaaatcaagaggggaaaaaaaccgaaaaaaaaacgagataaaatatgttttacagctcagaaacttaatatgatcgggtaaagtgaaagtaagcagagctatataagatatataggggtgtgggtatacatatacatatatgtacatatatccaagtgagagtgtgtgagttgcgtgtgacatgcgcattgaccgcgaacactgcgatcagaaggctaaaacccgaaggttatccttgtgtatggaaatttcacaaactgcattcatttcgcacactttgtggggtttccgcatttcaataaggaaaaagtcccagcactgagctacaaaactaaggtgtgtgttggactgggcttaaagaaaatgcgaattagtaatttccattcatacaagatctacatatatatatgtatgtagatcttttgtggtatacaaatgtcaaagtttaaattcggaacgaaacgattttgtcattaattattattaatttatttcacggccatcaaatattattgcactttaagcttcgcttgaatacaaattcgatttccaatttacgtaggagattctatttttataactttattaaatgtcaaagggtaatttgtatgagaaaggaaatgcaaatggcgtcttatcaattttgagatattttatggcataaacatctgctgtttgttcaaaattttaataataaaaatacataatggtaatacggttttttggtaaatataaaaaatataaactgtactcaaatttttaagacaatcgaactttaatgaaatgtgtagcgttttctggaattaagtctataaagtcagagatttctgtgtttcgcattgttgaaaacacttgaattggcaattaaagaaattatacgtatttatgccgctttgggcgcggttgcataagtcttcgtgcagttaaataatgaaaaatgcataaacaataaaacaattttattgccaaatggcgagaataataaaatcgtatatattgtacattgctttgcactctgctcaaccgaataatatggctaattcggcgaatcgtaaaaactttataagccactctgctgtccgaggctgcaatttgctaatgcaatttatagagcttttgcttggggatttgtccaatggagctttaagcttcagtttcgagatccctgttgatgagtgtaattttaaaatatatttttgatatcgcattacattcaaaagttctgatataactaagaaaacttaaccaatttggcaattacatcgttacatccctttatcctgttgcgaaaaaaatacactgtagcacagtgtaaattaagacgctgctagagggacatgttatgcggtgacagacagacagacggacacaatggaaaggatgacttgaaacaaaggtcaacgtggcttatatatggatatgtataatgtacagactgccatccccaggccgatctgtctctgtcgccgctttaattcgactttaatgaaaacgtggcaaggcgaacacttttgggatgcagacactcgccgtggatgtggatgtggaaatggacatgtcctcagctgcttatcatggtggccagcaaacaaaacaaactgtacatcaagcgaggccagaagaccgagagtgcgaggccacagccaagagcaacacgcaaggtcccaggtcctgcagccagcagcttcttcgacggcatgccaatgttgctgccacagtcgctcggtcgccgtttcagaaaaaaagcctggccaaatccaagcaaagtccgaatcgaagacgacgtttgctgctcggtccatatgcggaaacgcaattttgtcgttatttatggaccttgccgcacatgcaacatgcacgccggccaaacgaaccagcgatgttgctgctgtgtccgttgatgttgctgttgcagcgatgctgctgctgcctcggctgctgcgatcgccgctgctgctgcagcatcctccgctataacaggatgggacattggcattagaagaatgcactgcgaagaaaactttgcagaacaaaattcttgcttgacattgtgttttgagaaaacttatgttcttcatataacatgtctcgaaaatagtcctttttgacattgctatccaaatcccatcatttcgaactgccaacatacaacccttttctctctgtgtaagaatttaggaggagactgaggaggagtagcccgattgggctgcagatgcagatgcgatggcgatggcgttgcagatgtccgagtggccaacgatccggcgattcatgcagatgacgatgacttagttgccaagctccgtggcggcaccttgctcaaggaggctgcgcttgcatctcacctcgctcgctaacggttctctattagattaatttatattcaaatttttattacccgcgcataccactgctcgacgtcgactgctctaaaatgaattgccaaacggatcgctggcggatgaggaggaggaggaggatgcgactgggtttcggtatgggaatggggatgcggttggtgatggcgatgggggtttccgtggagccgtggtgctggatctgggtgttattagctcgcctacttgcacattcgatgcacgccagaatgccaaagttgctgttgttgctgtttgcaggggcagcaataacgtatggaagaaacagttacaacggaagctgtcattccactgggggaatggaggatggagcatggcatggagcatggattggagtttggagcatggggattcggggaatgggcatggatgaggacaccagcctgaactcaatgtttggtcagtggatggggtatggccagaatgcgctggcgttgctgcgacagtgatgttgctgttgctgttgcagcagcaatgttgctgccgttgccggttggcctatcgcaataattaacagtaaaatgcgcgcggcaagagcggttaattcaaatgcatgagaaatgcaaatgacaaacattgatttgaaaggaccacgacttcagagggggacacaaaccgaatccaaactaaaactctgctgtccccaattaagatgttgatgtggtaaccaaccgcagcaccagcaccaccattaccaccagcagccgcaacaactcaaactccagctgcaactgaccgccatgacgaaggcaattagtcgagatttatgtagccgatagaacagcgctcaatgaatagttgagtgggctggtccgtgggttaaggatattaaccggaacacaggctcgacattagataaacgatcttacaaaatattttcgagacacctataactaattttttagttaacgttctcttttgaaatggtataatggttactagctaaatgaaatctgtaaattgttatatacagaacattatattatgcccgatatataaaaaaccaaatctgtaacaacgattctttgtatccaaacttcggaccctttcaagctccgattgagccactaattaagggtcacagctctctggaatttcgagcacaataacaaaccacttggcagtggaccaacccttttccacagctacccttcattaagctaaacgccctttgtgggcaattactcacctctgcagatgctcctcgactcccgctggcaaggcaccgtcggccacgatatagacgggctggccgccggctccggtggtggtggcatacggcagtcccgcctggaccaccacttggccgtcggacaccaggctgccgatgtcgccgcccgagtatatttccaaactcttctgatccgtagtggagtaaatcaccgtcttgctgccatcgttgtagatcaaatctatatgcttatcggcttgatagaggtcgggatcaagtttttggggtaccgtcaaatggggcagttgtttcacattcactccgttcggatcggatgtggtgtatatgatggatcctccgccggcagcagctgctgctgcagccgcatgtttcttgtgatcctcgtagatatcggcctccgtcttaattacattcgaatcattgccgccactataatgcaatacagacgcgtctagcggcaatggtgatgtctgatataccgcctgcccgtgatcattgttcatcttttgggcctggttgtacatggccgtggccactgcattgtcattgggcatcaacttggagggatcactgacgatccgtgtgagaatgtgctcaccagcctcgtttcgcgacaggatatgatgctccccattgatgatctcccgcgagatgatttgctgttgctcgccatttggtcccaccacccggattatctggttctcatcgaactcgatcttggccagcggctggtgttccgtctgctgttgctgctgctgctgttgctgggcttggttgcccatttgggccgcaatccgcgcatcgatggcatgaccttcatcggaattattgccacccccgccatccgctggcatcaccaccttgggcgtttcgtatataaatacagcctccttgtcgtacagcttggagttatccgtgtgcagatccagcacgttgacgttcgtcatggtggccaattctggctgcggtgagtccggtgatcggtgcattgttgtgagaagtggcactccgttgggcgccagtggtgaactgtttgtgttacctccgccgctgtggccgccactgccttgttggatgggcgatagggatgcgtcgctaaggatgccaacaccaacgccaactcctaggcggctgtgggtgtgctggtgcaactggtgggcgtgaccgtgaccgtgggcgtggccggacagcgagagctcgttggacgtgataacgctcgttgtggcggtggatgtggacattatacgtggtagatacggcttattgaactaatttgaactggattccggattgcactaggacttggtcgtggactgatcatcgatgccgtgatcccctatggttgttgctattgctgttgctgcctcggctgctggcaagtataaacataataaatatcacttatcaacggattgatggaaggcactttgtggtttctttcgttcgcaattagctccctccggttctggatggtcgatcttcgtcttagtcgttgtttcattaactgctttctatggcactaaggaacttccttcgtttcgttctcagctcaactggaattggtcaaaaaacaatggttcataattagtaaaaaaggtgaaattgataaagacctagtcaagtttccagtgtgaagtgtaatgaaaacaattgtgttgtgtttatgggtgcaagttgtagaaagaaagtatagcaaaaatataaagaatttataacgaatattctgaaacaaaacttttctacatcattgcaagtcttaaaaacattgttgcttttttaaatgcctaactaacaagctgagaaagccatattattttaatagttttgttagaaataattaaaatattttcacgctagtctaagccaacacttttacggtgtgagtcatatgctataaggtgtttcccatttggcaataacagccctgcagcaacacctcccttcctcctcccccgttaccactctcaattaacgatgaggccgctgaagcaacaacaaaagtggcactgtctggcggcagtctgcttggcgcccgcccccgccccctcctcgacccactggcgatgcagtcacacacccccattgaaaatgaggtgaaaaaaaaaaaatgaaaaagaaggcacacataaacggaagagccagcggaacgggttcaaacgacaagcgatttgcaagcacacaaaacagacgaccagccagccaacaaaccaacaaacaaacaaaaaggggcaaacacaaaaaatcggaaaacggaaagaaaaaaaaaaatacaaataaataagccgagttggcctgcacacacgtggccgtcgaactagtttgactccttcgcaaatgtcaaacgtgtaactgcataactcagtgcggttcatcacatcggcaaaacaacaaaacaaccaaacagcagagcaacaaaacaacaaaacagccaaacaggtggaagaagcgtcgctgccaacgtcgctctgtcgacgccaacagagaagccaacttctcagccatatttgtgttttgtttacaacggtgctttgtgtgaaattaaacacagagtgtacactataacgttgcacgtctcaaaaaaccagtcagtccatcagctgttaatagtccagaatctgcgagttagcaaaacatgtttatgagggattttgaaaccgaaaccgaaactgaaactgaactgaactgaactgaacagagctgagctgagctgagctgagctgaactgaaccgaaaccaaacaaaacaaaacaacatcgacatcgacaacaagttgagaacaggtactactctccagtttgcggcacacaccaaaaccatacacaccggtagcagcagcggcatctcaatccttgacctaatccagaaggctgactttctggttccacgccttgccgcagcctcggaaacagccacagcgtgcccaggttcaggtccaggttcagattcaggtccaggcccaggttcagttccacgttccagtccccctgcacaaacccccccccccccccccccccaccatatattgttgtttgatgataaagccaaaaaattactggtgccgccgccgcagagttcactgctgggatgtggatgtggataaacccgtttttttttttttttcggtgtgtctggcagcccatgccggtgagttcacgacgatctcgacgggctcctcggacccggtctgtgggtattccgttagtaggtgaggtcagtgtcatgctgtttatagactagtttttggcacaaacaatcagaaacgattgcccgatgaaagtcgatgtggaaaggcaattaggaaacaattaaaccaacatcaacaccccggctcgcaagtgatcccaacgcatccatcgaactgggtcagatgtattaccagccaggcgaagaccctcggggctacgtacaaaactttccaacttgccgcttgaatggcggagatcggagaatggcaatgaagctggcacctccagccggagatagatggattctgggcaagatccatcactcatgcggtgggtgcgaaagaaatcagcaacaagaaaagtagctgctggcttagattatgaccagaaaagggaagcgatgtggagaagataatccaaattaatctcaatagcgatatttctggagagaaactttctcaaagaaattattcctattgaaatgtccacccgggggcgccacaaaaattataggaacaattataagtgcggaagaccatagagcatatgtagcaagatatatttttttacaagtattagcaagaaaattattaaatattgcttattactgtgtaaggtgtaagttttaaatctatttgatcatcaaaacaagtcgtcgaacacaagtgtaatacaaggtaattaatgagcaattactgttattgattggcttaacaataaactgtaaatcacgttaaaacgtatatgcaaaaattgttcaacaacgtatagacatatttgcttcaatactggatcaccataaggaaatctttcgcggcgaaagcaatttgcatatttataactatagaaccttgataaattaacagtcggttttccttgagcagtgtgtttgcaatataagtgtcgaaacaaataaatctagtctaatacatctacctacgttggcttcctggggtttatgcaggtatgatcactatatgagtaaatcaaccttctcacaaaacaatcattactaattttcttcgattttatcgactggaagtcaccacatgtgaaaataagccctccatctaacctttgcatacagacaacgcctacaacgagatctatggtcattcgttctttattatcccccaaaccacgatcaccattccccccgataccaccgatttcagatacacagtgaataccgaaagcaattccatttcaaatcccattaagatttgacataatttgaaatttggattttacgtatctttaccttacttcgcgtgaatgtaggggggggatggagaggggtagatgggagaggtggagaaaagacaagagaagaaatgcgcagcgtaaccctaagacatcaacggtcagagttgttgggcatcaataaccaatgactgagactggagagttggtagatggtacacggcaagaaatgccatgtcgattcaaaactttgagttatattattaatctgatgatatagaaactcattgaaacgattttattttagcttttgacttcttagcctctttaagaataattatatgcataaataaatcctcataatatcaccatcaatgcatccccttttctctccgtgtatttgggaatgttcagggaaataaaggcgtgcatggatggggcaggggtggcgagcgcgaaggggaacgggaacggctgcaagacggagtcaagaagtcccgaagaaacgaagaaaggctaaagaaaagaaaaacaataaacgttaacacgaacacgaaaataaaataactctctcacgaagttcccccttttttttgtgtgtgggttacatgtgcctgtttcgctgtgtgcgtgtgtatctcacggctgaatgtatctgtgtgtctggcggtgtgagtgctgcgtagatgttcattttactgtaccataatcgcagccccaaattgatcaccatcatcaagaagggaaaaaatcaaaaaaaaaaaaaaaagaaagaaaataaaaatcataataaaaagaagctgagaacataagaggcaaaaggcagcacaaaagtccaggggaaaacgtaatcacaaacactgggcaacatcatcgattttcgaacaagaaggctgcgcagtagacgtcgacgcagaggcagaggccgagaccgagacagaggcgtcttgatcccttctcgctaccgctctttatggccaactctcccgctctagcaaggtattgttgggagcacaacggcaatatgacagcaataccaatacctgtgcgacttacctgccgctgccgctgcgcagcggccacttcgaaatacgaaatacaaaataaaaccaaacaaagaggaatgtgtgcgcgaaagataccaccaacaacacaacggcaacagcaacagcaacaatgacaacaacaacaacaacaacacgagttgaggctgggaccaagagacttaggctacgtctgcacaacatacagggtgtccactgtgaacgaaggctttcaaaagcaacactggccagcagggtaatgaaatcgtttagtttcaatacatttgaaatcatttaaaatgcctagccgtatagatataataaaacttattaaaaaaacatgcagaatgcattttaatttaaaaccgcacgaactaaatggattttatgcctacatctccagcaaaattgtttaaaaatatttctatgagattgtcgttgtcaaataatatcgaaataatatccaattaccatttttctattaactccatcgaatcaacttgacgtactatgtataaatctagctaaaatatatcttatagtttggtaataccatatgttttttaaaaatatcaagttttgaaaaatatttatttttgaaaagtttctacaccctagtagtgcccaaaaaatgcccgcttttattgctctctttattgggaataccagctattgtgatggaatctcccgaaaaaagggatctataagccgaaaaccaaatggtcaatagggtgctatatttctgacggtgtaatccctccatgaaccgaccagggctacatagcctgatgcgtttataattacttcttggtaggctaagtactactcacttttgggccggggtgccttgagctcttgggatcaggatgcggattttggcacttggtgaggatctatggcactcgagcacgctggagcagtggatcggatcggtggaactggagctggatcgtggactggagtctgtttgctttgggagtctgcaacctgggagtctggagctgtaactgaaatgtggctgctgctgctgctgctgctgttgttggttgctccgttgttgctgttttgctggtgggtgcacctttcgccactctttgtgctgttttagttgttgttgttgttgttgtgcgtctgggggcttttagcctggctctctgggcctttggcttacacaatgctctcggctggctgcttttggccgcttctaatgtgccactctttgtggtatgtggagctgttgttgtttcgttcgcttggtgctgcctttgttgctggcggtttgtgcattttggcctaacatttgatgttgctgctgctcatattgctgctattgctactggagggcgcaatgaggggaaagttgagggggcgggtcggttcgggggcgttgcgcctggcatttgcgttttcaagccaatttgttgttgttttttctatttttctatgagtattttcactattttttacgcgctttccgcactagcatttgttattgctgctggttctggctgctgttattaatcactatttttattttgcattttattattcgctgctcagctttgatggcgtctcattccagctcgcaagcgcacacacacaggcacactttaagctcacgctctccgagagacatgcacacgtacacacacacagatactctcgcactcaacacacacgcacacacacacgaggttttttttcgctttttcagccttctcttcctcttcgtggctgaaattcgtgtgtgtgttttatttaatttcgaaaaagtttaagcgcgactttttgctgtttgtttggcgtagaaacttttggatttttcgcaaatatcgcgacacacacgcgcactcacaggtaatttcgatttgaaacgattagtcggatttgaaactatatattttcggtgtattaacttgctgactttccgtgtgcgcggaaaacttgtcgtcgctgtcgctggatctcggctcttggctataatgcccaaagagtcaattggagattgttcaactgttgaatgtgctgctgccgccgctgctgccacctctgccgacgtcgtcgtgcagttgtattggtggcaaggtgatgtctgtgttcgcggcgctggttagagagcgctcgattattattgctttttatggtttcatctctttcgtaactgatattgagcgaacgcggcagcgacgccggcagcgcagcgccactcaaattcattcgaatcgatgatgttgtctctacactcccaaacacccatacaagtgcgatctaaaacacaggtagcccagtgcttccatctgtgtgtgtgtgtgtgggtgcacctgcagaggccgaaacgcaggcaggtacaaaagacttaggcaacgaaccttccacttcagcatgcacttgcggcgaagggagatggcagatcaaaagagagagaaagagagagggcaaga

SEQ ID NO: 10475 - DNA, 3470 bp, DROSOPHILA
aaaaatagaaaaaacaacaacaaattggcttgaaaacgcaaatgccaggcgcaacgcccccgaaccgacccgccccctcaactttcccctcattgcgccctccagtagcaatagcagcaatatgagcagcagcaacatcaaatgttaggccaaaatgcacaaaccgccagcaacaaaggcagcaccaagcgaacgaaacaacaacagctccacataccacaaagagtggcacattagaagcggccaaaagcagccagccgagagcattgtgtaagccaaaggcccagagagccaggctaaaagcccccagacgcacaacaacaacaacaacaactaaaacagcacaaagagtggcgaaaggtgcacccaccagcaaaacagcaacaacggagcaaccaacaacagcagcagcagcagcagcagccacatttcagttacagctccagactcccaggttgcagactcccaaagcaaacagactccagtccacgatccagctccagttccaccgatccgatccactgctccagcgtgctcgagtgccatagatcctcaccaagtgccaaaatccgcatcctgatcccaagagctcaaggcaccccggcccaaaattgagctgagaacgaaacgaaggaagttccttagtgccatagaaagcagttaatgaaacaacgactaagacgaagatcgaccatccagaaccggagggagctaattgcgaacgaaagaaaccacaaagtgccttccatcaatccgttgataagtgatatttattatgtttatacttgccagcagccgaggcagcaacagcaatagcaacaaccataggggatcacggcatcgatgatcagtccacgaccaagtcctagtgcaatccggaatccagttcaaattagttcaataagccgtatctaccacgtataatgtccacatccaccgccacaacgagcgttatcacgtccaacgagctctcgctgtccggccacgcccacggtcacggtcacgcccaccagttgcaccagcacacccacagccgcctaggagttggcgttggtgttggcatccttagcgacgcatccctatcgcccatccaacaaggcagtggcggccacagcggcggaggtaacacaaacagttcaccactggcgcccaacggagtgccacttctcacaacaatgcaccgatcaccggactcaccgcagccagaattggccaccatgacgaacgtcaacgtgctggatctgcacacggataactccaagctgtacgacaaggaggctgtatttatatacgaaacgcccaaggtggtgatgccagcggatggcgggggtggcaataattccgatgaaggtcatgccatcgatgcgcggattgcggcccaaatgggcaaccaagcccagcaacagcagcagcagcaacagcagacggaacaccagccgctggccaagatcgagttcgatgagaaccagataatccgggtggtgggaccaaatggcgagcaacagcaaatcatctcgcgggagatcatcaatggggagcatcatatcctgtcgcgaaacgaggctggtgagcacattctcacacggatcgtcagtgatccctccaagttgatgcccaatgacaatgcagtggccacggccatgtacaaccaggcccaaaagatgaacaatgatcacgggcaggcggtatatcagacatcaccattgccgctagacgcgtctgtattgcattatagtggcggcaatgattcgaatgtaattaagacggaggccgatatctacgaggatcacaagaaacatgcggctgcagcagcagctgctgccggcggaggatccatcatatacaccacatccgatccgaacggagtgaatgtgaaacaactgccccatttgacggtaccccaaaaacttgatcccgacctctatcaagccgataagcatatagatttgatctacaacgatggcagcaagacggtgatttactccactacggatcagaagagtttggaaatatactcgggcggcgacatcggcagcctggtgtccgacggccaagtggtggtccaggcgggactgccgtatgccaccaccaccggagccggcggccagcccgtctatatcgtggccgacggtgccttgccagcgggagtcgaggagcatctgcagagtggaaagctcaatggccagaccacacctatcgatgtctctggcctatcgcaaaatgagattcaaggctttttgctcggctcacacccctcgtcatcggcgacggtaagcacaaccggcgttgtctccacgacaacgatctcgcatcaccagcaacagcagcagcagcagcaacagcaacagcagcagcagcagcagcaacaccagcagcagcagcaacatcccggcgacattgttagtgccgctggcgtggggagcacgggctccattgtctcctctgcggcgcaacagcagcagcagcagcaactaattagcatcaaacgagagcccgaagacttgcgcaaggatcccaagaatggcaacattgccggtgcagcaacagcaaatggacccggttcggtcataacccaaaagatcttgcacgtggatgcaccaacggcaagtgaagctgataggcccagcacacccagcagcagcatcaacagcactgaaaacactgaatcggactcacagtcagtatcaggatcagaatcaggatcgccgggagccaggaccacagccacactagagatgtatgcaaccacgggcggcacacagatctatctacagacctcacatcccagcacggcgagcggagcgggcggcggcgccggacccgctggagccgccggcggcggcggtgtgtccatgcaggcgcaaagtcccagtccgggtccctatatcacggccaatgactatggcatgtacacggccagtcgcctgccacccggtcccccgcccaccagcaccaccacgtttatagcggagccctcctactatcgggaatactttgcaccggatggccaaggtggctatgtgccggccagcacgaggtctttgtatggcgacgtggacgtatccgtatctcagcccggcggagtggtcacctatgagggccgctttgccggcagcgttcccccgcccgccaccaccaccgtgctaaccagcgtgcatcaccaccagcaacagcagcagcaacaacagcagcatcaacagcagcagcagcagcaacagcaccaccagcagcaacagcaccattcgcaggatggcaagagcaatggcggagcaacgccactctatgccaaagccattacggcggcgggtctaacggtggatttgccaagtccggattcgggcattggtacggatgccattacaccgcgggatcagacaaatatccaacaggtataccccacgatagaatcccaaatgtgccacaatcaaaacaaagtagttatgtttgttaatgcgttgcgtgtccattaa

SEQ ID NO: 10476 - protein, 848 aa, DROSOPHILA
MSTSTATTSVITSNELSLSGHAHGHGHAHQLHQHTHSRLGVGVGVGILSDASLSPIQQGSGGHSGGGNTNSSPLAPNGVPLLTTMHRSPDSPQPELATMTNVNVLDLHTDNSKLYDKEAVFIYETPKVVMPADGGGGNNSDEGHAIDARIAAQMGNQAQQQQQQQQQTEHQPLAKIEFDENQIIRVVGPNGEQQQIISREIINGEHHILSRNEAGEHILTRIVSDPSKLMPNDNAVATAMYNQAQKMNNDHGQAVYQTSPLPLDASVLHYSGGNDSNVIKTEADIYEDHKKHAAAAAAAAGGGSIIYTTSDPNGVNVKQLPHLTVPQKLDPDLYQADKHIDLIYNDGSKTVIYSTTDQKSLEIYSGGDIGSLVSDGQVVVQAGLPYATTTGAGGQPVYIVADGALPAGVEEHLQSGKLNGQTTPIDVSGLSQNEIQGFLLGSHPSSSATVSTTGVVSTTTISHHQQQQQQQQQQQQQQQQQHQQQQQHPGDIVSAAGVGSTGSIVSSAAQQQQQQQLISIKREPEDLRKDPKNGNIAGAATANGPGSVITQKILHVDAPTASEADRPSTPSSSINSTENTESDSQSVSGSESGSPGARTTATLEMYATTGGTQIYLQTSHPSTASGAGGGAGPAGAAGGGGVSMQAQSPSPGPYITANDYGMYTASRLPPGPPPTSTTTFIAEPSYYREYFAPDGQGGYVPASTRSLYGDVDVSVSQPGGVVTYEGRFAGSVPPPATTTVLTSVHHHQQQQQQQQQHQQQQQQQQHHQQQQHHSQDGKSNGGATPLYAKAITAAGLTVDLPSPDSGIGTDAITPRDQTNIQQVYPTIESQMCHNQNKVVMFVNALRVH

SEQ ID NO: 10477 - DNA, 3431 bp, DROSOPHILA
tctcgtggagctgaattgaaaaatggagctcttgtgatttacgaatcgattccgtctaatagccagccatacatttgcttcgtaacacttcctggaggaagctgctttggaagttttcaagtaactacgttattagcaaagtgttgacgcagtgttttgtaacacatttactacattttagaactgtcccaccaaggcagaggctcgtcgcagttcggccaagatcgccctaatgaattccgtctttaatgagcatccatcgcgtcgaatcagcgatgagttcattcaaaaggcggttcaggatgctcgcacttccttcaagggcacatcgcaaatcaacgagggcacagaatcgggcatcggagcattcaggtgggttccataaaccataatatatgcacttgctattgaaaccctatctttctaagtattatgaattaataaacatttttctgagtttagattcatgctggaggcgaacaagggaagaaccatgctggagttccaggagcttatgaccgtgttccaactgcttcactggaacggatcgctgaaagcaatgcgcgaacgccactgctccaggcaggaagtggtggctcattattcgaaccggagcctggacgacgagatgcgatcgcagatggcattggattggattgccagggagcacgataatccaggcgttattcgcagggagttggtgctcgccgagagggagctggagacctttcgcatggctgggcgtgaattgcgctttccgaaggagaagaaggatatccttatgatagcacataatcagctgggcggcagtgcccttaactcggctaccattgatgattaattggaaaaattaataagcacgatcgaaattaaccctttttttagataaatcgtataatttcaactttaacgacgatcaatatttatttaattggcataccatatgatctccatgatgaaaaacaagcggaaattattacacttcccacaaacacttccaaattatgaaaattaatttaaaaatctttgaaaatgtgatttttaaaacagctgctacacaaataagactaaatccaataaaataaatataatattttaacttaaaagttcatttgtattttatgaatgctaatattgtttagctaaccaaatatattgtggaatccaaggcaagggaagctacaaagttgaattcaacttttgtacaaactcatatttctgatgtgtttcagctaatctaaagcaaaagtaatttatttcaagttatttatataataaattatttttggttaaggaatggtaagaccatatttctaatttctcattccgtcgttccaacacacagtctagcacaaattgggatacagtccatccctggatattagtgtgatttgtgtcgctaccttatctgttattctgtgaatgtaacacatacatacaatagaaataggaaaaaacgaacaaaaagtttacaaaagcatccaattgctttcaataacattgagcaaacatcgaacacgttagcgtaggccacacggaaaagaaagtactgtgacccagcagcacaatggccaccgaagagctaccagctgatctggacaagttgaaaataacacagactcatcgtatcgtcaagagtgtgaggcgaaatccattttacgatgcagataacggattcgatccatctgatggctgcgaaggcgccacaactgatggcgccaagcaccgaccacaacatcgctggaagtgcagaccacgtcgtagatccgagagttgtctgcaggactgcaagcaagaggactcctttgttccagaagaatcctttgagattgttagtccgctgagctgctctcacggcgtccagaagcactatcaaaagcgcaatggcacatcgaagaagaacatatttcggccaccaattttgaagtccttgtacggctgcgagcatggcaaatggattgtgcgcagcggcaggattgtgccgtgcaagccaaaagaggaatccagtgatattgttgaccaggtcgccgacgaactaaaatcgagctgcacatgcgcgtttcgcgatgtcattggtgaatgcaacgccatgctcgaccagtcgaagcgaagcaccatgggaaatagctggcacttgtcgaggaacagcagttcatcgaaggctcgccactcgggtggtgctttagaggtgccaggaccttcgggatccgcacagagccataagatcgacaccttgggagtttctgccgctaccaggtctctgtcagccgtctcgctggtgggcgcaacctgctcgcagcaggccagctacaattcgacgagtccagggaattgcgatgatgttaccatcggtgagctggccagctacttcgacaccattgttcatattcccaaaaagatgtcctctatggctgagatgatgtatatataataagcgaatcgataaccttattaattcatacaatttctctgaataactttgtaagtttcaagtgtactatatatacatatatgttatttgtgaatttaattacacaatttcagccctttgtaactcaagttaactaacctaaatatttatagtgtataatatgtacatagtcattggtatattctgcgaaatacagcatttctaaacatacctaaaatcgatttttaattctcaaaactgaaattctcaacctgaaatgtagaaaatgcagaatgcaaacactttaatactaattattctttattcatttgaagttcggattatacatacataaatagacatttaatgcgttattcatataattgttatctatttgtgcactcaaacttgtcaaattgttgtttgtcatgaattgaatcgattaatatgtaaaatattaaaggacgttaaattcagtattattattgatgtaacctaaatatttctgtttattctcggagtgcaccgatgttaattcagtcataagattagagtggttgttcttgttcgagaatctaatgggtgaagtgaacacttgcttaagctttgatatatttccaatactctttttaatccgatcactatagttcgaaagatgattaaacgaacgactatactctacttcctgccattgttgggcgctcgttttccgcggcgcagtgggatacaaaatgtgctgaaagtataaagtgaaaatcaattttaataactaaatatatatatatgtatatatgcgaccaaagatgacagattacgcaggttctccaagtggaaaccagttctaagtgctgtaatatttgtcattatcctttgaaaacccaccgaaacgagcgctttctcggtgaaggtcacgctcttccttatgatgtcgtccgagtgatgatggtagtagtactgcgagttctgcgtctgcgagtatcgcgtattgctgctcacaacatcgacgccatggtgatcggca

SEQ ID NO: 10478 - DNA, 913 bp, DROSOPHILA
aattatgaaaattaatttaaaaatctttgaaaatgtgatttttaaaacaatggccaccgaagagctaccagctgatctggacaagttgaaaataacacagactcatcgtatcgtcaagagtgtgaggcgaaatccattttacgatgcagataacggattcgatccatctgatggctgcgaaggcgccacaactgatggcgccaagcaccgaccacaacatcgctggaagtgcagaccacgtcgtagatccgagagttgtctgcaggactgcaagcaagaggactcctttgttccagaagaatcctttgagattgttagtccgctgagctgctctcacggcgtccagaagcactatcaaaagcgcaatggcacatcgaagaagaacatatttcggccaccaattttgaagtccttgtacggctgcgagcatggcaaatggattgtgcgcagcggcaggattgtgccgtgcaagccaaaagaggaatccagtgatattgttgaccaggtcgccgacgaactaaaatcgagctgcacatgcgcgtttcgcgatgtcattggtgaatgcaacgccatgctcgaccagtcgaagcgaagcaccatgggaaatagctggcacttgtcgaggaacagcagttcatcgaaggctcgccactcgggtggtgctttagaggtgccaggaccttcgggatccgcacagagccataagatcgacaccttgggagtttctgccgctaccaggtctctgtcagccgtctcgctggtgggcgcaacctgctcgcagcaggccagctacaattcgacgagtccagggaattgcgatgatgttaccatcggtgagctggccagctacttcgacaccattgttcatattcccaaaaagatgtcctctatggctgagatgatgtatatataa

SEQ ID NO: 10479 - protein, 302 aa, DROSOPHILA
MKINLKIFENVIFKTMATEELPADLDKLKITQTHRIVKSVRRNPFYDADNGFDPSDGCEGATTDGAKHRPQHRWKCRPRRRSESCLQDCKQEDSFVPEESFEIVSPLSCSHGVQKHYQKRNGTSKKNIFRPPILKSLYGCEHGKWIVRSGRIVPCKPKEESSDIVDQVADELKSSCTCAFRDVIGECNAMLDQSKRSTMGNSWHLSRNSSSSKARHSGGALEVPGPSGSAQSHKIDTLGVSAATRSLSAVSLVGATCSQQASYNSTSPGNCDDVTIGELASYFDTIVHIPKKMSSMAEMMYI

SEQ ID NO: 10480 - DNA, 3489 bp, DROSOPHILA
acagccatgcagtcacggtcagcttaacccattcgtgcccgtgtgcctgtttcttgtgaatatttcacaaaatcgaatcaatagtcatccgagtgaaattaatttttgctaatttcgcgaatttaagtgaaacaaatgcctctctacttaaactcaacttaatttaccctaatccttgtgtgtctgtgtgcgcctttttaacccccactcatctatcgtgggttaattcccaaagacgtattagcccggcgaaatttatccaactcaattaatctcagcgttctgttctctgactttacagaattgatagcttcgtgcgagaaggcgtggctgtggcgcctcttttgtgatttatactcgatttcgctgcgtgttttgcttagtttttatcctttatacgaataaatgatattcaacaaaactgcgcgaaatccctagatcataaactagttaataattaaccttaaataaaacagtaacaccactgcccaaaactgcatttgaacccattgtttttgattacttgtgtggctaattatttttgcagccgcaaatgcgacaggataaagttgacttttagttgcaccgaataccgtgtgcaatctgtgtgcatatttaatacatgcaaaagagtgagcgcagcgatagaaaaaactttgtttgctctatcagctgctgcttaatgagtgccagtctatatatccttttgtctgcggtctgcagttttaacttgttgaattgacagcaaacaaaaaaggcgaggaacacacggaaaagttgccaccacagggtggctaaaatacgtgcatatacattatgtacattttatatgtgctgcaagttttaattccgccaagctcgaaaagtcatcatctatgccattgtcaacttgagttcatgtgtgtgtctgtgtgtgtgtgtgtgtgtgtgtgtgggagtgagtgtgtgcgcgtgtttgatgctgtctgtctatggatggatttttagaaaatataactatctaagtgaattcagcgcccagcttctttttgttgccagcattggcgacacgaccctttagcgattgcaccgccaaattgggcagacatccgcgcttttgtagatcatccagtttgactgtgatcaccgtatcgatttccttttgccgctgcgcctcagctgcccgctccctttcgaaggccaagtgttcctcctccagttcgcggcgacgagccttctcccgttcttcgatttggcacgagacactggagcgcagacaggcctttttgatggcctgctcctcggcctcgcgcttcatttgctcctcgtgcttctttcgatactcgatcatctcctttagttcgcgttcacgttgcacatagaagcaggccttcatttggctaagatgctccatttgctccatattggcacgcttgagttcggcggccattttgcgttccttttcggctgccttacgttcgttttctctgtactttcgttcgaggcgttcgtgttccgccaggaaatgcatctcctcgcgattatccttagcatcgagaatcttttggccgactgcaaagagaacatcccgtttgcgtttctcatccgccgcgatggcttcgcgttccgctcgctgttgtttcaattgctgctccttgagctttagatactcgtaggccctgttctcatctctttgatcctgttcgcacatcatccgtacgaaattgcgatgcaatttcgtatacttattcaattcatcccgataggccagcttacggcgcgatttcatctcgccctctgccaattcagcctttttatactcatcgacggcggcacgcaagtctcgcgcctccaatcgcagacgatcctgggccaggaaacgtaacttttcgcgatcagtgatttgttcacgcactgcgttgccaaattgccggcgcctctcctcttcggcctgatcttgctgctccaccgtgccccatttggcattgttgtagtcgcgattcttgcgagccatctcctcgtcatgatcgagttgaatgcgattgagtagcttcctttcctgtatctgagccgtccacatggcactgcatttggcctcggatatcgcacgcgtggcatccttaactcgcacatctgactcgtatttggcatccaaggcgcggtgtagtacctacaatgggtggtggagatatactttcggaaatatggctaagaaccataaaccaaaaaactacctgcaatcgtttggcctccgcacgccgatcctcgttgacatcctcatcggcctcgtcatcgtccctcttctgggcctcgcgctccttctccctgcgctgctcatcaatgtcgtggaaatagttacgcatacgttccgcttcggctgtatgatattgctgctcctccatccggcgatcctgttccgcgcgacgctcctcggtggtacgcggcctcgatgcccgcatgcgatccagttcgcactgtgagagctccgcatagcccttggattcccatgattgacccttgatgtgaaagaacgtggccttggcaccgtcgtattttcgggctcgcggtggcgccttaccgccacccaccgccgaacgtgtgatcttctgtccaggcacggctactggattcggtagacgtgtgccgggcggtaatggtcgcctctgaacctttggctttacgggtctatcacggcgtacgccacatagtggctcctcttcgacggtcgataatggtggcgtttccagataaatcggcttcttaagtcgatcatagcaatccgggtgcagtttcatcgcagctcgcgaacgacatggcatcaccattggcatcttgacgaattctattctatatgtatatcgcgtttgaaattgcaaatggccagaggggtgtggggtaaaacgcaatagcagatttctcgcttagctattgagtttgttcctttgttcggtttgttggcgtgtctgtttgtgttatttgctcggaggctcttgttttgtttgcttgtttcgtatatttcgtttgtttatccaatcgaatctggcaggttaaatctacatgaattcaaagcttgctgggtatagcattacaattacagggtatttgctgggaatgtaggctcacaggtactttttgaatcatagagttcctttaataggtcggttatacatttgagtatcccaaaattaaacatgctcgtgtacgctgcttctacacttgttcacacctgaccacttgagtgtcgttttttgtcgagtggcaggtgagaaggaaaaactagaggataagtgaaggggggggggggggggcgaggatatatggaaagctagttgggggaaaaagggaaaggctgccgccgctgctgcatttacttccgcctgctttggttgcattcgaaggcgttgatgcttgcattttggaatagccccgacaatttgcattctttgtatgtaagtgccacgcccatggcccgcttgccccaccgcctactctcccttcgaaatccagcca

SEQ ID NO: 10481 - DNA, 765 bp, DROSOPHILA
tcatgggaatccaagggctatgcggagctctcacagtgcgaactggatcgcatgcgggcatcgaggccgcgtaccaccgaggagcgtcgcgcggaacaggatcgccggatggaggagcagcaatatcatacagagcagcaattgaaacaacagcgagcggaacgcgaagccatcgcggcggatgagaaacgcaaacgggatgttctctttgcagtcggccaaaagattctcgatgctaaggataatcgcgaggagatgcatttcctggcggaacacgaacgcctcgaacgaaagtacagagaaaacgaacgtaaggcagccgaaaaggaacgcaaaatggccgccgaactcaagcgtgccaatatggagcaaatggagcatcttagccaaatgaaggcctgcttctatgtgcaacgtgaacgcgaactaaaggagatgatcgagtatcgaaagaagcacgaggagcaaatgaagcgcgaggccgaggagcaggccatcaaaaaggcctgtctgcgctccagtgtctcgtgccaaatcgaagaacgggagaaggctcgtcgccgcgaactggaggaggaacacttggccttcgaaagggagcgggcagctgaggcgcagcggcaaaaggaaatcgatacggtgatcacagtcaaactggatgatctacaaaagcgcggatgtctgcccaatttggcggtgcaatcgctaaagggtcgtgtcgccaatgctggcaacaaaaagaagctgggcgctgaattcacttag

SEQ ID NO: 10482 - protein, 237 aa, DROSOPHILA
MRASRPRTTEERRAEQDRRMEEQQYHTEQQLKQQRAEREAIAADEKRKRDVLFAVGQKILDAKDNREEMHFLAEHERLERKYRENERKAAEKERKMAAELKRANMEQMEHLSQMKACFYVQRERELKEMIEYRKKHEEQMKREAEEQAIKKACLRSSVSCQIEEREKARRRELEEEHLAFERERAAEAQRQKEIDTVITVKLDDLQKRGCLPNLAVQSLKGRVANAGNKKKLGAEFT

SEQ ID NO: 10483 - DNA, 4071 bp, DROSOPHILA
ccaccattctagacacctccgtgcagcaggctctggaaagtctaggcgacgccaatgcagacgactgcttgaccacgcccattcgattgctcgaggaacttcgtaccaatctgtttgaaaatctaaagcacgagattaatgccactgcggcggctccaaacagtgtgatctgccatggtgacctttgggtaaacaacattatgttccgctctgagccagaggaggtgatcttcttcgacctgcaggccatgcgcaagtcgtcgcctatttttgacattctccacttcatttacaccagcacgagaaggccactcagggatgtgcacacggacaccctgctggccgcctactcgcaggctttgagtgaggaactaaggcaccagctggaggatacaaccgctgccgaaaggctagaagagctatgtgaagcattctccttgcagcgcctcagttcggattatgttcgacaggtgcattatggactggctatcggcatgtggatccttccagctgttaccttcgatccgaataacctacccaacctggacgtgatgagtgaacagaatctcacgggcaaggagatcaagtgcacccagatgctcacttccgagtaccatatgcgcatacgggagttggtgatggaattctacgagctcggctatcttcagatgcaaaaggaaaccttgtaatagtattcatagtagtgtagtgatagatttaacttttaactctaatgttcgtaagaaatagacgctatatttgccctcgaagaactctctaaaaaggttctctctaaaaggttcctttattaccgaatagttgttcaatatgcaacttacaaaagtttcgtagaaaaaacaaatctggcgggggtaaaagcccaaacaaataacttataaaacggacataccgcagcgtggacatggatctaaaggctttataagtgtaacatggatgcgtggaattccagaagaatacgttgtagtggttagaatccacttcacttgtttccgcccccaccccatccgaggaatcccttgacaaagccggtaatggaggctcctttcttgccgggcgattcaagtttgccctccagcgagggaagctccacgtaggtcatagccaggtcaaagaaaatcggtttgcatggtatgggttccatgtcaggggttagcttgaacacgttaggcgccttggtgtgcagggactgatcctccttgtatagtgacaaacgctcatacagcggttttgtggtcttctgcgacttggtggtggttccggactcctcgctgttgtcatcctccagcacactgtatgcatgggcggagaacttgcatccgtcaatggcggacacgacctttttgagttcctcctgcagctgaaactccgggctactcttgcctttcagcgcctcggtggcgtagttagatgcgcgttcgtaaagcgccacggcttctttccatttctttatgtcgatgagtgtgagcgcaatgtagtagcagcggaaggccttgaaggtgatggccaggttctccacctcgctttggtacgtggcgtcgtcctccaaaccgtttatctgctgcatttccgtcacgttctgcaggatgatctcgtaaagacgggccaaatcctggggtcggacgcgtttgccgtcacccacattttgttgagactgcaggttgggatcgtaaaagttgagcttagcctggggaggaaatatttttgcataagataaccaagtaacgttgtgtttacgagcctacctgttccactaggcaaagattacgctgcagtgtacggctatggcgaatataacttaaatatgccagtagatattgtacgccggatacggtctgaccggtggttaacgaacgcagcttgggatcctgtttgatttcgtcgcgaacggcctggatggcatccttgcagtccatcaaaatacgctcaatcaattctatcttggcatcctgcttggtggtcttggccagcgacttgtccaactcctgagcactgagcaggaacaaacgcaccttctccggacgcacggtgaccttgcgaccgcgccagtcgatcgtctgcaggccctcgctgctctccgtctttgtctgactgaccagtacgtcaagattctcaagcactccctgagcgcgcagctccaggatctcgtcgatcttgccgccactggcgccaccgctgatgttgtaggcgcagtagcgcagattgggcgtaaattcattaaccttagcgcggtaaagctcttgttcatcttcgggcagagccttgcccaggttttcgtacaccacttgggcgcgctttaggtgctcgccagcggttttccatagctgcagctcaaagtgcagggttccgtgcatccaggcaacataggcttcgcactctagcttagtgcgcgcatcgaaagcctccgtctacaagaaaattataaatgaagctcaataaacattaatcataacagtgagttacagcttacattacacaactcctggagctggagggcatagaaacaggccctgcgcagcttgttgaccagatggaaacgctttcgcggctccgtattggactcctgcttgagctgcatggcatacgcccaggcccgctcggcgcagatcaatgggatgtggatgaaacgctcgtccgccttcttgcctgtcaattggccaatggtcacgtcgcgtcttttgaagtgccgcttgtcgccctgggggtacttcagggccttcctcaatcgacggatgcggcggctgcagtatccgcggtacctctggaagtcgccgtggcgcaggccgtgttgttgctgggcatccttaatcatgtgcagaactgcagcaggagtgaaagttcagggcattagcattaaattttaggttaaatggttgggcgtctgggccacctggcagttggctgtaggcgattggggcacttactctccaccgtgaagatcttggagggctctgccaccggagcagtctccgtcttttcctgaacgtccccagtatttggattatcttcttgcacgaccattttcttagcagtcgacacaaatcaacgacgtgtaaaaattagtgattgcaattccaatgggattgtcaaaaacactaaataatcgatattattaagagcggctcttgtgcgatatatatttatatttatttataggatatattatcagttcggaaattacatgttcctatattgagagatagaagttataaattttatttgattgtcactaagcttactttaaataaaatccctgaaacattataaaacttatgttatgtaaaaataactgcacaaaacaataaataattataaacatgctatacgaaattcaagcccacttattgatatcgatagtttcaacggcgcatccctattcgtagtagtgttgagaaactcatcaaagctccccccttttgaaacttgttggctgacacgcaagagcgtgcgttctgtctgttttacaacaatttcggccaagttcgcaggtaaatttcaaatatttcagcactctgtcaacgtgaaatttaagaacaatgcctgacgcatgagagacaatagaaatttatggtggaaacccattgttttggccacgctttgaggttatactttcactcactgacaaacgctggcacctcacccccgctcttgtgtccatgaatcggtgcaccagttttgttttgacggtcggggatggtgatttgcaacgttgacaatggactgattatcatataggcggctgattagtggatcgaagccaattctgtttaatttgctcatttgaaaactatcaacagcatgtcgcgcagaaaggagaacgaggaggtggacaagcagacgcgtattgccatcgtcagcgatgacaagtgcaagcccaaacggtgtcggcaggagtgcaagaagacctgcccagtggtgcgcatgggcaagctctgcatcgaggtgacgcccacgtccaagatagcctcgttgtccgaggagctgtgcatcggttgcggtatttgcgtcaaggtgggtcagcttacctacaactgctgtagttcccggaataac

SEQ ID NO: 10484 - DNA, 1847 bp, DROSOPHILA
cacgtcgttgatttgtgtcgactgctaagaaaatggtcgtgcaagaagataatccaaatactggggacgttcaggaaaagacggagactgctccggtggcagagccctccaagatcttcacggtggagattctgcacatgattaaggatgcccagcaacaacacggcctgcgccacggcgacttccagaggtaccgcggatactgcagccgccgcatccgtcgattgaggaaggccctgaagtacccccagggcgacaagcggcacttcaaaagacgcgacgtgaccattggccaattgacaggcaagaaggcggacgagcgtttcatccacatcccattgatctgcgccgagcgggcctgggcgtatgccatgcagctcaagcaggagtccaatacggagccgcgaaagcgtttccatctggtcaacaagctgcgcagggcctgtttctatgccctccagctccaggagttgtgtaatacggaggctttcgatgcgcgcactaagctagagtgcgaagcctatgttgcctggatgcacggaaccctgcactttgagctgcagctatggaaaaccgctggcgagcacctaaagcgcgcccaagtggtgtacgaaaacctgggcaaggctctgcccgaagatgaacaagagctttaccgcgctaaggttaatgaatttacgcccaatctgcgctactgcgcctacaacatcagcggtggcgccagtggcggcaagatcgacgagatcctggagctgcgcgctcagggagtgcttgagaatcttgacgtactggtcagtcagacaaagacggagagcagcgagggcctgcagacgatcgactggcgcggtcgcaaggtcaccgtgcgtccggagaaggtgcgtttgttcctgctcagtgctcaggagttggacaagtcgctggccaagaccaccaagcaggatgccaagatagaattgattgagcgtattttgatggactgcaaggatgccatccaggccgttcgcgacgaaatcaaacaggatcccaagctgcgttcgttaaccaccggtcagaccgtatccggcgtacaatatctactggcatatttaagttatattcgccatagccgtacactgcagcgtaatctttgcctagtggaacaggctaagctcaacttttacgatcccaacctgcagtctcaacaaaatgtgggtgacggcaaacgcgtccgaccccaggatttggcccgtctttacgagatcatcctgcagaacgtgacggaaatgcagcagataaacggtttggaggacgacgccacgtaccaaagcgaggtggagaacctggccatcaccttcaaggccttccgctgctactacattgcgctcacactcatcgacataaagaaatggaaagaagccgtggcgctttacgaacgcgcatctaactacgccaccgaggcgctgaaaggcaagagtagcccggagtttcagctgcaggaggaactcaaaaaggtcgtgtccgccattgacggatgcaagttctccgcccatgcatacagtgtgctggaggatgacaacagcgaggagtccggaaccaccaccaagtcgcagaagaccacaaaaccgctgtatgagcgtttgtcactatacaaggaggatcagtccctgcacaccaaggcgcctaacgtgttcaagctaacccctgacatggaacccataccatgcaaaccgattttctttgacctggctatgacctacgtggagcttccctcgctggagggcaaacttgaatcgcccggcaagaaaggagcctccattaccggctttgtcaagggattcctcggatggggtgggggcggaaacaagtga

SEQ ID NO: 10485 - protein, 604 aa, DROSOPHILA
MVVQEDNPNTGDVQEKTETAPVAEPSKIFTVEILHMIKDAQQQHGLRHGDFQRYRGYCSRRIRRLRKALKYPQGDKRHFKRRDVTIGQLTGKKADERFIHIPLICAERAWAYAMQLKQESNTEPRKRFHLVNKLRRACFYALQLQELCNTEAFDARTKLECEAYVAWMHGTLHFELQLWKTAGEHLKRAQVVYENLGKALPEDEQELYRAKVNEFTPNLRYCAYNISGGASGGKIDEILELRAQGVLENLDVLVSQTKTESSEGLQTIDWRGRKVTVRPEKVRLFLLSAQELDKSLAKTTKQDAKIELIERILMDCKDAIQAVRDEIKQDPKLRSLTTGQTVSGVQYLLAYLSYIRHSRTLQRNLCLVEQAKLNFYDPNLQSQQNVGDGKRVRPQDLARLYEIILQNVTEMQQINGLEDDATYQSEVENLAITFKAFRCYYIALTLIDIKKWKEAVALYERASNYATEALKGKSSPEFQLQEELKKVVSAIDGCKFSAHAYSVLEDDNSEESGTTTKSQKTTKPLYERLSLYKEDQSLHTKAPNVFKLTPDMEPIPCKPIFFDLAMTYVELPSLEGKLESPGKKGASITGFVKGFLGWGGGGNK

SEQ ID NO: 10486 - DNA, 14344 bp, DROSOPHILA
gtcgcactcttgccgccgatgcacctgctcgccaaccaaatgtaaacccaactggccaccgaatgtgggccgccctaatggagttgtccccgggcccaaggttcgcaacttttaccagcctgctctgggcgatcattagctgacagaaggcctcactcgacggacaacattttttgggctttaagtcttagttaaaacttcttttttgggcttctaggggatcttctatgcattcggaaggatacaattgctgatgttgggatatgtacctatagtaagtcagcaatgaatttgctttcataaatatacattaaatcttttaaagtgtatcctttacgcagaactttccatatctaaatatgtctcttaaatttaaaaatatattataaattattctagaagtatcctaaaaaaatctattaggtgaggcttttgaaatccttcaaaatcagtggctgcatccttatttagacagtctctttctcgtatgacataacatccccctgttctacgacattccagaagccttgttagggaaacctttggtcctttctgggagagtatcaagcgattcggcgcagagagcgaacaaagatcgaggtaccctttatttttcgagagtaagagagttcatacgagttgctaaggatatagctatgcatcttattctgcatttaaatttaaaccaatacactatgaaaatccttaaacaaaagtataatttatacacatatgtatgtatacttaagttgttatattttatgtctagctaacgtcagactccacgacttgaagtgttactttatacattctatgccccttaaaaggcaggtagtaggtatctaaaagttgccacccctgcgagctgcgttcctttttgcagccgctgcttctgccggcgtcggcagagaaattcgagtctgagttctgaagtcgttttcgttgaggcgacgagctgagtcgccgctgtggaggaaattcaattgcgcgcaatccatcggcggcgacggttgtgtctcaaaagagccttccaactcctgactactactgatcaaaagaaataaaagtaaaaagtgaccaagttactgcggatcgaggaagttaaagccttgagcctccggcacgacgatggtgtgttaaacatttttgtgcgcttgtgtttgtttgtcggtgagttgagtgcgcgcgctacttttatttgttaacttcaccaaacagaaccgttagtcccaagtgccctcacaaaaaaaaaaaaatagaaaaacaccaactaaaggaaaagaaacatcataaaccgacgaaatatcccccaaagaatctgtgtaaaagtgcaaagagacaaggcggagaatgcgcccgaaaaaatcaaggaaaaaataacagaaaaaacatttggctgggtgcggtgatcttgaacccgggctcaactccgcgtaacggtgcatcggcaagtgcaggaagaaatgggtgaagatggaatagaggaggaaggaggagaagaaggatgaggagcgcgatgaggccgttgcatttcttttgattgcttgtgtatcatcttcggggatctctgagcgcccactctttttgcgggcattttccgctcatttttggcgcagcctcccaaaaggtaatctccccaagttcccaagaccagcgttataaaactgccgttagtttttttatgtttaaccgtttttgggcgcagccgcgaggagtgactctctcctgcagataattacggcaaaaaggtgaagaatttatgctgaccatcaaaatagctaatagttggaagttaaactaaagcgctctgctaaaaagtctttttgcgcccaaatgattgtgcatataggcggggaaaatggcgattttcctgtcgccttttgatttatttacatgtgcttttgcagaagcacaaagaaataagaagccattctttgtgcagaagtcaaacaaacattctgactcattctcttcgcgctcttttttgttgaacttttatttgttttttaacatgagccccagtgcgggagaaagagcaagtaaagttaaagtaacggacaaggaacataagcatcgtcatcgcccccagttcttctccttatccctaccatcatcacgtgtcgccaactctgttcttcgcctacacagacataaaatgtgaggatcttaatttaaattagaatggcagttgtagtttttaaaaagtatttaaactaaatattaaaccaggataacttatttatttttcaaaatcttcacactttcttcaagaaaccgattgattgaataatcattttgacgaactttgatgatgattcgtataagctatttctctcagtgcacgctttttgctctggccatcagccatgtcagcgccttcattataataatttttattgcttttgcataaatcaaaaatcatggaaaaagaaacaactggcaatcgtaaaatgtgaagagaggctacaaaacataaaaggtgcgtttttcgactgtctgcactaatttcacaaaatgttgttcgttggacccgcgttttccttttttttcttaatcctcgcatttccgttactgttgcttttgtttttgtgccaaatcattgcggtctctgcatacaaattcattagtgacggcccctattctttgctcttcttgctcctttggaagaattctccatcttcaccttctccacctcccacacactctcgtttctgggaattgccatttttgtttttgttgttgttggagcacctttcttgcagcggattctgcaggaactcacacggcgccctctcttctcatccccattttttacaaagcctccttgtttctcgcttttctacagaattatgcacaaggcctaggggcaactttctttttgtgtgtttttagttcacagttgataggcaaaacttctggaccttttcaactcaaatgtagataataggaaatcaaggaaaatgctgcagtaaaactactttcttgatgtgaaatattatttatacactcatttctttcctatactattaattataacaattcatgggtcatgtaagcatttatcgtagtccatatcaatcagtcccaatctgtcttttgccacattagtttcccatggagtgaacataaccttctaacgcaacaaagctccacattccctaaataaatttcaacactttgttttgtagctctttcggagtctacaaaaccgaagcgcacaaaaaattaagatcaaatttttaccagctgcttagtttcaatttctttttgctcgattctgtcctgattactgtaaccaaaaatgtgacccacaccccctcccaaaagcccacactttgacaatttggtcactaattttagggccctatactccgatgtctgagcgaaatacagttgtcggtaaaattttattgatcttcgttttttctgcacaaaaatataaaattgtttcatggtcgaggctcgtcgttgctgttgttgccgacgaaatcgaaatctcgccaagaagcaaacggcaatcagcaaatcgaattcaaaacgcgtgtgtggagggaggaagtcccagatcccagaagaagatcccttaagagagcccaaagagacgactccagacttgagacgcgccacgacaataacaacaacaaagccgcaatcagcaaatacttggtttaggcgggccaatacaccggaaacaatcaagactaatattgacatgacataccttaactaaaatcactttgataggtgcaaagatagtttcaaggttccagtctattcaatttatatgtaattatttattcaaatttggcgaggttattaattatcttatttgaccgttatgactgggtaatatttggcagtgtagccactgtcccatcgaagagccacaaagggccgcccgaaaaaatatttttatcttgatatttctgtttttttgccgctgtttgttgttgttgctgttctaaatacgccaaaagttgctttcagggcataaatatatgtctttagtgtggcatgtctggttgcgtttttggaacttggtaaatgggaacgaatacagacggacctgaccaaaaaatctggacccgggatcccaaagtcgggcagaattcatggaattagttaacgattaatgattggatattgatttcgcttttgtggcctctgagtggttggatcgagtgactctctttggcaacttggcccgtccgtttcgcttttactactcattaatttcctttaactatcttgaggggcattaaaaaacactgctgagcaaaatgaagttcctgcggcaacatcttattcgcattggcttctttctccattgaagaagccactttacatagtttatttgcgttgttgccaactttctttttgagagattctcttccttatagcgtcgctaacagctttacgatctgagcagacataaaactcgcagccaaggaagataacactctactgccagtgccagaagaatggaatggggattctacgctgttcaggtagtattcttcgtttctgggaaacttaatttgtgctcctggccgccatatcaaattggcgctatcgaatacctaacagggggcaaacatatacccgtttgtttacacatatacacatacatacatatgaacacatgcatgtataggcaatgccccatataactatgaagcaccagcttaaaatttgcttagctcggtctcccctctgcgaaatttgaggcttaaattcttctcgatgagatgccattcggaacatcccatgccgcaacccataccctacacatttgcgtagaagcggcccgaaaataaaaagagaatagcaattttaatttgtgtgagaacttggccccattcggtcttcgggatttcgttcactttaaagatgctgatgatcagggtacgacggggggattaagatggcgcatatttaccgccgatcattagctattagaccgaagactccttggcaacaagcccgattcttcagcgcccagattgtgagccactgaagacgcggagtaattgagccgttgtagctgtagcctcgtccaggcccagtcttccgactctagtcttcagacgccaatctgcctgccattgctaacgagatacgccaaactatttggcaattagcggataataacatttggttacacatttgcgaaataatgagaaattttatgtggagatgccatgaaaagattacgcactatgcgtcctgtaaaaggtgtatgattttatgacacgactctggcattcttctataatgtaaagtgaaagacagcgctgtcgagctttacttggttatcacgaaaggttcagttttatgtatatttatgtataatagttgaatgcggaattgcaagtacgccttcaacttttaactgccatgtttcggttaaatcccaattctctaaggacagttccctagaggaaattgcattataagtgtacaataagtgaatcattttttaaagaaatcatattctcgatatgaatgaaaatacaaatagagatttcatagttcttggaaaaagtcagaggaaaaagctgagaaaaaacactcatttggagaagcaggatatcgcacttaaccagcaaaaagataacgatagttggctgtgagaatttggttggcaaatcctgtccagtagcaaatgaaatgagataattattatttagcaattcagcgtaatggaatcaagtcaatattccagttgagtgcggttatttgccttgagacactggctttttgcttgcttttaaagtttgatgccattaaacagagactagcactcgaaaccacgttttcccaatgaacaataatttctggtcatcctcgtgcgtctggcgaagattcttttggagctcagcctgcacagatgtgggcaatcaattggagaactcgcggagcgaaccccaataaacgatgcgctgatggccgaccatttcgactgatgactgcacacgtccagggagaagtggcccatattacgccataacgatatcaacgaaatgaatgtgcttcgacttacaagagaagccttttacattgagggaaaatttaaaaaattattcagggtattttcaggaaactaatttgttcaagattttgaaaaatcaagttcgctctccatttgcatggtttttaaaacagattgtaacgttcgctgttccggtctctcatttgcgtctttttttcccctaattctttagtcagactctacaattacaattattttcactacagtttataccaagcgtaacttccgaatcaatttctttgagatagttggtttctgcaagttaaattagactttttcccagtgcaaggatggaatatagaaaaggggttggatcaccggagacatgcccacttgtggcgcagtctctcttagtgcgccaactcatattaaaccaccgttatgcatatcagccacacaattccacagaactgtattctgacagtagagcggtgaagaaagcagggggggacgcaaacagatcgccacatatcgaatgaagattggcgtggccgtggcgtaaccctttaattatgccacatacgaataccaacagagtgagtctacaatccaccgagatcgttctaagccgcatttcgggatcgggctcacctctccacgtcaacgcctttcgaatggcactatgggttggtcttgatcttggtcttggctttggctttggtctggactctcgggtataactcctctgctactttctaaaaatctgtccgggaatataaattgcagccacgttctcgctcctttggtgagtgcgagtcaaaaattctgcagcactctgaagccgcatcttaattgcatttcgattacgctgctcttgctgttgctgcagcggcggctgctgcaaaaacaaaccaaccaaaaaatggcttggcaaatctagaagaattggaagcaagagcaaatcaaatctgtgagtgtttgccgaggcaacaaatgttgctggcaacatgttgcacttgcgaacaggcccccagcaattggtagaagttggagcctgccaaatagacaacagatgagacagccaggcacggcccagtccgcatctctggaacgccttttgcgcgatctgctgctgggcccctccgaccccaaaacaggttccttcgaccatggccaaaacgatggccaagtctggcgacccgacagcctcggctgctggagcctagaaattgtaacagccaagagcggaggttcggttctcaggcagcagacctttctcactggtcctgggcccatttaatacagttatttctattcgcggccctcgctcgatctacagtggaaactctatgggaggaaattttctcatcagtaatttttattttttgacatatgatgaaaaaaaaaattagacagaaatattggcctgcaataaaaagcataaatattatcttcttgagctgactttacgatcattttctcaaatcatcaacaggtatttcttttttatttcctgtactaaactctatttgctgttaaactgtagactataaaatgattagtttgtttttaatagcccacagttggtttatttgcatattttatacatgtaaaccattgcacattctttcgcaaatctctagagatttaaatgcctcatgaattaattgaaattgcgaacattacttggataatgttgagatttttaggtgtttgatcaattctaagttgcgtccactgtatctctgtctctcgaagaagcaacaagtacatcaacaatgggaaatgcaaacggtttttgtctggaagtcatggccatccatgaccattcccgttcacttatccctggctgccatcgaaggctttgatgctttcctaagtttggtttggtttggcttggtttggcactgcggctcctgctctcgagtcattaaaaacgattctactcgaactagaacagaccaacgggcaacgaaaaagcttacaagtctttcgcagaggcggagaaatagccatcataaatgtgcaggagaaaggccagcgaaacgaactctgaatgcccttaatgagcgcagatgtgcaagaagaaaaccgtagaaaagacaaatgggcattttaaataaatgttagaaaaggagacgatacacacacgtaatgaatagccatgaaaaattacgctatattagttgaattcaaatccaaaatccaaatggaaacctctgcaattaatttaccttgtgcgagatcaaggagaattgcaaactggctattatgtctgtctattgccagcccccaccgtatattttcgaaaggcctcctctttctaaaaccgagcgccttcaattcctgcggtgattttcgatcgcgatatcgagaaaagtgtgtgctattgctgacttgtcagctgttggcttgagcaaatattattacttgatccccaccgccgagccactccagtttttcccccattccctccctgccagctttttcaatgaattattagttatttcaaatttatgtgccgtgctgtttctgttttatgcttattctactgcctcgtctcgtatttttttttttttttgttatcgtgcgtctatttgcgtttccgctctccgatctccaagactcggacttggggtctcttctgggcctttcctttcgtttgctgaatggagaaggctagggcagaagcgcccgaggactgaagagagtcttcgaaccgttgggggcgtatttgcctaacaaaaataaataaatatgaatttattgcagctcttgctcagtgcggaatttgttgctgtgtcgcagggaacaacattaaaacctaatgccatcttgggccacgaaaagcgccgccagcagcgatcaaataaacaaataccgagcaaagctccgcttctccactccccccagaagatattattagtatttttatatgctggttttcatttggggcagataagcgaaataagctgaggctctcaaacagttggagcagtaaataatctttggaaaagcctggaaaaagggggtagcacgggtgtgtttttgtagacttctttttttttgctgccctggcaattcttccgctcagcagatttgttcattttttctgcccgcctccgagtggttctggtttctacgaatttgtcacgctttggatttcaaattttgttgatgttagccaactgttaatggaccccgcagcatactttcacatatgtacatacatacatacaagcttcctcttgcaaaatgatgtgaggcgtaagtaaaaggcatttaacgcttgattttgtgcagggtttagttttacctgctcccgatcctatgcgatcagaaactcccactcctcgaggacccaggactattgttgggcatttcgcagacccgcacaaaggacactcaagtaggggcggaaatttaatatgaactgctgcttattttttgtttctctgcttttgaaattcgagatttttgggctttggtcgatgctcctattgttcgcctacctgcctacctgttgatggtattatttgtgaatgtttatcaagatgttccatgtacttgctgaaactcaatattcgtgatctgattttcagccgaatataaatatgaatttcccgtaggacgggaaggtgtcaacgttttgcatttcgaataaacattgcacttgtcccggcctatgggcggtttgtaataaacaactaaaatctataaaatttatttattattactaaagtcatgtctcgtatttttgcttatgaaatattttctgttgtttcagatctcgaattcgcaatatcagaacatctgtgttattttaattatataaaagtatatatacaggtgagtttgcttcttgtttattctatgttcttatgtgtactcaatcgctttcaattcgtgttcatattatcccacacttcccagttacatttgatatttaaacatttcccaagcgcgcgcgctattctggtacttttcatcccttttccgttattaaaatgcccgaccgtggttgccacttgtatttgagtcgaaaacgctgccacctggttggctgtgtgctagagatgtgcaattgaatggtctgtgcaatgaataaaaagtgtcccaatggtgcaatgcagtttaaaatgattaaaaacgaaaagttaatactataaactacaataaaacaacccaaacgtagcagaagttagagtggtgctaactgggttgactgcatgttcaaagtcgggcgtctcgcgcgaaagaaatcgcctcacggtcgcatctctactacatggggttcggcgcctgtgtgagcgagagggttggtgcgcgcgtggtcgtgcggttgtgtgtctgtgtgagtgcctgtccctgtgtgagtgccgctctcttgcggcttgcctcgtccgtaattcgtaaaatataaaaataaaaaattttttcagtttcagtttaaaaaatattctcacagcgactagttgtgcgtgcaggcaaaaagacagagcatcgcgagcgaaagagagcggcgaacatcgcactggcggagcgtcgtgtgttgcgcaggcaatcttaattaatttatttacgtctatattgattttttaaagtaacagccacagctacagttagccataatagccagctagaaagcagaggcaagcccaagcgcaacgcagagcaaagagcgcgcgttttaataggtataaaaataaaaatacacactaaaaccaacctgaggcgaatctaaattgtatttctcgaggtgagtaaatctataaaaataaattaagatatttgttaattcgatattgccagccagccaaaaataataccagtttctcaattactcggtaatgtctgctttctttttattttagttttattatttctcttcagttttttttttatttatttattccgttcgcacagcgtaaattagtggtagtctgcaattgtttatttaaagtttataaggcgactctttatgtttatctgtgtgagcagagcagcgcagctggcgtcgcttaaaattaatatcaagcagttgcgagcgcgtttctgtacttttttttttaggtagtttgatatttttacggtattcgctggctttgtttttattgcgctgctggcgtcgacgccgacagtgcgcgtcgttcgcttagcaccaaaactgagcgatagagagagacagagagcactgaagatgcagttttgttttatatacacacctacgcacgcgtatatatacatgtaaacggctgcggctgtgtaaaatgcatgtacgccgttaaagcggatgcagattagggatggaaagcatagatttatcggtcggttatcgttaaatttaattactatctagccttgattttgtgagcagtaatacctgtccgaagtccaattactttgttgcttagctattatgccgcttaattctgctttgggagcacctaatttactttgtatttaatcgatccgtatccctaaaagatcaccgatttatcgaagtgataatatgcaggatacgatccatccagcatcaaaacctcaagcagttttacgaacattcagtagttctcacacgccaatgcttcgtttaatagtcttcttctgctcgaccagactttgttttttaattgtttatgctcccttttgttgaaaaaccggtaactaagtaagtgtgtatgtatatcctcaaaagtattccttctttcttgtgttcttttctttcgctggatcgattctttttttagacctttgagcggcattaattatgttttagaaaaagagcggttataaagtaaaaaaatatgaacattcaagttttcatgtattatgtatttttaattttttagttttttaagtcagttcgctttgaataactttttagttaaaaaaaaagagaaaactgaaaaatcaaaactttaacaaatcacaaaataacatttaaatggaaaataataattctttcattgttgaaaataaccatggcagggctggaggaggaatggagaacctgtcgcacttgtatccaccgcagttgccaaaggggcgtggtcggcctcgagcgacatacgcccaaacgggcgagtttgatctgggtctgatccgggaataccgatcgcacccagtgctgtacgataggtcaaacaagcggttcaaggacaagctgtatgtggcccatatatgggaacagatagcccacaaactgggctacgatggtgagcaaggggattaaaccagtttgagatgacaggaaataattctaggcatattcccatcttaattcgtagccaccagtataagggaacggatgaccacgttaaggaatcgatataacatcgagaagcgacgcgtcgagaatggcctttccacacagtcttcacaatggcctctattcgaaagcctccagtttctgggggatcacatacggcccaggcgcagctttaagaacatgagcgtaaaggaggaggatgaggagacctacgaggtggacgattgccggagcgacagcaacgggcatatgaacagcatcaaggacgaactggaggacgactccgagatcttcgattgcgagcaggcactccccgtgaccacagtgttagggtaagtccatgatccattgctgcctaacgtaacatttgctaataacaagacatcatttctttttaggattcccctgaataactctgacgaagccaacaagagccagcgctcgacgaatggagaaatgcccaatggcaagggctacaatcactttgcggaaagctatcaccgacgacaccaaaaccagccggagtacatcatcagtagtccaattgttaatcccatgaggagcaataagcgtggatcacagcacttggacgatcatccgtcgaaacgccgagtcgacgacagtctgtcgatatccggatactatccaacacaacctctagcccccttgccaccggcgtacgccaaattccggggatttggcgagttcatgtgccactccctgtgcgatatgccagcggccactgccttgcgcttggtgcagaagttcacccgcgaattggtccagtcctcgcttcgcaacgaggacagcggcagcaaagaaaagacggatgaggtcgatccggtagatcagagcagcgagtcgcaggaggaggacgagtagatttaagttacacttttaaattgagggtagggatattggcacgcgtgtctacatctatgcgtatagcataaaagctgcattgatgacaaattcgattaattcatttatgatttaattatactcttttaagtcttctagcctcgcagtaaccggggtggaagatccaagcatttcatttattaacataatggaaaaatacacttatttgctttgttttaaaggcaggggaacgggtcgactaatccaaattgattaattttcagattcggcaagagcataatactctatctgtaagatgcacatctgtaatggtatagaatcctataaatcctacataaaggaccatacatattttaaacaataattcacttcatggtttcattaaggcgtcaactgaaatgcaaatatacattatgtatataagtctgtgggatcagacgcaattatgacttcgccacgaatgtgagcgtctttcagtcagcgttccccttgcgcaactcggacctctataagggccatcattatcttacacaatagtaatctgcccctttaaggggcatatacatatttccatttcccttggcagacttaaagcaaacaaaaaggtccttaagttttattactttctgtatgcgagaaccaaccctaaagcttctgaaagcttccaccttcggcccttgaagctaaactttgattactatcccaaggaaatagtttcactgaggaagagctattcaagccagttgaactgtaggccatgaataatgcaatggatagctgaccatgctaataaactatctaccacctaattttacgcccgtcttaaaggccacccagaatcactggaggtgtttccacgtagattgctgatcgatgttgtgggacgtccaacgcaccatcattcccatcccgggatatggcgagaaaatatgtgccgggaaaactggaacctgcagtcggaattgccggcacagccgaatgcctaatgccaaatgaagtctgagtaggcacatctccatttgaccaaactgggtggggcctccaggccatttctatgtgcgttgcccccttgtttactcctttttctttaataatgcgtctatatttcttaattaaattacagcttctcgcatttgggagtgagtgtgtgtatgtgtgtgtaattacagtgtttatgtggcactcggacattcctggct

SEQ ID NO: 10487 - DNA, 2216 bp, DROSOPHILA
gcggcgacggttgtgtctcaaaagagccttccaactcctgactactactgatcaaaagaaataaaagtaaaaagtgaccaagttactgcggatcgaggaagttaaagccttgagcctccggcacgacgatggtgtgttaaacatttttgtgcgcttgtgtttgtttgtcggtgagttgagtgcgcgcgctacttttatttgttaacttcaccaaacagaaccgttagtcccaagtgccctcacaaaaaaaaaaaaatagaaaaacaccaactaaaggaaaagaaacatcataaaccgacgaaatatcccccaaagaatctgtgtaaaagtgcaaagagacaaggcggagaatgcgcccgaaaaaatcaaggaaaaaataacagaaaaaacatttggctgggtgcggtgatcttgaacccgggctcaactccgcgtaacggtgcatcggcaagtgcaggaagaaatgggtgaagatggaatagaggaggaaggaggagaagaaggatgaggagcgcgatgaggccgttgcatttcttttgattgcttgtgtatcatcttcggggatctctgagcgcccactctttttgcgggcattttccgctcatttttggcgcagcctcccaaaagatctcgaattcgcaatatcagaacatctgtgttattttaattatataaaagtatatatacagtttcagtttaaaaaatattctcacagcgactagttgtgcgtgcaggcaaaaagacagagcatcgcgagcgaaagagagcggcgaacatcgcactggcggagcgtcgtgtgttgcgcaggcaatcttaattaatttatttacgtctatattgattttttaaagtaacagccacagctacagttagccataatagccagctagaaagcagaggcaagcccaagcgcaacgcagagcaaagagcgcgcgttttaataggtataaaaataaaaatacacactaaaaccaacctgaggcgaatctaaattgtatttctcgagatggagaacctgtcgcacttgtatccaccgcagttgccaaaggggcgtggtcggcctcgagcgacatacgcccaaacgggcgagtttgatctgggtctgatccgggaataccgatcgcacccagtgctgtacgataggtcaaacaagcggttcaaggacaagctgtatgtggcccatatatgggaacagatagcccacaaactgggctacgatgccaccagtataagggaacggatgaccacgttaaggaatcgatataacatcgagaagcgacgcgtcgagaatggcctttccacacagtcttcacaatggcctctattcgaaagcctccagtttctgggggatcacatacggcccaggcgcagctttaagaacatgagcgtaaaggaggaggatgaggagacctacgaggtggacgattgccggagcgacagcaacgggcatatgaacagcatcaaggacgaactggaggacgactccgagatcttcgattgcgagcaggcactccccgtgaccacagtgttagggattcccctgaataactctgacgaagccaacaagagccagcgctcgacgaatggagaaatgcccaatggcaagggctacaatcactttgcggaaagctatcaccgacgacaccaaaaccagccggagtacatcatcagtagtccaattgttaatcccatgaggagcaataagcgtggatcacagcacttggacgatcatccgtcgaaacgccgagtcgacgacagtctgtcgatatccggatactatccaacacaacctctagcccccttgccaccggcgtacgccaaattccggggatttggcgagttcatgtgccactccctgtgcgatatgccagcggccactgccttgcgcttggtgcagaagttcacccgcgaattggtccagtcctcgcttcgcaacgaggacagcggcagcaaagaaaagacggatgaggtcgatccggtagatcagagcagcgagtcgcaggaggaggacgagtagatttaagttacacttttaaattgagggtagggatattggcacgcgtgtctacatctatgcgtatagcataaaagctgcattgatgacaaattcgattaattcatttatgatttaattatactcttttaagtcttctagcctcgcagtaaccggggtggaagatccaagcatttcatttattaacataatggaaaaatac

SEQ ID NO: 10488 - protein, 336 aa, DROSOPHILA
MENLSHLYPPQLPKGRGRPRATYAQTGEFDLGLIREYRSHPVLYDRSNKRFKDKLYVAHIWEQIAHKLGYDATSIRERMTTLRNRYNIEKRRVENGLSTQSSQWPLFESLQFLGDHIRPRRSFKNMSVKEEDEETYEVDDCRSDSNGHMNSIKDELEDDSEIFDCEQALPVTTVLGIPLNNSDEANKSQRSTNGEMPNGKGYNHFAESYHRRHQNQPEYIISSPIVNPMRSNKRGSQHLDDHPSKRRVDDSLSISGYYPTQPLAPLPPAYAKFRGFGEFMCHSLCDMPAATALRLVQKFTRELVQSSLRNEDSGSKEKTDEVDPVDQSSESQEEDE

SEQ ID NO: 10489 - DNA, 11580 bp, DROSOPHILA
gttcgccggagagagcgacaggtctgccctcccgctcccactcccacacgctggccacttgagagtgtgaccgcaccgtgatttacacgccagacgcagcgactgcgcagccgcagcgtcgaagggagacgttcgcagtggcgtagtcacaaaaataaaccttatttatattgttatgtagtactagaggcagaaacatgaatgtttagttaatgtaatatagtatattggtcagttatagtttttaatggtttgtaaattcgcagagtactaataagtttgattggtgtttcgatttattcaagttgtattgtggttctatctatatatgatttagagtatctgttttggtttaatatttccaaccaagtatcatttctcttgtgtggaagtaaagatttgaaataatttttaaagttttttttgagtgtccttcaaactattcaaaagattttgttatatgcgataacatttgtggaatgattcgtatccgtagaagcattaaatctatgtataacccctgtatccgaagggggttgttatcccccctcttccacggctctgtccgaacgcattcctaagcacctgcagaaggtaaaataagtcgcgatcgcagcggcagagccacttgagccgaaacaaagcggtggctgcgatgccggcagaggctgcgtgcgaagcgcaacagattcttttcttttatctagctctttttcttgttgtttgccctgtgcctttgattcctttttacctaaacaaaaaaaaatgcacttgagagcggccaggcacgcacacacacgagcgcgtgctgcacaccgacagggcaggtaaacaaacatggcgagcgcaagggaaaaagagagagagagaaaagagattggagccgtgaaacgaggagagagcggcgctcgatttatgctgccgacgtcgctgccgctgcccttggaaagaacatcgtcgaagaatcggcgattgccgcatttatgctgaaaagtgggaactgtcaagagcacaaaaaataagtgaagagcaagaacggaaaaagcaaagcgatgcgaatgcagcggacaaagcgaatgtgacaactacaacacgacgacgaaggcagaaaagtgtattttaagcagcggttggccagccacagagattttcgtggaaatgcccaagagtagcgcaaggacgtcatgaatgcgttccaggactttgagctgggggccaaactatatctgcagtgcttatgtaatgccaaaaaagatcgaagaataaccgaacccctaccgacactgtgctctccgaaatcagtatttaattttatcccattcttgcattcctttcagtatcgctgagcagctcccgatctgccacgccatcctacacctcacctgttaaccacgctggagcttctcctctgaatgccattgcccattcgccggtgaatgtgtccgccactcataggcagaactttttcacacccattgccaaccagtcgcagcagcaacagcagcaacagcctgtggcggtaccgctcgactccaagtggaaaacaacacccagtccggtgctctacaatgccaacaacaacagcagcaataacaacaccagcagcagcaacaacaacaacaacagtaactgggaggtgggcagcaatagcaatactcatgttgcagctacggcagcagcaacatcaacagttggcgctcaaccactgccgccgcaaacgacacccgtttcgctggtgatgcacgccccaccgccgcagcagcaaccactgcagcagcagcaccaccatcaccaaccgcctccaccgccacctgctagtttgccagcgccatcggcaccacccaccagcggcagcagcagcagccacaacagcgtgggccatgccaccagcgttatacgcatttcgagcagccaacagcaacatcagcagcagcaacagcaccaacagcaggcacatccacatgtggtggtgagcggcggacagacttttcatcccgtaatcgtggacgctactcagctatcggtgccgctgccacccacaacggtttcatttcatcagcccaacacgcccacctcaacagcggcatcagtggcttcaatgagccaggacaagatgctggcaaaaaacggtaagttgatttataccattagtgaacaagaattagaaattggatttattggtccattactcacacgatggcataacaaagtccaagtcaattatatttgaatgtacaaaagataattgttgtggcctttcgtaataacctttacctccaacatttgtaggctacaatgcgccctggttcaagctgttgccgcatatgacgccaatgagcaaggcgtcgccagctccggtcactccgaccctaaccacatcggccagcagttacaacgtggtgatgatgcaacagcagcagcagcatcagcagcttcaacaacagcagcaactgcagcagcagcaacagtcgccaccccagatgccgctgaaccacaacaacaatcatctgattgtgtccgccccactaagctccccgggcaagccactcaactgctcaatgaacgatgccaaggtggcggcggcagcagcagcggccgcagttgccaaccagaggcaaaagcagcagcaggaggagccggacgatcagctggacgatgatgtgtttgagaccacaacgcccggtatcagcgccaacagcaaaaaacaaactgcggcaatgcggctgcccacccacaacagtaacatacgaaagctggaggaatgccatgatgatggagctgcaggtgcaccagccacttcggctgccaagcggaggagtcaatcgttgagcgccctgcagcaacagcagcagcagcaacagcaggccggtgcggcaggaacagcagctgggcagccggcgaacaagaaaatccgaagacccatgaacgcttttatgatcttctcaaagaaacatcggaaaatggtgcacaagaagcatccgaatcaggacaaccgtacggtcagcaagattctgggcgagtggtggtacgccctgaagccagagcaaaaggctcagtaccacgagctggccagctctgttaaggatgcacacttcaagctgcatccggagtggaagtggtgctccaaagatcgccgcaagtcatccacctcgacagcaacgcctggtggaaaggcgagcggagcggccggaacaggtgacgctaagcagcgcctggtatcggtggatggctccgattccttggagcacgatatgtgcccctcaacgccaggaggcagcggcagctgcggtggccagggcatatcatccgatttgcagggcgatattataccgctgacaattgacaactacaatagcacctgtgatgaggcgccaactacgatctcgatgaagggcaatggcaacggaaagctgatgaagaacgagctgccatcggacgaggacgaacagatgctggtagtggaggaggagcagcaacagcagaccgtaaagaagattgacctgcactgccgcgagcgggtgaatgactcggacatggacgacacaccctttgactaccgcaagcagcagccagaggcaaatcaggtaaattgaaggggacacgttagatgttccttcctaactgaggattctatcattttgcagcgttcggcagaggagcacagtacatccggtgcgaatggccaggccataaacgcaccgccgctcagcggaggagagcgcgagatcacactcaaaccgaaggctatcaaagcacatccggtgctggagagcaacatgctgccatatacccagatgtccatctacacgcagtacactagtcccaagaacccaatcggtgtaacaccattccaacccacaggcgagcaaacccccgcttatttacaacacgcaattccatgctaatcgaaggataccccaaattttgctccttaggcggcgccttcaaatcgatgcccatcagccccaagggcagcggtggcaagccggaggacgctggctccctgcaggcacacatcaagcaggaggacatcaaacaggaaccgccatcgccatacaagctgaacaatggttcgggatccgcctccggagggggcgtggtcagtgctccgccgccgaatagtggtagcgttggtgccatattcaacttcaatgtgccaacggcgacggctttgagtcagaagcagtttcactacccgatgcatcatcctcatcgcagtcccacagatcttagaggtgagtgacatgttccctgatggcttcgccaaagtaaatttacctaaacgtagttttggaacataaaggcagttgtaaagtttattaaatagtaaaattcactctaattaaactttgctaacacgtttgtatgtatattgctctacaaccgtcttaaagttctttgataaccagcactattatgtttgttaattattgtaattaggaaatattatttgtatattttattccaacaatttaattttacttagctagatctggcattatttctactatgatttgttgacgccgtatgattttatttaactagtattttggcttatgttgatgtgccgaaaatgaatttcgagaaaataaaattggaacattcccagcacctgcatagatcgcctcacgccaaagacccactcccacatttaccattcgcaagctcatctgctgagtttttcaatcaaaagctttctgcataacataacatctttctctctgtttctttcacttctatctcacacacaattaacacaccccactattgatcttcctttgtcgcgctgtcatttgtgtcacctcacccataacaaattcaatcgatcgcagatgaagaagcggatagggaagagattacacagggcacgaagtcgggggagagtagcgaaaaggataagccggccttggatgatcaggagcgagatgaggtcgaggaggaggacgaagacgaggaggatgacgacgaagatgacgaagatgatgagcagttcatgcaggagctggccagtgtgaatgccagcgctggattcgacgaccttgttccatatgcaatgcctaaggtcgttataacgcccacccccacgccaccgcctgtggccaccatagtgacccccatcaagcgcaagcagttcaccatagtgcgatcgttgacgccgctgcagccttcgaattccccgcaccagcagttgaagcatctgcaccagcgtcgcggggaaactccgccgacggtcatcacccgcgtgcccacgcccaccatcaatcacttcaccatcatacgaacgcaacaacacccacatacccatccacacaacactccgccaccgttgtttttcaagcagaaggttcagggttcaccagtgattgccacggtcacaacatccacattatcatcatcatcatccaacccagccaataatgaagcccctaataaattttccaattttccaacacaacaccaaccaacaaccacaacaacaatatcatgcaatactaacaacaatgccacgccaatcatacgaaaattgttgacgctccaagaaggcgccgaactcggcggtagccataagggcacaggacgagcggcgatcctttacgacgctttggtgctagacacattgcacggtcaggatgaagaggaggaggaagatgagggcaacgcagaaaagcaggaaaatccaaaggtagcaggcaaggagcaggttaccacatcccaaccggcgaccatgctactaatcaccgatgtcaacgcgtacaatcagcagcatgttgctggcaacgcggcaacacccgtgtcgggagcagctacccttcgaccagtgtccttcatcagtattaatgcctgtaacaagatcacattgccagccaatgctcgtatcctaactgcggccacggcaacctccacggcagctggagcagcggttactagtcaggcaggagcaactcttaccgtgatgacaaaggcgtcggcggcaacaaatcatagtagtagtaatgccagcgatataaccatcacagcagcatcagctgctcctgtgcccaccagtggctccagtattgtcatgataaactcaaccacaaacccgtctacatcatcaaattctacatcttgttccgcagctgcccaccaggcgtgtgtgccatcgtcgccagcgggcatgggactggggcatgcggccaacattgccacgcctccagcatcggcgccggcccagatcatgggaggcggtccagccagtcagaagatgttcttcgccatgactcatccggtaagcaacattaatactcactggtagtcagctcttgaataataatcatcacttgcttttcagtatacgttgctgcagcgctcccaccaaccgggcacccccagcctagagcacttgcagctggacgcttttgcgccaggaggttacaccttgaggaaccacaatggcctgtcttccctgccaccgcccgtgagtgcgcaacccacgatgctgctgcacggatacccgcccagccatggtgtcgaaccaccggctagatcgccatcgtacaaatcaatgccatctactccaaagtcggccacatatctcatgagtgcgccaccggagcgaggcatggatggaggaatgagtggatgtgcatcagcagcggcaagcggaggcgatgaaagcgacatagatgcggatggccagcagtttattttggcacccacgcctgcgcagttgggtcgagctccactgcagaggaggaagaatctatgtaagtaaactctcgaaaatcacattgtaatttcgatgcaataactaaccatattgtgtaattcttacagctcaaagcaagtcagagagcaatgtgtcctttggcgctaatctgggggccagcaatggacagcacattagtcgcaagctgcactcacccacaatgatggaatcctcatcgcccatcataggccacgtgaacagcagcaacctcagctcggccctgccaacgcccacgtcctcgacgacgacaccaaacagtgatgagcaactgccactgacgccgacaaccagcagcagcaacagtaacttaaatcagcagcagcccaagtcaccgatgaaaggtgctccaggatcaacggcagcggccctaaaaaagaagaacgatgagatgaataagtaagaatataacaattctcgtaagattcatttaattaacgccgatgcattcacagcagtgtgctcaagcaggtagatttcgaaaagaaatacaaggccctgccgcagttccagcctgaggattgccagtcgcccagtgccattgctgtgccctcatcgccacgcgtttacggcacgaattaccgcaagaagaacacggctccaccgccagttcagaagctaagtaagtttcaaattggtaaacaaggttaacgtattgttctacgactgtcatgttctctatattgttcagtgtgcgaggacgactccattgacgaaccagcatcggcaccgcctacgaccacacagcgattctttggtccggactttaacaatgagctaaagggtaagcctaattcaaatgtttctgtttaatagttttaatgttcaagtcagcgatagtgatatgaacagtttttttttacaccctgatttatgttaaggggaccccgtttgaaagagtttgatttatacctttacttttattttcaaatacctaatgaagacgaacgccttgcagaactggagagctctgaccaaacgggccgctcacccaggacgccaaagacaccgctacaaagcgctcggtccgatgccagtgagaaaggacaccgcaaggtcctggagacgcgtcgcagcctggtcttgcagttgtttgccgagcacggtaacttccccactgcccaggccactatggcctttcaggtaagttgtccgcacatttgatagtcctttgactcatacaaattatgccaattgcaatccacagtctaagcacagcgatgtctttccgcgcaagcaagatctgcagctgaagatacgagaggtgcgccagaagctgctgggccaagcatcttgcactccacactcggcgggccccaacacgccgtccgactccaactcgtcgtcgaccacattgagtgccagtagcaccagcttgaatatgcagaccaccagtgcggcaggtaattagaagaagttttctatcatgacgcgtctgtaggatcaaaatcgaattaacttcacttttgaaagctatgcgttttttgatatagctaaacattttctgcgtttgttacttattggtttttaggttataaagatctgttttaagtttaattttaatttgatttccatttcccaacgaaaacattgtacagatgtttttcaatattactgaacaacaggtggccaccagcaacagcactctgagcagcagccccattccgccaccaaagccactgaatctgatgccaagtacaagtaatggggcgtggacaaggacgaggagttcggcggggacaggacaggacaatggattgtttgctgcaagtgacaaaattacttaaggatagtaaacgaatcgacaacaacaattgcagcaacgcagactcacaaaacgaaacggatgtgcaacaaagctcacacttagcaaacgctcatgcatcagatgcatggttaactagtttttattattaactgctaatagcgaggaagcaaaacatacagaaaatagagaaaattacaaatttttaattacaataggcatacgaaatatgtacaagcaacgtaatttgtgagtcgagtggagaaactgattacaaatgaatttattaagcagcttaataaatcgggagaagtagaaattttgatgaaaatttgaacttttgaagcacatatgaagtacatacatacataaatagaaaacatacataatcgaaacattgtataatccccgcgtaaaggcttaggttttaatttacaggcaaaactgcaaccaacaaattggaagagcaaagaaagaactacggaaatagaagttaagctttaacttaaattgcacattaattttgaagtgtatcaagcacaagcaaagaattgtataaatcaaacagtaagaaacttgaaataaacactgtagttgtattgtatatttagtcataacatttttaacgagaacaaatccccacaaaacccccaaactaacacccaatcgcacatctacaagcgcttttaaactgtttgcttttgttctcaaagtttatgcaacacgcgaacctttttaaattgtatgtacatttccttgaattggctttttacactgttgtctaattgaattataatttatatatatatttttattttagtctagcctgtttttaaattgtaaacataccgaaaaataaactctaaaaagaaaataattcaaaaaacttattaccgacgattgaaagaatacaaaccagagagagaatgagagaactaactgtcttccactgttgctgcaatatactatttaatattgtttaccatttcggttcgattaaatttagttgtaaattaatgttttaagtatggactgcattttattcatatgcaaaattctgttcattgtgagttgtttattattaaatgttgtcgctgatttatgtgtttaaataattttagtttaagaactttgtcaaaactttcttccactattttcagtctcacttttttatgtgttttctcttccgaagaagcaacagttacaagaatttcgaaaaataaaaaataaatcatatacactcaaagtaaacaaaaataatctagaaacgcaaaaagttatagtataaataaacaccttatagttattacaatcatttaaaatatgcaataaataaaatcatcaaaaacaacacgtgaattaatatgaatgccgttcattaaagctggacgctgcaataaagaaaagaaattagccagaatgatacaaaatcaataagtttgtaaaatttaaaatcaactcacgtagtcgtttatatttttttagttacgtgtttaataataatttaattatagtttctttatggcgataatttttaaatacctattagttatgtgtattaattagtgaacaaacgaaattttatatgataaaaagcgaatggccgtaaactgtagcgtgttaatgttaaaaaatacaaataaaaacaaaaataaaaccaagtttataagcatatttgagccaacgtgtgaacttaattgtagtagagcacactgaagttttactttctttacttttcaccaactcctcctgaacttctcccctcagcaagcaaacttgtgccaatgacaaagctaaatactactacaatacttaaatattgaaccctccctcatgacgctaagtaaaaatgtttgtcaattaggtcaagttagagaaaaacacaagcttttcgacctatcaagttcgaaaacgtatgaaagatgtataactgatacaacaacgaacatttttggcaaccagcatttcggactaaggaaattaatgacaggaaatactgaaaaaccttttggcaattacaagaaagagaacaaaaatggaacaaactcagtcagcaaaataaaaaaaaaacaacaaaaaaggcgtttcggatacaaaattctaaaattcaggtattacaaagaaaacaaaaatacagatagtgttgtataatgttaaaaacaatttttgaacaaagtaaaaatgaaagatgaactatttagctatttatacaaacgaggcaagtgggtaaactttgcgagtacgtgtaaaatttataaggtgcttttataacaaaatatttggtagagaagcgaaggacctcctcccccacattaatatatataaatatacatctatttttctcgaagtgcaaccactgtattttaaaatgcttttaaacgatggtgatttagaaacaaagcccaaaaagggctgaaacacttgtaattcagttgtgagcgattcgcacattttgacgataatggagagtgtgttttttatagtttttaatcgaggagggcatttcaagccgtatctgtactctcctcaaaacatagagctcaatatatatctaaatacatcagattgatggcatcattagtggcaatcgagattacacactgttgtttgcggtttgtttagttaattgttaaaaggaaaacgtaaaccaatagatattcttaaaacgcgacttttgagttttgtagtgaatttaccgacttatcgtttgcaattgacttttgaaggctttgtaaaatataaaagaaaagaatgcatatatatatacatacaacttatttgtgaagttaactaataagccagttaatgtgaaacatattttgtaagccacgaataacttaagacaaattacgaatattaaaataacatacaagatacaaatacgaacataaacaggatagcttaaaaacaacaaatatttaagcactcaaccgtgcaaatctcatccgatcgttaagaacacgtctaagacagggctttcagaatcaagaatttaataagtaggatccatcttaggaggagggagtgcgatgccctgcacctcaaagacgaacggtcatcaccaacaatc

SEQ ID NO: 10490 - DNA, 6420 bp, DROSOPHILA
ctgtcaagagcacaaaaaataagtgaagagcaagaacggaaaaagcaaagcgatgcgaatgcagcggacaaagcgaatgtgacaactacaacacgacgacgaaggcagaaaagtgtattttaagcagcggttggccagccacagagattttcgtggaaatgcccaagagtagcgcaaggacgtcatgaatgcgttccaggactttgagctgggggccaaactatatctgcagtgcttattatcgctgagcagctcccgatctgccacgccatcctacacctcacctgttaaccacgctggagcttctcctctgaatgccattgcccattcgccggtgaatgtgtccgccactcataggcagaactttttcacacccattgccaaccagtcgcagcagcaacagcagcaacagcctgtggcggtaccgctcgactccaagtggaaaacaacacccagtccggtgctctacaatgccaacaacaacagcagcaataacaacaccagcagcagcaacaacaacaacaacagtaactgggaggtgggcagcaatagcaatactcatgttgcagctacggcagcagcaacatcaacagttggcgctcaaccactgccgccgcaaacgacacccgtttcgctggtgatgcacgccccaccgccgcagcagcaaccactgcagcagcagcaccaccatcaccaaccgcctccaccgccacctgctagtttgccagcgccatcggcaccacccaccagcggcagcagcagcagccacaacagcgtgggccatgccaccagcgttatacgcatttcgagcagccaacagcaacatcagcagcagcaacagcaccaacagcaggcacatccacatgtggtggtgagcggcggacagacttttcatcccgtaatcgtggacgctactcagctatcggtgccgctgccacccacaacggtttcatttcatcagcccaacacgcccacctcaacagcggcatcagtggcttcaatgagccaggacaagatgctggcaaaaaacggctacaatgcgccctggttcaagctgttgccgcatatgacgccaatgagcaaggcgtcgccagctccggtcactccgaccctaaccacatcggccagcagttacaacgtggtgatgatgcaacagcagcagcagcatcagcagcttcaacaacagcagcaactgcagcagcagcaacagtcgccaccccagatgccgctgaaccacaacaacaatcatctgattgtgtccgccccactaagctccccgggcaagccactcaactgctcaatgaacgatgccaaggtggcggcggcagcagcagcggccgcagttgccaaccagaggcaaaagcagcagcaggaggagccggacgatcagctggacgatgatgtgtttgagaccacaacgcccggtatcagcgccaacagcaaaaaacaaactgcggcaatgcggctgcccacccacaacagtaacatacgaaagctggaggaatgccatgatgatggagctgcaggtgcaccagccacttcggctgccaagcggaggagtcaatcgttgagcgccctgcagcaacagcagcagcagcaacagcaggccggtgcggcaggaacagcagctgggcagccggcgaacaagaaaatccgaagacccatgaacgcttttatgatcttctcaaagaaacatcggaaaatggtgcacaagaagcatccgaatcaggacaaccgtacggtcagcaagattctgggcgagtggtggtacgccctgaagccagagcaaaaggctcagtaccacgagctggccagctctgttaaggatgcacacttcaagctgcatccggagtggaagtggtgctccaaagatcgccgcaagtcatccacctcgacagcaacgcctggtggaaaggcgagcggagcggccggaacaggtgacgctaagcagcgcctggtatcggtggatggctccgattccttggagcacgatatgtgcccctcaacgccaggaggcagcggcagctgcggtggccagggcatatcatccgatttgcagggcgatattataccgctgacaattgacaactacaatagcacctgtgatgaggcgccaactacgatctcgatgaagggcaatggcaacggaaagctgatgaagaacgagctgccatcggacgaggacgaacagatgctggtagtggaggaggagcagcaacagcagaccgtaaagaagattgacctgcactgccgcgagcgggtgaatgactcggacatggacgacacaccctttgactaccgcaagcagcagccagaggcaaatcagcgttcggcagaggagcacagtacatccggtgcgaatggccaggccataaacgcaccgccgctcagcggaggagagcgcgagatcacactcaaaccgaaggctatcaaagcacatccggtgctggagagcaacatgctgccatatacccagatgtccatctacacgcagtacactagtcccaagaacccaatcggcggcgccttcaaatcgatgcccatcagccccaagggcagcggtggcaagccggaggacgctggctccctgcaggcacacatcaagcaggaggacatcaaacaggaaccgccatcgccatacaagctgaacaatggttcgggatccgcctccggagggggcgtggtcagtgctccgccgccgaatagtggtagcgttggtgccatattcaacttcaatgtgccaacggcgacggctttgagtcagaagcagtttcactacccgatgcatcatcctcatcgcagtcccacagatcttagagatgaagaagcggatagggaagagattacacagggcacgaagtcgggggagagtagcgaaaaggataagccggccttggatgatcaggagcgagatgaggtcgaggaggaggacgaagacgaggaggatgacgacgaagatgacgaagatgatgagcagttcatgcaggagctggccagtgtgaatgccagcgctggattcgacgaccttgttccatatgcaatgcctaaggtcgttataacgcccacccccacgccaccgcctgtggccaccatagtgacccccatcaagcgcaagcagttcaccatagtgcgatcgttgacgccgctgcagccttcgaattccccgcaccagcagttgaagcatctgcaccagcgtcgcggggaaactccgccgacggtcatcacccgcgtgcccacgcccaccatcaatcacttcaccatcatacgaacgcaacaacacccacatacccatccacacaacactccgccaccgttgtttttcaagcagaaggttcagggttcaccagtgattgccacggtcacaacatccacattatcatcatcatcatccaacccagccaataatgaagcccctaataaattttccaattttccaacacaacaccaaccaacaaccacaacaacaatatcatgcaatactaacaacaatgccacgccaatcatacgaaaattgttgacgctccaagaaggcgccgaactcggcggtagccataagggcacaggacgagcggcgatcctttacgacgctttggtgctagacacattgcacggtcaggatgaagaggaggaggaagatgagggcaacgcagaaaagcaggaaaatccaaaggtagcaggcaaggagcaggttaccacatcccaaccggcgaccatgctactaatcaccgatgtcaacgcgtacaatcagcagcatgttgctggcaacgcggcaacacccgtgtcgggagcagctacccttcgaccagtgtccttcatcagtattaatgcctgtaacaagatcacattgccagccaatgctcgtatcctaactgcggccacggcaacctccacggcagctggagcagcggttactagtcaggcaggagcaactcttaccgtgatgacaaaggcgtcggcggcaacaaatcatagtagtagtaatgccagcgatataaccatcacagcagcatcagctgctcctgtgcccaccagtggctccagtattgtcatgataaactcaaccacaaacccgtctacatcatcaaattctacatcttgttccgcagctgcccaccaggcgtgtgtgccatcgtcgccagcgggcatgggactggggcatgcggccaacattgccacgcctccagcatcggcgccggcccagatcatgggaggcggtccagccagtcagaagatgttcttcgccatgactcatccgtatacgttgctgcagcgctcccaccaaccgggcacccccagcctagagcacttgcagctggacgcttttgcgccaggaggttacaccttgaggaaccacaatggcctgtcttccctgccaccgcccgtgagtgcgcaacccacgatgctgctgcacggatacccgcccagccatggtgtcgaaccaccggctagatcgccatcgtacaaatcaatgccatctactccaaagtcggccacatatctcatgagtgcgccaccggagcgaggcatggatggaggaatgagtggatgtgcatcagcagcggcaagcggaggcgatgaaagcgacatagatgcggatggccagcagtttattttggcacccacgcctgcgcagttgggtcgagctccactgcagaggaggaagaatctatctcaaagcaagtcagagagcaatgtgtcctttggcgctaatctgggggccagcaatggacagcacattagtcgcaagctgcactcacccacaatgatggaatcctcatcgcccatcataggccacgtgaacagcagcaacctcagctcggccctgccaacgcccacgtcctcgacgacgacaccaaacagtgatgagcaactgccactgacgccgacaaccagcagcagcaacagtaacttaaatcagcagcagcccaagtcaccgatgaaaggtgctccaggatcaacggcagcggccctaaaaaagaagaacgatgagatgaataacagtgtgctcaagcaggtagatttcgaaaagaaatacaaggccctgccgcagttccagcctgaggattgccagtcgcccagtgccattgctgtgccctcatcgccacgcgtttacggcacgaattaccgcaagaagaacacggctccaccgccagttcagaagctaatgtgcgaggacgactccattgacgaaccagcatcggcaccgcctacgaccacacagcgattctttggtccggactttaacaatgagctaaaggaactggagagctctgaccaaacgggccgctcacccaggacgccaaagacaccgctacaaagcgctcggtccgatgccagtgagaaaggacaccgcaaggtcctggagacgcgtcgcagcctggtcttgcagttgtttgccgagcacggtaacttccccactgcccaggccactatggcctttcagtctaagcacagcgatgtctttccgcgcaagcaagatctgcagctgaagatacgagaggtgcgccagaagctgctgggccaagcatcttgcactccacactcggcgggccccaacacgccgtccgactccaactcgtcgtcgaccacattgagtgccagtagcaccagcttgaatatgcagaccaccagtgcggcagatgtttttcaatattactgaacaacaggtggccaccagcaacagcactctgagcagcagccccattccgccaccaaagccactgaatctgatgccaagtacaagtaatggggcgtggacaaggacgaggagttcggcggggacaggacaggacaatggattgtttgctgcaagtgacaaaattacttaaggatagtaaacgaatcgacaacaacaattgcagcaacgcagactcacaaaacgaaacggatgtgcaacaaagctcacacttagcaaacgctcatgcatcagatgcatggttaactagtttttattattaactgctaatagcgaggaagcaaaacatacagaaaatagagaaaattacaaatttttaattacaataggcatacgaaatatgtacaagcaacgtaatttgtgagtcgagtggagaaactgattacaaatgaatttattaagcagcttaataaatcgggagaagtagaaattttgatgaaaatttgaacttttgaagcacatatgaagtacatacatacataaatagaaaacatacataatcgaaacattgtataatccccgcgtaaaggcttaggttttaatttacaggcaaaactgcaaccaacaaattggaagagcaaagaaagaactacggaaatagaagttaagctttaacttaaattgcacattaattttgaagtgtatcaagcacaagcaaagaattgtataaatcaaacagtaagaaacttgaaataaacactgtagttgtattgttaaaaaaaaaa

SEQ ID NO: 10491 - protein, 1824 aa, DROSOPHILA
MNAFQDFELGAKLYLQCLLSLSSSRSATPSYTSPVNHAGASPLNAIAHSPVNVSATHRQNFFTPIANQSQQQQQQQPVAVPLDSKWKTTPSPVLYNANNNSSNNNTSSSNNNNNSNWEVGSNSNTHVAATAAATSTVGAQPLPPQTTPVSLVMHAPPPQQQPLQQQHHHHQPPPPPPASLPAPSAPPTSGSSSSHNSVGHATSVIRISSSQQQHQQQQQHQQQAHPHVVVSGGQTFHPVIVDATQLSVPLPPTTVSFHQPNTPTSTAASVASMSQDKMLAKNGYNAPWFKLLPHMTPMSKASPAPVTPTLTTSASSYNVVMMQQQQQHQQLQQQQQLQQQQQSPPQMPLNHNNNHLIVSAPLSSPGKPLNCSMNDAKVAAAAAAAAVANQRQKQQQEEPDDQLDDDVFETTTPGISANSKKQTAAMRLPTHNSNIRKLEECHDDGAAGAPATSAAKRRSQSLSALQQQQQQQQQAGAAGTAAGQPANKKIRRPMNAFMIFSKKHRKMVHKKHPNQDNRTVSKILGEWWYALKPEQKAQYHELASSVKDAHFKLHPEWKWCSKDRRKSSTSTATPGGKASGAAGTGDAKQRLVSVDGSDSLEHDMCPSTPGGSGSCGGQGISSDLQGDIIPLTIDNYNSTCDEAPTTISMKGNGNGKLMKNELPSDEDEQMLVVEEEQQQQTVKKIDLHCRERVNDSDMDDTPFDYRKQQPEANQRSAEEHSTSGANGQAINAPPLSGGEREITLKPKAIKAHPVLESNMLPYTQMSIYTQYTSPKNPIGGAFKSMPISPKGSGGKPEDAGSLQAHIKQEDIKQEPPSPYKLNNGSGSASGGGVVSAPPPNSGSVGAIFNFNVPTATALSQKQFHYPMHHPHRSPTDLRDEEADREEITQGTKSGESSEKDKPALDDQERDEVEEEDEDEEDDDEDDEDDEQFMQELASVNASAGFDDLVPYAMPKVVITPTPTPPPVATIVTPIKRKQFTIVRSLTPLQPSNSPHQQLKHLHQRRGETPPTVITRVPTPTINHFTIIRTQQHPHTHPHNTPPPLFFKQKVQGSPVIATVTTSTLSSSSSNPANNEAPNKFSNFPTQHQPTTTTTISCNTNNNATPIIRKLLTLQEGAELGGSHKGTGRAAILYDALVLDTLHGQDEEEEEDEGNAEKQENPKVAGKEQVTTSQPATMLLITDVNAYNQQHVAGNAATPVSGAATLRPVSFISINACNKITLPANARILTAATATSTAAGAAVTSQAGATLTVMTKASAATNHSSSNASDITITAASAAPVPTSGSSIVMINSTTNPSTSSNSTSCSAAAHQACVPSSPAGMGLGHAANIATPPASAPAQIMGGGPASQKMFFAMTHPYTLLQRSHQPGTPSLEHLQLDAFAPGGYTLRNHNGLSSLPPPVSAQPTMLLHGYPPSHGVEPPARSPSYKSMPSTPKSATYLMSAPPERGMDGGMSGCASAAASGGDESDIDADGQQFILAPTPAQLGRAPLQRRKNLSQSKSESNVSFGANLGASNGQHISRKLHSPTMMESSSPIIGHVNSSNLSSALPTPTSSTTTPNSDEQLPLTPTTSSSNSNLNQQQPKSPMKGAPGSTAAALKKKNDEMNNSVLKQVDFEKKYKALPQFQPEDCQSPSAIAVPSSPRVYGTNYRKKNTAPPPVQKLMCEDDSIDEPASAPPTTTQRFFGPDFNNELKELESSDQTGRSPRTPKTPLQSARSDASEKGHRKVLETRRSLVLQLFAEHGNFPTAQATMAFQSKHSDVFPRKQDLQLKIREVRQKLLGQASCTPHSAGPNTPSDSNSSSTTLSASSTSLNMQTTSAADVFQYY

SEQ ID NO: 10492 - DNA, 29376 bp, DROSOPHILA
ctttagatgtataactacacatataatacatacaagtatatagtctcgataacattaagttaaaacatttaaaaacgtttattaggttctcaattgaataatcctgcatcattatggctaaaatatgtatccatctaaacacatataaaacttattatcataggatgcttacatcaaggatagaatgaagctcaagtctttataggttttcgggagcaaatatacacatatcatatatacaatatacactcaggatatatgtgggattttagaaatttacacagttatgttgaccatttctattagccaacttattaacacggaatcaagctgggagttgagctaccttctcgcttggaatcacaaattactttttagtcaaatgcccgagatctcacttttgaagtggaactctgtccattcgatatatatgtagcacacgattgtcgattatcttaggtaataatctaggttaactcacgtcacagtgactagaatgaatttactgcttaagtctctacaaatctgtcaaatctccgtttaatattcctgtcattgagcttgcctaactatgcttaaattccagatcttagatgtatggagaaatgccatatatgggcaagtttttctgtcccaatttccccttgaaatttaagagctcctaaatctcaaaaaatatttccgatcctacagatctagaaacaatgttatacacaacattattgtaacacaaaattccaggctggtgtaacttaactaacatttcaccatttttgtaagtgtattgatatttagttgctaggcaagatatactcttactcgtatttatcttaagtcggaggtctataggctttgtacttccgctgacatatgttttcatgtattctgagtgggtatatctttgcttatgtggctacgaaaataaacaatcatctcgttataacagctgagccttataaaaataattcttaggcttgttaaatacttttggcttgtctgatatgctttacaatatgtgaaggtattctcgataattctacggggatacaaatgaacaaccaaactcgtgtgggtatcttaaagataataaatgtacaagcgtctttgtgtttcagtattaattaggacataaatcacgaaacggcggtttgcatgcgaatgactccttttggctgcttatttgctactcggatctcgcagggagcgagtggagggcagtccacgcagacccttctccaatttatcggcatcccccgccgagaagcggaaattcatagcctgtccttggccctgattctggcttacgcccagcaggatgggtcttgagttccgacgaggtcccaggagctcgacactttcctcctcatcgcccccgtagctcactcccgccacaggaagtggtgtcttggcaggtggtgagtactcagccgtggcttcggataatcttcgatactccccgctcctcgagtgttgcaacttccaggaggctcttctcgtggtcgccacactggccacactctggctactgttgctgcagtgcaccgaggcgttcgtagtggtcaggttgcccgtactctgcgacaccagacaactattagagctcgaactgctgcttgataggctggagttgctgccactcgtgctttttcgtaagcttcttttcgaggatctcacttcctggacagatggcgcaggagttgcatccactggaagtatcgaaatcggaggctgctcctctggactcagcagagcatcagtgctcttgcaacagctatgatgactggccgagtgcttcattgtccaccgaaaatcattggagttctcatcatccagaggcgggtaaatgcgaccaggtgtcgggactgccgatgatgtgattagtctctccttggaactggccaaattgtgatccgaaggcgaaacacactcatctatcgtatttaaaggtgatatctgcagggtttgcttttgctgcaggagatccatttcgtttttgatggcgggttcaatgcccagaagtcccaaaaccagacgaggattggccaaaacgaatcgctcaaaggtcggaaagtctatgcgatagaagtccgtttggctgctcctactggtcatcgtcttctttggctccacaggtgagggtgccttggaactggccgtattactggtgggcagttggacatccctgccccaaacctcgggaggatgtgatgaactacgttgcatggctgccaattcagcggctgccaaaactccgcccatcaagccgtgctcgactgcaactcctgatcttgtgcccgcaactccacttatgttgggtatagatcttgctggagggaacttgagagaactatgtgatgtcatggcattggaggtgaatgtcatttcctgcagggcgctgatggcattacgaacttccgcactcagttgggccacatcctggtgcaaagtggacacttgggagtccaagcgttccaaggagggccttttaccgcccgacgattgctcctcttccagtggttcgggctcctcaaaggaaccacgatccagactacaagctgcgtttagagttctatgcctcttgttcgtttcccttaaggtaatcagagatctaccccgctgatgcaacctttggtttctgggacttcccatgcccagtagtggagatcgtgttgcatgcagcggagaattgcttatgttgtgcagcggagaagcaccacttggtggtcctccaccgttttccttctcccccttgcccccttcctcggcctcctcgcgattttcatcatcctcactgatactgggcaggggaaatgagggtccaatatcggagtcctgattctcgtagccctcccttaaattgcatgtgagatcgtgctgaatatcgttggcaaactgctgctgatactccggatataagcgtagtacctccaccagaccacccatgtggatgcacttcagatcacagtaggttagcgcctggaaaatatggagtgaaaatacggaaaaacatgtaagttaaattaaaaaccatggcaagtgcttcaaaggtcgttttggcgttaaacgattatgcactttgggcggaggagaggcgtggcagctggtgtttgcgcccatgaacaacatgaaaaagctaaaacgccatgtaaacggtgtgtacggcgctgggtagccaagggttttatgaactattatatacgttaggatatatagttgacgtatccatctacctcacacccactataagaatgtcaaaaaattaaacccattcaagttataataatctaattggtagtaatatttgaaatgaatactttaaactttgcaaatttctttttatagggtactccatagtcgattttaagttctttaagaagcaacacttggcaatgttgacgccttggcgtcttctttacatactcgagtgcgccatcttggcgtttacacactgcctctcacggacgagggcaagcgcacacacaacgcacacactcgcaaaacacaaacacgtggagaggagtttgcgagtggtatcactcatacgacccgtgcgccgcgttgtttgccggagtggcgcgctacaaggaggaagacgcgtggcgtcagatgctcgcaatgtctgcactttattccgccaaggcagacatgcaaataaacacgagataaaagcaaaaggtaaacgcaaacacaaacacaaagccaaggaacaacgatggcgagagacaaaggagaaacaaatacagaaatttaccggtggggaaactatgcataaattaaacacattaagcaactaattaagcgacaataaaattgaaaattcctctcttaattatagccgcccaaaaagagcgcaaggggagtggccttcaattgccagacaagagtttatggcaattaattaggcgtgaagctcttgaaacctgaaccgccccgagattattgccataattagtaagagtaaacgagaaatccatgacgcggttagaaggatatccaaaccctcagactctcaagccccattgacttcggcaaagagaaaaacaaaaaaaatgaaaaacccggcggtatgccaggcgaagaaattcaaactgctgtgcactcatcttgaaacctcttggtccctgttaggattgagataaagtttaggacgaacagcctgaaattgcaactggcctaatccttaaagaactccagactatgataaaaaaaataattaaattctcggcaactaacggctcaagcggcaattaaactgttttattcggtcatttacccggcagctacaggtttttccaacattttagtttataatgtatgtaaaagcacttaacatattattttgtaacttttctccttaactacatttcaatgaagcataaagtcctgctgctcggaatcaattccgaactcccccagcacactatatcatatgaatgcattccattcacgttcgtccttgaattcccgtcctccagtggccggtgtaaaaataagttaaatttaattactgcacaacccagtccataaagctgccgatggatttcatagtgaggggggagctatggggccttaccttaatatcgctgctgctgcggacgacaacatcctggccagcactgttggtggtggcggtcatctggccattgctggtggccaccaggtgcacattgatgtcggagcccaccaggtcacccttacctgtttggggtgacgagaaaaggtcagcactatacagaatcaatgagcataaaaatagagcctggcatttgtctgggccaagtagtagaccaacttgatggccccgctcaagttgatgacactgcctgccatgaatgaataaacaaccagatgactgcctcactgtcttggccaaagtgcaaatggttttcaggcagcggaggagcttcgaagcgaatgaactggcgcgagttcaataaacgctactagtcgaaacataaacaaaatgaaaatttgacaatcgatacgtgaaaatcaacagcaatttaaacaaaattgaaggcagagaaaaaaattctgtagcaaattaaaatcaaattttggtaagtaaacagtaaaacatttatcataggagcggatactcaaatgccattaaataaaaatttaattcaaaacgagtgatgaaaaaaacaagagtaattttattagtgacaacatttaaagataataaatatacaaaaaaaaaagttctctatgcatatatcgcaaagatgcttgaatattaaattaaataaaaaataaaatctaagcattggaaacttatttcccaaagtgcagactcacccagaatagctaccaccatgtcgtccttgatcacctccatagatccgttgcacaaatagtagatatagttgagggcatcgcctttgtggatcagatactccccgggcgcgcagaagttcgtcttaatgtgcagggacaaaagtttcaggcagccctgcaatggaaattgtaacaaatcggtagttcaagtaaatgcgattctggtttggtcaggaattgttcgccacggtcagaggcatttagcatttggctcggtcgcgttttatttgcgcaatgaaacaaaacggcaacagctgtgtgtccttgccccggtatgtgtcctgcggtttagaaccgacccagcaacccattgccacacccttctcctttcacagaaatcaaccaagcaactacccacccaccaacgcatttggccacgaaaagtggcttaaagcgcgcttataactgttgagtggtttttgtttgcgttactttcgcctttctgaataagctttattaatgtttgcagtccgcctttgtcattcggcttcagttttttttttttttttctttttgtgagttttgtccggtcattcggtcgttcaattcgccccgttttgtttgctttcaaacttagcttgagttgcatttcattaggtggcacctcccttttatcctttcaacaagctgaaccacaatcgcattaccacgacctcttggtatcagacaaaatcggggtcatagagaacatatctttgagaaattatcagccaacacctttgcgatagactataaatttaatatgtatcaaaagacccttgctaacaagcattacatatttctttgttattttaataggaagctattagttatcctcttcctggtaacatgcaacaaagaaaaagcgaatccttcaatggcattaattatgtggaattcctttgttttccttaaaagatattcgctgtgttaatcagaacaatccgcttaacaggaaccatcattttccttttatgtattagaagagtattttatatgcattgtcaaaaatttgattgaaattcctggttccatttttagcacaaaataaagcagctgctatagaaaccgattggtatttggagctttgatcagcaaagcattcgctatgttgtttttttattaaaaatatttgtatctgctttttcaacatgttttttttttaacgtcgattttatttacgtatctgtgtgcatccatgttactctagcaactgcaatgggtcatagaactttcgatccatggagcagttgaaccgtagatgcgaaatcaattactgcacaatctctagcttaagccaggcggcttttaccaaaatgatttccatctgccaccctgctcctgcagcagtacagtgagcacccattaaggcttttggcggttgacaagggtattgacattggccatcgcaaactactcgaccgcacactaacacacttgcattcgagggaatttcggcatacaagtttactgttggccaaaaacctttttcatgcttcgcttcagtcaaacgaatgaaacttggcccgcagggcaaaaggaaggaggcacaaggatcagtgaggtggctcgtaaactttacctgtggccatgcgtaggcagggggattcataaaacttgtttttttttttagtaaaaaagcttgcatctttaataagcttcaaatgggaaatatataaaagtatattaaagtataagtaatttacaaatgaaatggctatgttttgcttatatgatgttagctgtatcataactgtttttgatatctgtcattaattaaagcaaatttatcaataactacttattcttaataagtttcttatattctataactctttcagcatatctgcaatattttatgcacctcctcaaaagtccttgcccacatccttgcctgagtgtggcactccaaaactttcatgtgtgcgcatttgcttatttgtatgcggttgtttgcgtgtgtttgagcttcagagcgacaaagaacgaaacgaacgaagcccaaaaaacgtttcagttaagcccgcagttaacttttggctgctcgcctggccttcgtcttctctttttacctgacccccacctgttggccccacattttgcaccacacaccctcccccccctttctcattgctgctgattattttgccatcgcagccatttcgttccatttgtctggagctgaatcgctttcaaagcgacacattcttcgacccctggaaaagagcaatcgcatgggtacacaggaaaaaactatcacgactttccgtaatcaattaggttctttatgctttcttaaactagtgtttgaggaaataaccccctcaagcttagttaaactactttattttgttaacccaaaataaaaattgaaattaataagaaaacctttttttttaatacaaaatttcgttcagtgtaggctgaaactcacctgggaggccgcctcgaatatcggcagctgtaatatttcacgatgtagatgcatggaaacgtcgccacggagctcttcgggaaattcgcgtagcgtctgcaagtcgaggaaaaaccgaaagaaaatgtgagtccgaagatgagtggaaaggcaaacataatcaccacccccaaacacacacgcacacgctcacatgtccaggagaaaaagaaaagtggaaaatacacgtgaaaattgaatcgcttgaaaattgtgagggaaatgcttggcattattttactctggcaccggggaaatgttcaagcttatctgcttttgcttgttgttcaaacggcaatatgtaatacaagatgaaaaaagtgttcgtagatgcgaaagaattgtgagatacccagtaactaatgagaatttaaggtttactgtttttaagataaatatctgaaaatatacaattattaagtaaatttgaaggaaaatcttttgctaattatgaaaggattactaattacgtagggccttaatttattatttccaagacaatttctaaccaaaaccaaaatccctcctgattattcacagtttcctgccagggtataattatattttcccttcttttttcttcttatttttttccattggttcgtttcgagcgtattggatgggaattgtcggtgtttcgggattaacatggaaattgaagggaatttgcatctttcttgtttacccaccacacccatctattgttcccactttcatcacactgtatttgtccatatgcatgtttctagggattccagtggctgattattgccaactggaccgcaaatgatatggccaaatctgtgggtttggccaattttctgcttactggcttcatattcagtgtaaatgcttatggtaaagtcaacttaattgtataaatagttgggcaaatgatgtgtttgtgtttgaacataataaaggctaaaagcaagtaaatcaatttcaggccggccagattgtaattaaaaattcacaacgaatgccaacgcaaagtgcaactatttctggccaaactagatgtcgtcctatttcgaatttcattttggttacgttctggttactgggaaaattacagttgtgttcaaaataatagaagcgcctctagattatataaaaatttcttaaataataacagacacataatttaataaaattgtatgtaaatttatataaagcaattggaactatttttttaagcgcagctgtttatatttatgataaagaaagggcttttgctaaacaagcacaactaaacatggaaatatgttgaaagtttttcccggatttgtttgagttttgctgcttttattatatgccttttttttcagggtcccgaaagggcaatttccaaagaattgttatttatggtacattccgtctctgttttcctttttgtattcactgaagtgtaaaatattttacattaattgcgcacatactggccaaaagtgggcggtcttccgttattttttgttttgtttttagcatgaacctgacttgaagttcacttagactgtagaggggggatccccacatttcgccagttaattttcatgcgcaataaattaacaatttaatttagtgccagcccgtcaactcccccctctgcccacaaattttcggttcttcaattcctgtggcttcgacaggtcgtgtgcgtgggtctgtctatatttcatgtttggtctgtaattaaattaaattccattaagggatgccaaaattcctgaatgcgcaaacttgaaggcaacacgaaaatcggtgtttaattgcagttaataggtacgacgagatccttacatcgcgtgaaacaaactgacagtttgatttatgcagcaaaattacgtgcatgaaggttaaactacatagacagtgaatgcaataatttatttgcaagcttaagccataaaattatattttatttacatacttaaatgtatctttcttactatcgactatgtcttttataattttaaggggcttaatcaaaagtccatttaataaaagctcacaaagccaatgccactcgcaaagtaaactagatcgtgagataaaagttggttttatttgaagaggttttttaattaacactattaaagttggcacggggaggagttgtttggcatggctttctgctaatagcaattacgagcggaatcgctgctctttcgactgcgctgagcactttttttttagttttattgtgcggcaagtttggagaaaaaaaatagttttcatcgcccacctgactgccagagaaaagtttaaacaagttaaagttgcaaagtgcaaagcagacccaaagattgatttccgtcgaccaacaataagctatttccatgcagctgcagaaaagtttcccactaaagttcgaaattatagtgccacactttcaaagccgataaaaataaacatgaaacaaaagcaacacaacaccacatggataccattagactcggaactaaattaggaggaagggtagacaaactgggaacttaatgcactgtacagcttccacccggaagataaggtacacaaatggcatgccgtcttccattctgctcgagttaatgtaattgtaaaaatttttaattaaaatgcagattccgaccgatggccacacacacacacacacacggataaaacaatgaaaggccacaggaaaatccgggcaagccaccacccagcatccccttcacacgtatgatttcgatatttaattttaacttttctacaggtgctagcaatgtcagtgcggttgaaatgccagaacacggttgaccaatcaaaggtatgccacacatttggcatttgacccgcagccaatcaataagtcacatgtcgaactaaagtactgtatatatattaaccccacggacatttgcttaattaagggctcagacgtttatcggagaggaaaggccgctggcactaacgattcagtgccatgattctgattctggatctggatctgaagtttgagtgaagtcagtcaagtcgaatccactgatagactgctgcgtcgacaactttgccaatcatatttttgggggatgtactacagagaaacaaaaatagtttcataagaaaaagtatcatggaaactaaaagaaatgggatataagaaatgaaaaagaactctgtaaaataagtttcatttcaggccggagaacctttccatctcgtatatatcttattgaatatttattgaatgtattccccagtgtactgtcttcaacatttatgacacacactcaaacgaatggagacggatatgcctttgggcaatcggactctcgatgctcacctcgtatatatcgatgccatggctgagtgaccagctggtctgaaagtagtcctcgatgcgctgctttagctctttgggcatctgtaatgaagagatcataaattataattgcattcgcattgcaacggtttgtcccctttttgccatcttggcgttaaatgagctgcgaggagcgctactttcacttcatttgcatgcatttcgcggttgagagccgcacaaatgcgcttaattgtgcagcgcattgcgtatgcggcgtgggtgcagctcgttgcgtatacgccgcgtgtgctgcctaatggagcgacgctcaagtttgcaccatcaacaggttgtaggccacgcaaacacgatgcccaggaaggaatatgctggaatcagcaattcatggccttgtgcgcccgtttccgttccattttccatttcctgcgcagcgttgcgtggcatatggaaaatgagtgctgcattctaataaaatccatcgagtgccacttctctggggtcctttcctgaggggttcatcatcatcacacgaacccctgcggccgctgcaaatctcaatcccagcactcatcgaaatcatactcacattgtgcagggccacaaagtcctttaggtcgcgccatttgctctcatatagcgagcgacgcgaatacatcctttggatgatggcagtcacgttaccgaagaccacggcatgcatcagagctgggtaatgaaatggatgcgatatatcattaaatctcgggttggccgaccaaaaaacgtaataacagctatgagcgcagctcgtgaagttacatttgggtagcaatttttgccattgataaagtagcctcattacttacgtcctagttccggtttatggtttggaatttcggcgcaattactcaaaatttagagcaattttaatgcttaaatgtgacaacataataatgttgagatattacttgctattgagttttacacacttttaaatagttgtaggtaataatggataagtatttgaaggagaatacttacaatccataaagttaaatgacaactactttttttttctataacttaaagcaacaaaccccgtcacaccgccattatccttactttagggaatgccatctctaaatactttacagttttgggactcaaataacttgagtgtagtttcccttctctgtagcaatattttgaaattcaaacattatggtacccaccgccaatgagcatcatgatgatggtgaagaccttttcggccgtcgtgttcgccgaaacgttgccaaatcccacggaagtgagacttgtgaaggtgaagtacaaggccgtggaatacgtttccgccgtggtcaaaatggcgacggaagcgtttttcctttccgccaaaagctgcagccaacctgtgaagaatacttgaggcatttaatacgacgggaagacagagagaggaaacagagaagaaaactggtttagttgggcgtttaattacaatttgcaggccaaacaaattgagcttatcaaattgacaatgactggctgggcctaactttccgacattcagtttgtcagtctgtcagttcgtcttagctctgaattctgagatcgtgtcaaaatccggcaaaactgtttagcaaggaccggaagcatcgggccaaacttttcgtgttggtcaggtctgaacgctttttccacccactgattaagtgccagaaaatatcatgactagaacttttccccatggcaatatgtgtatacaccactgatgagttgatttgattcgatttaatgcactgtgcgctaatccgtataaaaactttaaacctcggctaacacaatattcattaaccacacgtgtagtgtgtgtttgaggtggtctgggtggcctcggtggtttgtatgttctgggtggttggttcgtttggttttcggtggaccaggcagtgtgccttggcagactgcggcccaagggagccggaaaattcagttggcgttcaacgacgacccgctctttactgttgactaaccaactaacgaaattacctttggtacacactcccaaaactcaacccaatccatacagttgtggtcgaaataatagcagtgaaaatacaaaaattacaggtgactacgcctagtggttaactcaaaaaatataatagaaagtgctagatttgaactaattgaaatttgtgaatccagactttttatgaatgagttcgaaattaactactttaactacttaactaactttacagttttaataatctaaggttatttgttattaagccgtatgtgttttagtgcaacaaacaaattttctaaataagtgctcatattattttttaataacataatcgtaaacatagccataaacatatgatttcgaaaaatgggttgttaacgtttttagaggccacaccttgccgctaaagagttgtgtactaacttttaatttaatactattggagcatgtactgtttacacatgaacgaaggagtgcttgaaatgtttccagatgtgtgtatgaaatatattcgttagacaaattggtctatcacttcgaccccacctgtgccagcgtgtgtaacgtggcaggaccttcagcagaggaacaaactcaccgatgttgctctcggggaaccattcgtactccttgaccgctatcacataccagatgcaggccagccagtgggcggccagcgtgaaggagaacatcagcaatgtcagtatcatggccgtatgctgcgagtatcgatcaattttttgcaacagacgagcgagccgcaggagacgcgtcaatttcacaagatggatgtgcgaatcctgcgtggaacacaaaaaaaaaaagtgcataaaaaaggtacatatagtcaaatgacgcacttcaaggttgttaaaatgtaggcgtacagtgacgaagtgccacgcctctttcgcgttacgaactgtccattagtttggttcgttttttgcagccgcattttcccgccagctcatcttcatgtttcatttttttttttttttgttttgcccaccccttgttgcctacttttcagggcatttaaatgtacgcatttggcagccagccgcctacttttccggccatctcaatttttgttatattcatttgacctgccaagggtccgcactaaaaaatcacagaaaattgtcaacttcccagagcccgcatggttgcgctgaaaaaaaggacgagctccgaagaaaggatgtcatcaaaaaatgaaaagatgaagtggctgataaatggaaggtggtttataagtctaatgcaaacataaacaagcttatcgaagggcctgacccgagcgtaaaacttcagtaaattgaaggctaatgccgtcgtttaaccttagatgaaaatttttatttctcgttcgtgattgccgctgacgaagccccatctcaagggctgctcaacgagtacacgggaaaaattggaaaaagcggaaatcataattcatggaactgtattttagagttaataatctttgaacagactttaacgaaaccaaacattatttttttttattttttcactttcttgggagagctgaaaatgctatatgcgatagaagaaaaaaggtaatataaacgcaacaaagtgttggcaggagatgggctaagacttgcaaacagttgagctcgggcatttaggtagagtgtcaatagacgaacagctacaccttccttcatctctccttcattttcagtctacacgcactagtgcacagacagcgcgtttcggaaatataagactgtcaactaaagtctcttaattttctgttcttattatcaaagtcccatcctgttttttttttcttaaatgtatttttacctttaacatttttgttaaatttataatcccgaaagttctttaataatgttcatgtttatgtctactaaagtttaaattttattttactactaatataaaatttaaatatatattttttttggcatttataacacttttagttgacactgtaaaagtgcgtaggtttgctgcctgcgtgaaggacaaagggaaaaaacgacatctgggcgaattgtaattcacgttgcaatttgtgctgcgctttcactttcattctaagctttccactcccctgattttccacccacttcacccgattcccgcccccaagtactgtctctctctctctttgctaaagtttccgcctactcacgctccccattgtttacttttcactttgtgtgagcagcaaaggcgacaacatctgcacaacagcaacatcttggcgccaaagagaaaacttcatcattcaactgactcgaatttttcccagtgagtgactgccttttttggggtcccgcagataattaaaactttggcataaactaaatatggaaaagtttcaagtgcattagctcaaattgtatgcaaagcgagcaagtataaaataaataccaaagtgtataaaaatgtaaaagtttaagcccccaaatacattcataaatgacttctgaccaacttttgctttcgcagcagagagtgtcacaaatttttacaattagagaacattaaagttttatcgaaactttttgtgtcagccgcttagcacacgccactgtttttccaaaaaaaacaaaaaaaaaaaaccaaaagaaaacttttccagtccgcctccaaaacgtggctaaatttccggaagcggaagtcgcagtgagtagaggggggggggggggggaagcggggaccaaagccgcttgtatttgatcagtgtatccaacggaagttggcaaagaaaaagctaagaaaaccgcaacatgatgacggagcggcaaaagaaaatcaatgaacatgagttcgaacgaaattaagctcaaatgataattcaacaggaaaagtaagtacagtaaatcaaaagcgtgtatttaagtttatttaggtttaatttaaatgctatttcaagtgcttaacgttgctggctctttttcaaatgggtagaaactaaaattaagtgagatagtttaaagattggaaaactaagatgcattaaataagttttggaatattttcaaagatgtgtactcttcatattttattcacagattgtcaacttccttaaatcccagcgcaatctttgtgaagggctactgtaatggcatttgttgggtcgaccaggatatccttggactgtcaataaaagcaacgacagcgttctccacttggagcaatcagtgcgctgaccacttcacaggaggaggtggctagaagaagagtccaacgagccaagtgagagctgaataacataagcccgctggaggactgctccattgtccttcgatgaccgctcgagggttttttctcctcggaagcaccgaacggtggccaatgtcatcataactgcacctaaggctttaagctgctttctgcggaaactgcagagccaaaccgacacatttttttttctggtatttaaaagtactagcgtctatttttgctgcacatttgggtcacggctctgtcgttggccgtctacttagctagtaattaaaacgcggaccagccaaaacagtcagccgtggatgctttggccaatgtaatcggcttaatgagcgtcaactgctctccaaaagggtcaagtgctgagacggccttctatcccaaaaagttgtctgaatgcatttgacattttgtatgtttggttggtaatacgaaatagaggtttaaactataatttatgaaatgtgttgtacaactttctgttgtatgcatttgattatggacgaattgttttaattgagttatcaactctctttatctttattttgttcatgcttaatgcttaaatgttcgactgcacacattgcagaccctaatcgttgaacaaagctaacttaatttaacattttccaacccaactgcactttctgtataatccgattaggtggcccagtgcaaaactgtgagttttgtatatgcataatgcatgtgggcaaaatagttttatgcaaatctcttaaggccatttaccacttgaaatttgggccataaattattaatgccaacccttggggcaaagccgtcggggggatttaccaaattggcccaacaatttgtttgccaacttcaaccaaaatagtgtggctttggaactatgtaagcaccaacacacacacttctgcgatgccgaaatgcaaatctgggcttaaaaattcatggcttgtaggcaaaaatttatgcaatcatctgctgtgaatggcgattactcacctcgccgtcgtacaaatcggacgcgtacaggtgatcaaagggcagcgcggccagaaggtccagggcgaaccatcctcgcaggtaattgatggcaatctgcttcgaattggagacaacctcgcccttgcgcgacacgaaggtggtgcggaagtttagcagaatatctgcaataaaacggcaataaagatgagagcgttgaaacaatgtttacaattcccgcaacgagacaaattcaattcccaacacccatcatcatcccgtccagacgatgaggatgcggactatggtgattgcggcactggtcgccacaggtggcccataaagaggacaccaattgatgtccgtttcgtgcgggggggggttaatgggttagttgctggtgcggtaatgatggttggccactagggtacctcaataacttcaattactgatttgcttcatttattgctcagaactttaatagtcataaatacgttatgacaaaaatcgaacaatgcacactttagaaactaaatatttcacaaattactttgttacacacggcaattgctcctttattaagtgagtaatataacgtgtacttttattcgagcatgaaataaatacttttctatgccttccatccagtccatacaatcaatccacttacctacaatgaagagcgcctccacaatcacatccgatacctttgtctgccgatccgctttggcaaacgcggcattgtagggcaccatgagggcaacgtagaaggtggccaccagaatcacccaatcccagatgcccttgaacaccccgtaatggggcagaatcaagcgtgacttttttatcgactgggttttgtactccggaaacggcgcctccgttgaatgcataaaattctgcaaaatagattgtggcaaatggcattaaataaaatcaggcgaaaaacacggaaaatgaattaaattaattgagttcttaaaacgattagttgctaaccgttttttaatcacatcaaggggttatcctatcaaactaaatgttgttgcctacaaaaaaatgattctaccgagtctggtttttcatcgaaagccaaaaacattgttgtttaaatttcattaaattcttcagatattcaaaataatttttaatattttaactatagctattttacatatcaaaggctcaacattttaagcttatatcaaagcggaccacactcaaaatcacgaggtagaaattaaattgagtttgacgtgggacattgatgttaactatgtagttgctgatggtcggtcggtttttctgtgtgggtgacccaactcaactggcgtttattcctttagggttatactcacattgcccagtttcaacttggtcttcacgccacccttttccggcttgtagtgcccggatagctggtagagaaccgctcgactgcgccgtcgacccatgttgcagccggcgggaacgtccagattgttgccctcacccgcctccgtatccccgtcactggcagccggtccgcccagaccgggcagtccgcccaggccgagcattccggcattggagccggcccggaaccgggcgcccaaaagggcagctgtaagggcaaaaacttacagagtcgcaacaaaacaagcaacgcaaacaaaaccaggcagtggcaaaggataattaaggatgggcgggcaggtttggcggttcgtaattacagtgatttaccggatcgatttgtgtgtgtttgttataatagaaagagcacaaagagaaagaacacagaatttgacacataagacgttatgaattaattggcatggttaatttaaattgttgttttttttttttgaattctccttagttaaagcgcattgcgtttgatttaaaacacgcgtttttaaagcgtcacaaaattgcaggtgtatgtggtgtatgcactccctcagaatttaccttgtctcgcaaaagattttcatgaattttgtcgactttccgacaagttaaatacagcttttccaccgactccatttattatttttgctgactttcatttgagcagcttagtggagggaaagatgaaaactcaacttttacagatggttttagccttttgtgcattagcacaagaaagtttgctcactaaacgcaggctttgctttattgtttttgctcagttttatttgaaaaacttttaaattgcaaaaacacagtttaattgaccaaaagtattgccttcgttgcatgtgcttaaatctttttcgtaagaatactcgtattacattattttactgtcacctttgcgatactgaagcatcgcagcattgacaaacaattaataatcgccctcagcggccgacaaatattggctaagtcctgaccaggccaacaaatcaggcgaataaacatcatatttcacagccgaacaaacaaagctcgaacaaaataagctcaaagtagcgcatatttggcaccgcaaagtgcccattaaattgaacttaattctatttgagtgtggtgtctaaaaaggacatgctataaataacaattagctggatggtgaaaaatggacccaaaaatgaatttgatacgtttcgcaacccaaacgtgtactaattatacacaaaaacagcaaagaaaattatgcaaatagccgccaagaatgttgccattttttccacaccaatttcgctccgtttttcctgttttcatttcgttcattttcccttctatatatatgtatgtagctaacatgaacaatttttgaccaaaatatgattccaatgttatgtcccgccacccacataaaatccagtttcactcccttgctgtcatatcaaaatgccaattaagtcgggacggtcacctcaccgatacatatacttttcatccgtaaccgagcaacagccgttgaataaaaaaaaaagaaattatacaaaaaaaggtcagggaaaaaattaaagatacaaaaaagacctcatgcatacacaaatgttttttatcgctgttggcacagtgccattgaaaaatgtgaattgctttaacgaaatatgcacaactcattggcaaccgaaggggaaaattcactgacaggcctaatgacgtgtgaaacgatggtcatcatcgcataactgtcgtcacaatgcgataacgattatgatctgatgataattccatttcaaattcgggttcatcaaaatgtgctttatcacaaattttggaaaattgctcgcctaattagctgtcttcacagttctcaatggctaaacccaaattttgcctttgtcacggcattaatttcccattgacagagatcggcattcaagttttccagccagcttgattccagctggaaattggttttgccaaggttggttggctcggacctaatttcatttacataaattaacaaaaattgaatcaggctcggccgctgctttggtttgagtgtagattaattcgatataaactgcattacatttaactggtttctggccatatttgcttggctgccactcaatgagcaagttaatgaaattcattaccaaatgttgcccgtcatgtaaatctctgtctatttaacacaattacgtgtggcaagtcctcgacgacaggtaacaggggggcgataagtgcgtgttgcaagtgcaataggtgtttgtggcacttgcaatccaagtgcgaaacatgcaacatctgccaagcatttggtgtgaattgcaataccccgttagcggaatgcatgtggggtatatagaacgaaagcagcagtagatgaattataactaactaaaattataccaattaaaataattagaaagaaaaaatgtttaagtatccttattatgctataaaatagactataaatagactactaaatttgcatctgccaatacaaactcatcccaattcactccccatttaaagtcccatccatatcaatactctgagcactaaattatttaaagcttcaatgccaggttgtccatggaacagaaggtcctgccggcctgacactcgagtatgcagtgcagcaaatcctcttaggattctcctggtcgaacttcaagtggcttctgctcggtttgcatgacccgtaaatctgcaggccagaagacaggcaaacagacggcaacaacagatgaataacgatggtaataaagctgcaggccagaaggtcagtgggcatggttggggcatagtgggattgagggttgagggcggtagctgttttttatccctgcattagcagaatttcacggcgacacatgcgattccgagtaccgaatggccaaagtgcccggaataagttgtgatgctgtcagaactgttcgagtggtgcatcaatattttagcatttggatcctttggggatccagccagcacacgtgtgccgccggtgtgtccaacttttttgtctgattaatccactaaattagacagagggcaaatttgatgtggctcagcgagagaagcaaaaggactcgtagcaacaaaagaaaataaggacatttggtgcgagttaattaaggtaaatgcgttagtagaacttcgccggaagccactatcgatgtaaaagattagtttctctctactggttcttagccaaagtgcgaatatgaaatgcgactgattgcaaatgttatcataacgtattcatgaagtttttagccgcttatcgaccagattatagccacaaatcagtgccgacacgacgaaaactgcgcatgaaagacgagatttaaattaacgttgaaatatggtaagcatacatccagttgtcagggacacgcgctggtgaaatgaaagggggaaacggatgaaaagtcggcaaaggactcaaaaggagcgaccacagccagtcggagtgccttcttccttccttccttcctgcccgccatctcggccagaaagctaaccaaaaactctctctgccatgagcaagcgaaaccaaaagttccgcaaaactttataggaatatttctggccgagagttgaggtgacatgctgacatagctcgaatgaaggtagcattcacacaatttttatggctcttgactgtggaatactctgcacgcagatttattgtcacagcttaagaccacattctcttatttgctgaacagcaaaattttatgtttttaagctatttttttgcatttacttggctaaaagtctgggagtaaagtttataaatatgttgatttcatttttgaagttaagttaatataacatataacaactggaattgtgttatatttttaaatatacttggatctcacagagtgtatcctctgatatttattcgcaaatttgccgcagtcatgtcacaatatttcagccaacttctgtagctgagaggctaaccggttcatgatatttggccatatcttcctatatctgagggaatgcatcagtgtcagtgtgttttggcttatgagtcggtgcttattaatttattatatgggaattgagtgtctgcgtgtgtgtctgtgttagtgggtgtttctgtggcttttgtgcacgcttggattttcgacagttggtgtttagctagtgcattattcataccagttgcttatacttaccgctatcacattcctcgttcacattcatctccagcatcttggtgtgcgtgatgtccttgtgggatgccaaaaagagcaccacatcgcgcttctcattcttgatgggcacaatgtcgaacaaacaccagaagggggcacctgcaatgtgtttttgctttaatcagcggcacagaaagtgattttccatcgaatcgcgtatacgccacgtggcctgcggtcgcttagagcaacatttggccttgcagtgttcaccacggcagtgaatttcatttgcggctgcataattgaaaccttagcaatgaaaaccaaatgtcgatgatggcacaacatccgcaaataaaaacggataagtccaattgagctttggcccaatttttaattagctgttaaacgctttaaaaacgccagccaatttatgtggcttgaaattgataaataaattgcatggcaattcaattagaccgcaattattgtcctagcctgcattttaattatctgcctgtaattaagcagtcagcccgaggtcaactagatccagttcgcccttagtccgtcgcagccaatgcataattaataaaacatagccccggcacacacgagtaaagaatgccgaggggtaggaaaagggtgccgtacactggcagaaaataataagctctagtaattaatgaaaaattcctgaatgaagttaggactatggcttgcctaagcatgcatcaataaaatttaaaatatttttgaatctgaatctatgtacagaattccctttagtgtaggcaccgttgtttaaaagttttaaacgcttcgctaattagaaaacttacacgcaaagttgatggatctatccatcttgggcttatctctgcgtcggcttggtcttgattaatcgtgacctcattaggactacaaaataccgcggcacggacgtgcgaaaatgttaagagcacaatttattgtatgcccagctagtcgacgaaccgtggctggcagcaaggatatggatcggtgtcctttgggacttgaacatgaacgcgaagcccccggagaaccgcaggaaactagttcaagtctgtcgcgcttaactcaatcaaaaacagttttccatcgccacaaaaataagatgggcacgccacagacttacttcacttaaatgacaagagggttggcttttctcggaaaactctgcaggtgagaccacaattgattggcaacttttcactcgtgtactgataacttgtacgacttttgtcattcgtggaaaaccaataagtcacgctatatgtagacaagaaaaagtttttcaaggaaaagtgggacaatgaaaagatagcgagtagtaattttcattctctacaatagaagtagtggcacatgtttctatttttttagaatcaagatttagatttttaatgatgtctcgtccctttttaggctggcaaaacttaacaagttttttttgtgagaccacaaacaccgaaataatttccttatctggcactttgcgcgcctattttcatgaaaatttttaattaaaaacgaggcagatagaaaacaattctcacagcattcccgcacaacggcaatttggcggagggcttaccttccttcttgtagaaaataacctccagcttcagttccatcttattggagagacttttctcgatttgctgcttgtgctcctccttcgtatccggtccgtaaaggaaatgacatgagcagcctgtttcgtgtacggcggaatttggtgccggagtttgggatatttgtgttttgttggcaattgaataaaaatgggcacaatacatacaaatgagtattcaagtgttaaataagttgagtctgtccgatggttcgtccttacccttttgcataatttgcgcgcgtgaatatcctgtcaaatccacgaacccatccgagcaataaacaattggattgccatttgcctgcgcattgccgagcacaaagttcgagtctgaaagtggaggagaaaagttggatgaactggggaaaactggaacgacagcgggaagatgttgttctggcgggtgggggcatagcagttgggcgatggtgaaggatgatattcagctgcttttcatttggcatgaaatattgtcccgacaaacaacggtaataagacaagtcctgctgcgtgtccttttcatggaaaaataagactgacgaactcaagctgaatttcgccttgaatttccatattgccagaaaaaagggtatatatattatcataaaaacttattgtcattgaacaagtaaatatttaatatattatttattaaactacacttcccattaaatcaatccatcaaagcaaatacatatatgcaatcagaagtccttgcagaaatcactttcataaataaaatacccgtttttctagcatatttcattttcttttcgaacaaaacaccatattgttatgagcttaacctttccctttttatggctttgccatttgcacttgaccttcatgtctgggattttctggcatttattttattttttgtgcaagcgctgaaataaactcaaaatctcaacagcatttaattaaattttccttcgagttcctgcgagtgcaggaaatgaaattcttatgtgccatttggtcaatcccaaaaacaggattctggcttggctcctgcgacgatcccgaaaagggaaatccagcaaaaggatttgcgctgtgtgattttatttataacatatccaggaaacacaattcagtgcgaaccagcttttcctgccttcgttctttcctctttatttaccttttgaatgcaatttcataaatagaatcgctccccgcccaaccaactcactcacatccttgcaaacctatgcgaccatcctgttgtaactgaggtcctgtgaatagaacgagtgcgatcgtaattgccgacacaatggacagattacatggaaagttatatatggatagtcggactgtggacgtaacaaattgaattgaaagacaagccggctgaatggcagctcaaaatgaaaactcataaggcacaacacacaatacagctaatctgcatgtgtgtgcgtgtgtgtgctcgacaacaatatcaaccagtcttagatatgttctacaaatggaaagtaattgcaataatcgcatttgttagcaatcaaggtcgtgttgtcgccgtcgcaactctggaaagatgccagtaaattgtttacattcaatatccattactcaagagagttggcctcttgccggaaaaactgttataaacggattattaaatactttatgctgctgccgcgcagcaataactaacaaattaaaagcaaatttacttaatgtgttgcatcaataaaaagttcgggcaaagtgctgtggtcgcattaagaatgaatgtgcatgtgggaaaaatcgaatttaattgtttgcactccaattagtgactgtaataactgcgctaagtggaagtttatgtaacaagtgtcaatatttaaagtgctaaatttgttcattgccttttgaattggactcttcgaggtgtacagtaataattaaaacagcctgcattcactattcactatttaaagctttatttacgactgcagtggagaatttaattatatttacgtatttacgagaaaatgcatcataatattttcaggtgaatataaatccgatttaaatatcccacgccattcaaatttcactattaattgcttaaacgtatttatttcatatacaatatatatgtaatgatagttggtgaaactttcctgtaacaaatatggaacacacatgtctaggaaacaatctgtggaaaaccggaagtgaaatctttttgtttgagttatttaacagctgccggcaacagagacatcgaaaaacatccacacactcaactcactgaatgcggctcatttgatatgcttattttattatttatggctcgtaaaacctttttaatccccctgccggctgagcatttcatttcagagtttcgtgttcgcagtttgtgacaactcgcaaagacaattatcgcttccctatgccagcttgtgtgcgaatgaaacaattaatttatatgatgggggactgacatgttttctcgaggcaccagcccagcaatgtcagcacgtgtgtgtcctgtcaacgaatgccattggcgaaaggaaggaagaatgctgaaagttgagcaggacttggctatctggatacacagattatggcccaaatcaatcgatcgatcgggtaagtgcaaacaaaagatgagcctctgcaaagataacaaaaaatatggtttccactctactgactctaaagttgctcgcccattaaagcatacgtttcattttcagtttaaatatgaaaggttcctaactatttacaatgtcggcatataaagggaataagtaatttaaatgaaatgttgttgctttcctcttccagatcattacatttgattgcgcggcaagagcatggaaaaatgtttcggcaaccaaacgaggcgcagtttaatttactgtaaaacatttttcctctcaaaggaattcattttgttgaggcttccaccaagcttttctgtattgtatttcgcgaaaaaaggcagcctctgcgcccatagttttaatttctccgcacacgggggggcattttgcatgctccatgggcagattttcaataaggataaggtccttcttggcgcacccacatacaccacgcacacgcatacatacatatagcacaacaattcgtgactggtcgtcggtggtcccttcgcaccaacacttaactgacatctcccccaagtcactggtgccccaaggatcggatatacacacggcaaaaatatatatataaaagcaaattttagtcaaacaaaaaatacttacaagagttaaaccattaaccattgaaaaccatattataaactcaatcttagaaacagtctttacctaacatttaaaataatgtagtgaaaactatataaaataaaattataaataaaaaataataataaaaacgttttctcagtgcaaaaaaagaaacaaatatgcttatgcaaaatccccttttaactcaaattctttcagtgcaagcgaaggaaaaccggatgattatgcccggaaatctcttatgcgcacttttttacgagttggccaaaacgatatgggtcttggcttatgcagacttcagtccgctcaataaaaaagtgtcataaatattacattacgaaaatcatataaaactcagacttgaattccgtgccggaatcgcttagcatttgcattggcatgggcatttcacttacgggtgccatcgaaccgggtggcgatggtgtccaggaatgtgttctggggcgctagcagccccttgcgggctggcatgggaatggtggggccggtgcgccgcttaaagcgcggcttgggtcgtggcaaagctgcaagtagaaagcgggggcaggacattaattttgttgactattttgtatgatttaaatttcagcaataaattcctgaaatggtttacataatgatcaagagcataacgggtttatattcgattaaataaaatatacacttgaattccaacagaattactaaatagcttaaatgaaaagttcacacatgtcattgaaagttttttttttttacagtcaacgctcgacatagcaaattaattagcatatttttaatattacaagcaatattcccattttgtgatttaaaagaacgccctacactacataatttgctattacacggggtttttcatatatgtatattagcttcgtttaaatgaaaacaaagcagttttgttgtacccactcaatatttttgattaacactgaacatttgaccctggggagctttcactgaatttattttaattggtttttttttggacatatacccatggcattgtttgctcttcgacgggcttccatttgtttttattttttcagccaggagcgcattgatatgaaaatatttgtccgtcaacactttttcattcagctattcgaacaatgggaaaacagaacttaaatgggaaaacattgcgaatccatttaacacagacgctgcgcacacccaacaacagcggtgtgtttaggtgtgcacaccaaaatcgactgttctctaccattgatatgcgtaatttccttttgcccgcaggtgctgctcgcaataattttcaccagcaattcgagcggtcaaatggcagtaacaaataaccgcaaccgcaatagtgacagctgttaaggcttcgggtggcaaaaaatgggaaaaagttaaatactgataagaaaacaacgtcactgtcgttgagttgatttagggagtgacgaaagcgaatgctgcctttccgggagatattcaccagccatcgaaatcctcagaaacataaaactttcgaaagaataaactttgatttattaactactcaaatcttgaaatagatatggac

SEQ ID NO: 10493 - DNA, 4112 bp, DROSOPHILA
atgtcctgcccccgctttctacttgcagctttgccacgacccaagccgcgctttaagcggcgcaccggccccaccattcccatgccagcccgcaaggggctgctagcgccccagaacacattcctggacaccatcgccacccggttcgatggcacccactcgaactttgtgctcggcaatgcgcaggcaaatggcaatccaattgtttattgctcggatgggttcgtggatttgacaggatattcacgcgcgcaaattatgcaaaagggctgctcatgtcatttcctttacggaccggatacgaaggaggagcacaagcagcaaatcgagaaaagtctctccaataagatggaactgaagctggaggttattttctacaagaaggaaggtgcccccttctggtgtttgttcgacattgtgcccatcaagaatgagaagcgcgatgtggtgctctttttggcatcccacaaggacatcacgcacaccaagatgctggagatgaatgtgaacgaggaatgtgatagcgtttttgcccttacagctgcccttttgggcgcccggttccgggccggctccaatgccggaatgctcggcctgggcggactgcccggtctgggcggaccggctgccagtgacggggatacggaggcgggtgagggcaacaatctggacgttcccgccggctgcaacatgggtcgacggcgcagtcgagcggttctctaccagctatccgggcactacaagccggaaaagggtggcgtgaagaccaagttgaaactgggcaataattttatgcattcaacggaggcgccgtttccggagtacaaaacccagtcgataaaaaagtcacgcttgattctgccccattacggggtgttcaagggcatctgggattgggtgattctggtggccaccttctacgttgccctcatggtgccctacaatgccgcgtttgccaaagcggatcggcagacaaaggtatcggatgtgattgtggaggcgctcttcattgtagatattctgctaaacttccgcaccaccttcgtgtcgcgcaagggcgaggttgtctccaattcgaagcagattgccatcaattacctgcgaggatggttcgccctggaccttctggccgcgctgccctttgatcacctgtacgcgtccgatttgtacgacggcgaggattcgcacatccatcttgtgaaattgacgcgtctcctgcggctcgctcgtctgttgcaaaaaattgatcgatactcgcagcatacggccatgatactgacattgctgatgttctccttcacgctggccgcccactggctggcctgcatctggtatgtgatagcggtcaaggagtacgaatggttccccgagagcaacatcggttggctgcagcttttggcggaaaggaaaaacgcttccgtcgccattttgaccacggcggaaacgtattccacggccttgtacttcaccttcacaagtctcacttccgtgggatttggcaacgtttcggcgaacacgacggccgaaaaggtcttcaccatcatcatgatgctcattggcgctctgatgcatgccgtggtcttcggtaacgtgactgccatcatccaaaggatgtattcgcgtcgctcgctatatgagagcaaatggcgcgacctaaaggactttgtggccctgcacaatatgcccaaagagctaaagcagcgcatcgaggactactttcagaccagctggtcactcagccatggcatcgatatatacgagacgctacgcgaatttcccgaagagctccgtggcgacgtttccatgcatctacatcgtgaaatattacagctgccgatattcgaggcggcctcccagggctgcctgaaacttttgtccctgcacattaagacgaacttctgcgcgcccggggagtatctgatccacaaaggcgatgccctcaactatatctactatttgtgcaacggatctatggaggtgatcaaggacgacatggtggtagctattctgggtaagggtgacctggtgggctccgacatcaatgtgcacctggtggccaccagcaatggccagatgaccgccaccaccaacagtgctggccaggatgttgtcgtccgcagcagcagcgatattaaggcgctaacctactgtgatctgaagtgcatccacatgggtggtctggtggaggtactacgcttatatccggagtatcagcagcagtttgccaacgatattcagcacgatctcacatgcaatttaagggagggctacgagaatcaggactccgatattggaccctcatttcccctgcccagtatcagtgaggatgatgaaaatcgcgaggaggccgaggaagggggcaagggggagaaggaaaacggtggaggaccaccaagtggtgcttctccgctgcacaacataagcaattctccgctgcatgcaacacgatctccactactgggcatgggaagtcccagaaaccaaaggttgcatcagcggggtagatctctgattaccttaagggaaacgaacaagaggcatagaactctaaacgcagcttgtagtctggatcgtggttcctttgaggagcccgaaccactggaagaggagcaatcgtcgggcggtaaaaggccctccttggaacgcttggactcccaagtgtccactttgcaccaggatgtggcccaactgagtgcggaagttcgtaatgccatcagcgccctgcaggaaatgacattcacctccaatgccatgacatcacatagttctctcaagttccctccagcaagatctatacccaacataagtggagttgcgggcacaagatcaggagttgcagtcgagcacggcttgatgggcggagttttggcagccgctgaattggcagccatgcaacgtagttcatcacatcctcccgaggtttggggcagggatgtccaactgcccaccagtaatacggccagttccaaggcaccctcacctgtggagccaaagaagacgatgaccagtaggagcagccaaacggacttctatcgcatagactttccgacctttgagcgattcgttttggccaatcctcgtctggttttgggacttctgggcattgaacccgccatcaaaaacgaaatggatctcctgcagcaaaagcaaaccctgcagatatcacctttaaatacgatagatgagtgtgtttcgccttcggatcacaatttggccagttccaaggagagactaatcacatcatcggcagtcccgacacctggtcgcatttacccgcctctggatgatgagaactccaatgattttcggtggacaatgaagcactcggccagtcatcatagctgttgcaagagcactgatgctctgctgagtccagaggagcagcctccgatttcgatacttccagtggatgcaactcctgcgccatctgtccaggaagtgagatcctcgaaaagaagcttacgaaaaagcacgagtggcagcaactccagcctatcaagcagcagttcgagctctaatagttgtctggtgtcgcagagtacgggcaacctgaccactacgaacgcctcggtgcactgcagcaacagtagccagagtgtggccagtgtggcgaccacgagaagagcctcctggaagttgcaacactcgaggagcggggagtatcgaagattatccgaagccacggctgagtactcaccacctgccaagacaccacttcctgtggcgggagtgagctacgggggcgatgaggaggaaagtgtcgagctcctgggacctcgtcggaactcaagacccatcctgctgggcgtaagccagaatcagggccaaggacaggctatgaatttccgcttctcggcgggggatgccgataaattggagaagggtctgcgtggactgccctccactcgctccctgcgagatccgagtagcaaataagcagccaaaaggagtcattcgcatgcaaaccgccgtttcgtgatttatgtcctaattaatactgaaacacaaagacgcttgtacatttattatctttaagatacccacacgagtttggttgttcatttgtatccccgtagaattatcgagaataccttcacatattgtaaagcata

SEQ ID NO: 10494 - protein, 1311 aa, DROSOPHILA
MSCPRFLLAALPRPKPRFKRRTGPTIPMPARKGLLAPQNTFLDTIATRFDGTHSNFVLGNAQANGNPIVYCSDGFVDLTGYSRAQIMQKGCSCHFLYGPDTKEEHKQQIEKSLSNKMELKLEVIFYKKEGAPFWCLFDIVPIKNEKRDVVLFLASHKDITHTKMLEMNVNEECDSVFALTAALLGARFRAGSNAGMLGLGGLPGLGGPAASDGDTEAGEGNNLDVPAGCNMGRRRSRAVLYQLSGHYKPEKGGVKTKLKLGNNFMHSTEAPFPEYKTQSIKKSRLILPHYGVFKGIWDWVILVATFYVALMVPYNAAFAKADRQTKVSDVIVEALFIVDILLNFRTTFVSRKGEVVSNSKQIAINYLRGWFALDLLAALPFDHLYASDLYDGEDSHIHLVKLTRLLRLARLLQKIDRYSQHTAMILTLLMFSFTLAAHWLACIWYVIAVKEYEWFPESNIGWLQLLAERKNASVAILTTAETYSTALYFTFTSLTSVGFGNVSANTTAEKVFTIIMMLIGALMHAVVFGNVTAIIQRMYSRRSLYESKWRDLKDFVALHNMPKELKQRIEDYFQTSWSLSHGIDIYETLREFPEELRGDVSMHLHREILQLPIFEAASQGCLKLLSLHIKTNFCAPGEYLIHKGDALNYIYYLCNGSMEVIKDDMVVAILGKGDLVGSDINVHLVATSNGQMTATTNSAGQDVVVRSSSDIKALTYCDLKCIHMGGLVEVLRLYPEYQQQFANDIQHDLTCNLREGYENQDSDIGPSFPLPSISEDDENREEAEEGGKGEKENGGGPPSGASPLHNISNSPLHATRSPLLGMGSPRNQRLHQRGRSLITLRETNKRHRTLNAACSLDRGSFEEPEPLEEEQSSGGKRPSLERLDSQVSTLHQDVAQLSAEVRNAISALQEMTFTSNAMTSHSSLKFPPARSIPNISGVAGTRSGVAVEHGLMGGVLAAAELAAMQRSSSHPPEVWGRDVQLPTSNTASSKAPSPVEPKKTMTSRSSQTDFYRIDFPTFERFVLANPRLVLGLLGIEPAIKNEMDLLQQKQTLQISPLNTIDECVSPSDHNLASSKERLITSSAVPTPGRIYPPLDDENSNDFRWTMKHSASHHSCCKSTDALLSPEEQPPISILPVDATPAPSVQEVRSSKRSLRKSTSGSNSSLSSSSSSSNSCLVSQSTGNLTTTNASVHCSNSSQSVASVATTRRASWKLQHSRSGEYRRLSEATAEYSPPAKTPLPVAGVSYGGDEEESVELLGPRRNSRPILLGVSQNQGQGQAMNFRFSAGDADKLEKGLRGLPSTRSLRDPSSK

SEQ ID NO: 10495 - DNA, 2630 bp, DROSOPHILA
catgcgatatggatgatcgatgccgaagatgtagcgacaattctgggtgcacgcccaatagaagttccattcgccattaaaggagggcacctgtagccaacctcttttctggaaattgctgaccagcgcagacttgtcccaatctgtgctgtagtaaatgccgtttcgggatttcggtggtctcagtcgattccggatgtaatgcagaccattgatgggctgggtgattaacttgacctcaggcaggtcatcgtcactagtgcaactgccgccgcatttctggcgaagattcctcagaggactggtctgtcttcgcgtgctcatttgggtggttgtattttagatactgcccctctttatgctgataactgagaattttgcctaattttgaagcgatcgtacttcagttgctgacaatttaattatggcctggctgatgcccccgcgttggcatctagtaagcccataacctttcaagaataggaccttgggttccagagagcatacttatttcccagctgtatggtcaatggtttacaatattaattcacttgttcccacaactgatgaaaaaaatctgactgttttccggcaacagatccgcttgcataatccccgggaagaaaacgaaagtgctaattcccttgaagctgcaatgtttgcccaaaaattgcgttatattcttggattctagctaaaagcaaaccttctgcgaaaccacaagatcgcaaagagtgaaaaatctgactttgacacaaatatttgtgacactagttcacctgccatcggaacagggggccctccaaaacccattgagtaatttcacacattgcgggttttggtacagaacaatcgcgcactattgtcgagcaattcgacttggctgggtataaagtcgatggtatggtcaccagagttcatcagtcgacgcggcaaagtcaagagtggattttgtggattagcaggaacaccgaatcgaagatatacacattacatcaccatgaagttctacctgggattggcggcagtagtagttgcgatggtttccctagcgaagccgggagaagccacctttggcaagcttaatcttcttctgggcggagccactacgtctggctatggatctggatatggcggcggctatggttctggctacggctatggatctggctatggatcaggatatggcgccggctatggatacgctcccgagaacgtggtgaaggtgatcaaggtatcggtggtgccaggaggtggaatcggaggaggatatggcggaagctatggtggaggatatggcggcggttacactggcggctatggcggtggctattccagcggctttgtgggcgctgcgcctgccatatccacctccgccgtggttacaccggtggtcacatcggtgtccaccccggttgccactcctgtcctggccggtggagccggctatgttggcggattcggaggcgctttgggcggaggattgggtggctatggaagctccttcggcggtggtgctgcccttcccgcctcctacggctatggcgctggctatggcgctggcggcggctttggactgggattcggtgcaccaccaccaccacttggcttggctggaggactctgctagagaacgacgaagccacaacgtcaagtggttatttttttttgataattttaaacaacgatttgtaattaaaaattaacgatttgtaataaattgtataaacgaagagaatagtgtttgcttttttgagctcaccaagagtaaatcttttaataatactatacataatgaatattttgtttgttataaatatttataaacataatagttcgttttaagctcataaacctatgcaactcaataaatgagcagcaaatatgtggaagaaatagaatacaatcagtgattttgtctgcccaaaagtgtgctaaataaaatgacattaaacaaacccctccaagttctatactctatacatatacagatctataagccgcgatgtaactttttgcttttgcaatttactgcttgacaattacaaaataaaagagttcgcacccatttgaagagccaccacccaaaaaatgtattggcccacccaatcctagtgaccttcggtttgggcctctgaatgaaaacgagagttgagtgctgtttacgcactcagttagccggctttaaccctttccgcccccccaaagcttctctttgcccatcgaactggagatcgtgagcccaagaaaactgttaatggtaatcaagtgccaaaaaccaaaagcaaagccaaagtcaaagtcaagtcacaagagccaagcccaaaaaaaaaaaatataatgttcgaccgagaatgctgtatgccacatgggtgcaaattggttgagctggaccagctccatcttcatttccatctccaactctagccacatatgtcgcagtcacttcaactaaaatgtaaatggtaatgtgtaaattggcaatgatttaatatttgcaatgctaagaaatttgaagataaaatagaaatgaaataaaattagtcaagtagaaaacacagcaagaacctgaaagctttaatacttttaagctggttaacattcatcttagttaatgttaaaaattttaa

SEQ ID NO: 10496 - DNA, 630 bp, DROSOPHILA
atgaagttctacctgggattggcggcagtagtagttgcgatggtttccctagcgaagccgggagaagccacctttggcaagcttaatcttcttctgggcggagccactacgtctggctatggatctggatatggcggcggctatggttctggctacggctatggatctggctatggatcaggatatggcgccggctatggatacgctcccgagaacgtggtgaaggtgatcaaggtatcggtggtgccaggaggtggaatcggaggaggatatggcggaagctatggtggaggatatggcggcggttacactggcggctatggcggtggctattccagcggctttgtgggcgctgcgcctgccatatccacctccgccgtggttacaccggtggtcacatcggtgtccaccccggttgccactcctgtcctggccggtggagccggctatgttggcggattcggaggcgctttgggcggaggattgggtggctatggaagctccttcggcggtggtgctgcccttcccgcctcctacggctatggcgctggctatggcgctggcggcggctttggactgggattcggtgcaccaccaccaccacttggcttggctggaggactctgctag

SEQ ID NO: 10497 - protein, 209 aa, DROSOPHILA
MKFYLGLAAVVVAMVSLAKPGEATFGKLNLLLGGATTSGYGSGYGGGYGSGYGYGSGYGSGYGAGYGYAPENVVKVIKVSVVPGGGIGGGYGGSYGGGYGGGYTGGYGGGYSSGFVGAAPAISTSAVVTPVVTSVSTPVATPVLAGGAGYVGGFGGALGGGLGGYGSSFGGGAALPASYGYGAGYGAGGGFGLGFGAPPPPLGLAGGLC

SEQ ID NO: 10498 - DNA, 3656 bp, DROSOPHILA
aaatagaacatatcattaagtaaaagattattatgtatagtgtttaaatttcaaactctaacaattaaaaacagttaaaaatttaagtgttccgttaatgtttttgtttgtcatctccccgtagtacatacatttcctgtttctcgttttttttccactaattttaaatttattcgtaggcgcttctcctaaacaaaaacaaactagccgatgttgtttgttaacagaaaaagaatgaattatttacaataaattgtaaacgaaaaataaactctcgcacacatcgtccgtctccataaatagttgctcactagttaattacaatgcttaggcttcgcaaaattttgtgtccgagtatgtgtaatacatatgtatatacgatataaattaggcctatttatttagttacaacagattttcatttacgttcaaacatttaacttggactgcgtcgggcgattttgtatttaagtgtgttgagtttatttgatttgtttcggtcttggtatgttaaatggttatttaaacataaaattaaaatgccactaattaattaatttgccataattaaaggatttaattctctactcgcatttactcttaactgtcagcattatttgattcgtttgccgtattagaaaaagtgcacttatgaatactgcattcggtctgaaaatagataaaataaaagagaatcggttagaaaatccttgctgaagcaatttgaattagtaatgcaatttggccccaatttcatgaaaaggtcagcggtaatagccattagtacgtaatcgaagcaatttacaatttaaaatgggcgggggtccggcttaatatccgcccctcagaatctccggcgcaaaatgataaaccaaacaatacccggaatgccaatggaatgacatcatctcaacggttggcccgaaacgataagaaaccagatatgagccgatttaaagaaaccggctgtcatggcgtcgcagcgtatcgtttgataacacatatagtaaataatcactgcaggtgattcttaatacttactgtccttctttgaagtactccttcagcgttgtgctgaacttcttggaatatttgacgaactccttcttacgctgctccacagcctgcttgcccgttacgccaggtataaacgagccgatctcgttgaccacatcgagtagtttctttatggcgctggcgatttccctgtaaaacgcagtaaaatttcattattcattaatcagttaagcttatgcagtgagttttagcttcattttgagtttttacttacttgatggtctccaggaaggtcttcctgtcgtttatctcatcgggtatgcggctgaggatcaccttgagagccacggacttacgattgagctcctggaagggctcctccgtgcgcgtcaagcggtattcattgactgtggaagggggaaacttcgttagctacgaaactcagctgctggcgtggctacttacggtccgcttccgtaattttgccctgcaatcggagcacggcctcgtttaggttaacattcagatcggcccgccgcacaattgtggctacgaggtcatagcagaagcccggattgttctgctccgacttgagaatggcggagcgcagagattgggcagcgccaacgtcgcgtcgctcgagctgcaggtaaacgtacacaaagttaagcaattacaaacccaagtaccccatgtaaaggtttacgcaacaggccacgatctgacggggctgaagggttcagaggtacggtttggggctgacgggttcggagcagagcacagcagagcggagccgagcacctgggatcgtttcacctacctgggagaaaatgggccgcagtatgacgggcagaacgagagacgacgtgggctcgcccattgtcattgctactagtgtgcttggtcttctctactggtgcctaggtatcctggcgcatgctgcaggaacccagttgcgattcccgttccgtgcgatgtccgtcgcttcgctcgcacgacgctcgcaaatcaaattaaaaaattaacaaaaattgttcacaacagcacaggcacagtgttgtttttcaatactggaaactaactggtttttatcgatgaacgtgtcgtgcttggttagatatcgattgcttctgtagaagctgatggtagaatcagctgatttacataaacctatcggaactctgcaataaattggtttatttttgtttacctgtccttttatcaatgataagagaaatgtccaaccacgatatcaagctggaggtctgcgtggactccatacgatcggcttttgccgccgaggaaggcggagcttcacgcattgaactgtgttcggcattgggcgaaggtggcttgacacccagcatcggtaccctaaaaactattaaggaaacgctcacaatgcccatttactgcatgctgaggccacggcggggcaccgactttgtctacagcgacgaggagatgtgcgccctgctcacggacatggacttgctgcgggaaaacggtgccgatggcttcgttttcggatccctgaatccggatcgcagcatcaacgtggatcagtgtcggcacgttttgctggcgtccggtggtctgccagtgacctttcaccgcgccttcgacctcaccgaccagaagtccatggacgagaatgtcgacatgttgcgggaactaggtttccgacgtctgctgagcagcggattccgacccacggctgccgatggcgtagattgcctggcacagctgatagccaaacatcaaagagactttatagttatgcccggcgccggcataaaggtgtccaacctggaggagatcctcacggtcagtcgctgcctagagtttcacgcttccgccctggacacggctggcgaggactacgtggcgcccaccaccacgcgaatggagtgtgacgtgaccatgggcaaacaggacgtggacccctactacggaaccaactccatcgtggtgcgaaagatggttaccattgcgaaagcgatgagctcccgctgaaaatcatagtacttaacctatccctaagacttaaattattccttaactgtttgtttacatcatatataactagtatataccttttacttaagtagtcttatccctaaaattctaaattctaaaaaataatccaaatttgatttgatttgattgtgctgaaacaacatgattgtggagatagtagagaatcctgctgctctagaacataattcttttaatgatcacttaaataatgcagaaagggtattgcatagaatagaagcatacaatgtaaagctaaataatcatatgaggagattgaaagaactgctggccaacaatagaagattgatttcggggctatcgtacaatgagcacagcattaaatctttattggaaaacaaagctcaagataaacaaatagagtaagctaaagaaggaaatatgaactcggttataaactaatatatttttaggcgaaattcaagtaaaagaaggtgtcatcttcgtaggacttgcaaggcgaccaacatcagagaggcatgttggacgcaatgcaagtctcacatggagcctgaagaggaagagcaaacccaagacgtggtggagatccaaacgaaaacacaaacatctagaagccgttc

SEQ ID NO: 10499 - DNA, 1336 bp, DROSOPHILA
tctggtcggtgaggtcgaaggcgcggtgaaaggtcactggcagaccaccggacgccagcaaaacgtgccgacactgatccacgttgatgctgcgatccggattcagggatccgaaaacgaagccatcggcaccgttttcccgcagcaagtccatgtccgtgagcagggcgcacatctcctcgtcgctgtagacaaagtcggtgccccgccgtggcctcagcatgcagtaaatgggcattgtgagcgtttccttaatagtttttagggtaccgatgctgggtgtcaagccaccttcgcccaatgccgaacacagttcaatgcgtgaagctccgccttcctcggcggcaaaagccgatcgtatggagtccacgcagacctccagcttgatatcgtggttggacatttctcttatcattgataaaaggacaggtaaacaaaaataaaccaatttattgcagagttccgataggtttatgtaaatcagctgattctaccatcagcttctacagaagcaatcgatatctaaccaagcacgacacgttcatcgataaaaaccagttagtttccagtattgaaaaacaacactgtgcctgtgctgttgtgaacaatttttgttaattttttaatttgatttgcgagcgtcgtgcgagcgaagcgacggacatcgcacggaacgggaatcgcaactgggttcctgcagcatgcgccaggatacctaggcaccagtagagaagaccaagcacactagtagcaatgacaatgggcgagcccacgtcgtctctcgttctgcccgtcatactgcggcccattttctcccagctcgagcgacgcgacgttggcgctgcccaatctctgcgctccgccattctcaagtcggagcagaacaatccgggcttctgctatgacctcgtagccacaattgtgcggcgggccgatctgaatgttaacctaaacgaggccgtgctccgattgcagggcaaaattacggaagcggacctcaatgaataccgcttgacgcgcacggaggagcccttccaggagctcaatcgtaagtccgtggctctcaaggtgatcctcagccgcatacccgatgagataaacgacaggaagaccttcctggagaccatcaaggaaatcgccagcgccataaagaaactactcgatgtggtcaacgagatcggctcgtttatacctggcgtaacgggcaagcaggctgtggagcagcgtaagaaggagttcgtcaaatattccaagaagttcagcacaacgctgaaggagtacttcaaagaaggacagtaagtattaagaatcacctgcagtgattatttactatatg

SEQ ID NO: 10500 - protein, 181 aa, DROSOPHILA
MTMGEPTSSLVLPVILRPIFSQLERRDVGAAQSLRSAILKSEQNNPGFCYDLVATIVRRADLNVNLNEAVLRLQGKITEADLNEYRLTRTEEPFQELNRKSVALKVILSRIPDEINDRKTFLETIKEIASAIKKLLDVVNEIGSFIPGVTGKQAVEQRKKEFVKYSKKFSTTLKEYFKEGQ

SEQ ID NO: 10501 - DNA, 4043 bp, DROSOPHILA
cacacttcttacatatgtatgctcatttaagtgcatataagcagactaaaataaagttcccttgctgacccaataaaaccactcatttgtgcaaaatctggttaagcagcagtcgcacttacctctatggaatattaattaatttgtttagccccagttcaagccaacatattcaacataaatagagcaaagttttggcttttggtcaacacgttgtccgaatgcgatgccatttcctctggcaactggccagagttttgtgtgttgccaaggccaaattgatgtgacccccgccgaaccgcttgttacttattaaattggggtttctactgttggaagtcccacgccaaacaaagtttgattacacagcttagaacaaagtcgcaatagctgccacacggcaaaaactttctcaaggggtcgcacaaagaattaggccctagtcttagtagcaactttgatttcttattttttttttttgttcggaggggaaggtgtaagcggaaggttaatcacaggacagcacaagtataaacaatttgaaaatttacaaagttttttgcggattaaaaatcaagagtcaaagtaggaaattcagagagatgtttccgacaaaactgtgactcaatgatgagacatacaagtcaaataatttaaagtctctttcaacttttaacgagtgtaggtaggtgaaaaggccttatttatttatttgccaaaacaggaacttttcaattacgtttagtttgcttatttatttatggcgctcaagatgctcaattaagtgcaaacaaagttggagacatctgtgggtgatttgtgcaagacagcaaattaaactgggttccctaatttgtaactttatatatacagatttctccttttgaaaatgattaacccaacatgatcagagtacgtcggcttaataagtttgtaaatttcattggtgttatacctatgtatttttgtttaaattttatactttttagtactgacaaaaatggagtccatccaggtgccaaaggagctgaaatcgctgctgagctgcggtctatgccatcgcccgtacgatctggccaccggccttctgccccaggagctcgcctgccggcacagcttctgcaagaagtgcgtgcaaagaaacaccgaccacaactcgtccgagtgtatttgcaatttgtgcggatatcgcacgcagctggatggccagcagctaccgcaatccgtaaccatcatgtatctgctccgtgagctgccagctttgattctgggcagagccatgttggatttttcgtacaaaaggagcagcactattgaaatgtctattgaagaagcacccagcagcccatcgaaaaactgggtggaagacatcaacgtggagagctttctggccaccagtgcggagcactgtttcatccatgccatgccgaactccacgtggtgtcacaattgccaacgtctgctgtgccgtgcctgctcggatgtcccattgcaccaggaccatatcctggtgcgccaggttgattaccatgaccttatcagccaactgctcaactccgagttgaggaagatcaagagcacggctgtccatgccaaagagttggccacccacgaaatggatctactacgcgagctgtgcgaggcgtgctaccgcgttcagttgcatgtgaagcgtgagatgctggaacaccattctagcatggttgcggcctcgatgatcggttggcatcgactagccgagcgggatctgcatcgagtcggtagacttactggagcaaaaatgctgcaggtgctcgcccacttggccacacagcggcagcgatacgagcgccagttggaccaggtgcactttcaatgtcgaatgcaagccgcaattcaggagaacgggatgcaggtcctggactttgagactctgaataacaggatcgcacggctacgcagtcatcgtcggcccggtgctattcccgccaatgtggggccaccgcaggcgctcatcctcaccaactactgtgtgtacgcctactggtgcgagatgcagcgcgaaatgattcctccacgccacaggaatctgacaccggatccagaattactgccggaaccgcggcgagctgtggtgcctccgcatttcaataatagcctgcgggaggtggaacttctggattatgtgcagcagatcgaactcgagcagtttcgaacgctcagtcaacctccgtatgatggttcacacgaatcctcctcgtcgccgaacagcagcagcagtacaaacagccaaagcaattatattgctctagacacggaatatggacttcgagaattggtgcgccagttgcaacagcagccgcagcaagtgcaacaggaacagcagcagcagcagcagcaagtacaccagcttacccactcaatttaccagccagatgcgattctcgtcaactcggtggagccgcagctaattggtcaacaaagccatgatcatcatcgacaggatggcggtacgagttcatcggtaagcattgtgcgtcagcccatcgttcactgttaccccatctactttctggacatggaaatagcaggagaactggccggacgggtcctaatcgaggtgcgatctgatgctgctccccggatggcggacaactttggggcgctggtgcggcacgagcggggctatggctatcgtggctgcactgtctttcaggcctggggaggcgagagcatcatcaccggcgactttgaatcgcagaacggacgcggtgggcactcggcctttgagagcagatactttttgccagacgaaacgggattgccggcacatcggggaacggttggtatgcgcaggggacagcggcgacaggacagaagtggatttgtgggcagccaatttcggctggtgctaaacgagatgcgatccttcaccgccattttcggattcattgtccagggcattgagctggtggaccgaattgcggccagtggcaatgctctaggacgcccggcccttaggagcattatccggaattgtggggaatatcatttaaaccaataataagtccgactgatccattagctaatcctacttatcgaacagtatcaaaccgaaagctcctaaacactttgaatgtacaacaccacccaatatctattttattcttggaatgcaaatcttggtataaattttgtaaaaataaacgatcaatgtaagacacttgaaactcgacattttcagcaacagaagccaatttttttaacaaagaaagaaagaatttttataaacaatttacaacttattgaaacgttttggatgctattttaaataaaaaaaagactatcaatgatctataaacatttcagattcatggacaaggtggaaattgtaacagaccttgagtatttaaataagtttagcttaaggaaaacgacactaaatgtgcgttggagcgctacgacgatacctggatatagtaaattagctacaataaaaacttaaaaatttgaaaccacgagtaaggtgaaatccaaatacatagctgacatgtaattaatgtcaattcaagttaataattaatatgaaataaacctattagcaataagtaaataaacgagatagttttcggtgtctaaatatgcatttgatgtgatcataactaaggctatgtttgtgatggatgaaataatgaacgccaagaatagccatccataaaaataagggaatcaagtaataatatgaccttagcgatgtaaaggaaggcaaagaatctttttaggaacaaatcgaaatcaattttacgaaatttgtagacttattatactttaaattattttaagtaatcaatcaatcaacgattaacttcaattgaaaagaaaaaaatcaaatcgaaatcttatattttccaaaataataaaaacgcgtatcacaattaagcattagatagaacaaaacagtttggcaaaataaaaataaataaaaaaaaataagggtaataactggaaaattgtgattggcttggcagttgctcagaaagttattttaacaattgaatatgcgc

SEQ ID NO: 10502 - DNA, 1950 bp, DROSOPHILA
atggagtccatccaggtgccaaaggagctgaaatcgctgctgagctgcggtctatgccatcgcccgtacgatctggccaccggccttctgccccaggagctcgcctgccggcacagcttctgcaagaagtgcgtgcaaagaaacaccgaccacaactcgtccgagtgtatttgcaatttgtgcggatatcgcacgcagctggatggccagcagctaccgcaatccgtaaccatcatgtatctgctccgtgagctgccagctttgattctgggcagagccatgttggatttttcgtacaaaaggagcagcactattgaaatgtctattgaagaagcacccagcagcccatcgaaaaactgggtggaagacatcaacgtggagagctttctggccaccagtgcggagcactgtttcatccatgccatgccgaactccacgtggtgtcacaattgccaacgtctgctgtgccgtgcctgctcggatgtcccattgcaccaggaccatatcctggtgcgccaggttgattaccatgaccttatcagccaactgctcaactccgagttgaggaagatcaagagcacggctgtccatgccaaagagttggccacccacgaaatggatctactacgcgagctgtgcgaggcgtgctaccgcgttcagttgcatgtgaagcgtgagatgctggaacaccattctagcatggttgcggcctcgatgatcggttggcatcgactagccgagcgggatctgcatcgagtcggtagacttactggagcaaaaatgctgcaggtgctcgcccacttggccacacagcggcagcgatacgagcgccagttggaccaggtgcactttcaatgtcgaatgcaagccgcaattcaggagaacgggatgcaggtcctggactttgagactctgaataacaggatcgcacggctacgcagtcatcgtcggcccggtgctattcccgccaatgtggggccaccgcaggcgctcatcctcaccaactactgtgtgtacgcctactggtgcgagatgcagcgcgaaatgattcctccacgccacaggaatctgacaccggatccagaattactgccggaaccgcggcgagctgtggtgcctccgcatttcaataatagcctgcgggaggtggaacttctggattatgtgcagcagatcgaactcgagcagtttcgaacgctcagtcaacctccgtatgatggttcacacgaatcctcctcgtcgccgaacagcagcagcagtacaaacagccaaagcaattatattgctctagacacggaatatggacttcgagaattgccagatgcgattctcgtcaactcggtggagccgcagctaattggtcaacaaagccatgatcatcatcgacaggatggcggtacgagttcatcggtaagcattgtgcgtcagcccatcgttcactgttaccccatctactttctggacatggaaatagcaggagaactggccggacgggtcctaatcgaggtgcgatctgatgctgctccccggatggcggacaactttggggcgctggtgcggcacgagcggggctatggctatcgtggctgcactgtctttcaggcctggggaggcgagagcatcatcaccggcgactttgaatcgcagaacggacgcggtgggcactcggcctttgagagcagatactttttgccagacgaaacgggattgccggcacatcggggaacggttggtatgcgcaggggacagcggcgacaggacagaagtggatttgtgggcagccaatttcggctggtgctaaacgagatgcgatccttcaccgccattttcggattcattgtccagggcattgagctggtggaccgaattgcggccagtggcaatgctctaggacgcccggcccttaggagcattatccggaattgtggggaatatcatttaaaccaataa

SEQ ID NO: 10503 - protein, 649 aa, DROSOPHILA
MESIQVPKELKSLLSCGLCHRPYDLATGLLPQELACRHSFCKKCVQRNTDHNSSECICNLCGYRTQLDGQQLPQSVTIMYLLRELPALILGRAMLDFSYKRSSTIEMSIEEAPSSPSKNWVEDINVESFLATSAEHCFIHAMPNSTWCHNCQRLLCRACSDVPLHQDHILVRQVDYHDLISQLLNSELRKIKSTAVHAKELATHEMDLLRELCEACYRVQLHVKREMLEHHSSMVAASMIGWHRLAERDLHRVGRLTGAKMLQVLAHLATQRQRYERQLDQVHFQCRMQAAIQENGMQVLDFETLNNRIARLRSHRRPGAIPANVGPPQALILTNYCVYAYWCEMQREMIPPRHRNLTPDPELLPEPRRAVVPPHFNNSLREVELLDYVQQIELEQFRTLSQPPYDGSHESSSSPNSSSSTNSQSNYIALDTEYGLRELPDAILVNSVEPQLIGQQSHDHHRQDGGTSSSVSIVRQPIVHCYPIYFLDMEIAGELAGRVLIEVRSDAAPRMADNFGALVRHERGYGYRGCTVFQAWGGESIITGDFESQNGRGGHSAFESRYFLPDETGLPAHRGTVGMRRGQRRQDRSGFVGSQFRLVLNEMRSFTAIFGFIVQGIELVDRIAASGNALGRPALRSIIRNCGEYHLNQ

SEQ ID NO: 10504 - DNA, 3967 bp, DROSOPHILA
gaaacactggccattttggatcgggcacgcaatgccaagcgtaagaatctgcggcagatcgaggcgagcggagcttacaagcagagctattaccgcccgcccgccgacaaccgaatgcatggagagaaggccaagtcgcagctgcagttcaccatggccggcactcatttgcccgatccggcgatcaagccgcgacgtcgtcctcgcgaagagcaactggtgacggaggaggatctcataaacgagcgtaagttggaatatttcttaagcggaataaagcggaattatacattgagttggcatgctcctacagttttggaccaaatcaacgagcgtgctgagtggttgacggaaatggagtccatgggccagggtaagaagtatcgtccagagattcgagatcagattgccgaacgtctgcgtcgcattcaggcgctggagtccaagatgaagatgaagtccaatggcggcttccgtttcgtggactaaatgtgttatcctgtttttaaagtttcatgatttcatgattgagacgacgagtaaaccaaataaataaattccaagattcatttgaatttaatgggaatttatggtaacactcgattaataaatagctttattcaacttattcgcattcgtataatttggatttcgttaaattttcatttgatctggcacatatttaatacacactcattataacaatgcaagaagcccaaacgcaagcactttagaccttagatttttggcaaaatgagtataaagtacaatgttgaaaattcaagtggtttaattaaaagtaccgaataaattactggattattagtttatgtgtatatagaatatacggctgtatatatctggacctacgcactacattttgtatatatatatatatatgcacgcatctgtaagttcaaagagtaatgcacctccattcaaaaatagacttttgtgacctcagtttgtgctcaacctcggattcagggggtggttgtgtttagcacgacggcatgtggcaacgaaattcgctggctgcttctgcaaaccgattccggatcaagtagccgctaatcacctcagccacctcgtgtggacggtcctcgtgcacggcgtgaccgcagcgggccaagacctgcatctggaagcgaccctgcatctggccaacagtcagggtgcggtccagtccatcgatgctggcgaggagtagttgcttgggcaggcgcaagttaaggaacttatcgctcagccccgaaaaccagcccacccagtacttctccgacttggacagatcaatgcgccaggtgtaactgagaagcaatcaatgaataatttgtgttttaactaaaataaaataaattggactacgtactttttggccgcttcggttgtcgatttggtcgtgttgggcttcttgaaatccgcgccagctgcggcactttctgaggagccatcggcggcgtcatcgcccggcggtgacgattcttcatcctccgaaatgctaaacggattgggaaacatactgttgtggtgggcctcctccaatacatcatctggtaatggcagatcattcgttgccagtttgttcgttgtacaactgcgtgggattgatttattattacttttctgtcgtttacgacaatcctactcactttattatctgtcccggcatggacactttggcgctgtccacattgcgcacttggccgcttcggatgcaccactcgatagcattcggaatactctggaaatactttggacgggagcgcagaaagctctgcatgctggctagtgcctccatggctgtgccctccacaacatcgatgacggttattccaatcaaattgggcaccagagccatgtgggcaaagtggacggcgatggcgccgcccatcgagtggccaaccacaaaaagctgcggcacttcttcaggatagagcttcaggattaagtcaccgatgtccctgtttagaatattttaaacattattatagattatagattagattattatggtttttagcttcaaccgtgaataaagtaactataaaaaactaaataatatttacaaatgagtgatcgttcaaatagatcgacctactttaagtgcagtgcgctatttttataaataaagagattatgcaagtttagcctaatcgttcataaagctaagagttaatgcgagaagttttactcgacaaaatcttaaaaatattggtttttaatgtaagcagtagaaaaatttgcataaccatctctaaaacatattttgagaacaatatttttttggattcaactcacttagccaacgtatcagcggagagatcgtcctcgtcgtccaccttgctgtccccatgacctcgcatatcgatgcacaggcactggcagtggatcatgctggtcacctcagacttaaatggatatatgtacatgttaagactatttaacagaatatatcgcattcactcacacaaaagtgcgcccaggtgagggcagagtagccaccgccgtggagcagaaggagaactggacccggcttctccggttgcttggtgcgatagatgcggaaggtgcgttgctcatccaccgtgacgtcctccttctccgcaaagaattcgttccacatgcccggcttgtagtcgcgaatgcgcgacttcttgaacgagtccctgtaattagccaaattgggtagagattgcgtactccccactccagtcgcagaataccctgcacttacgctctgccaatgcgcccgccaggaattgtgggtggcagcttgcccttcaacatcgtgcgctgtaaactcgacattgatccgattgtcttcgctgtggggtcaacaggtggtgctcctacggtgcaggtgcaagtggttattcacacagtcgttgctcgcaattatccgttttcgaaaacaaaaaaatagttccaattcaacgaagaagtattgcagtgtgaccgtaatcgagaaaaccgtaactgacgccagctggcagcgctggttcaagagctgcacttggcaatgcccttgtctggcaacgcctaaccgcaacagtcaacatttcaaattccaaaacggatattttaggcttttgcaatcaaagacgaaaatccgtaccatactgaaacaacaacagttgtatattttaatgtttgtacattttaatcaattaagtattttaaaagtttatctacgaaaaaattgatgagctccccgaaacacttgtaccttatcagctttgtaaatacttcacattaatggcaaaataataagcaaggtaataacctttcgcaaagtggatgtcaaaaccactttttaaagcagacaaaatttggaaaccagttttttagaatgctaacaagaaagaattcatatgctatgaagatgtttgacccatttaacggtaaagacagctagttataaactaacaaagctctcaacaagttcctactgatacacacagtgcaacatcgctagctgggaaactggtgttctataaggtctccgagcatttatatttcagtaatgctactgataaggaagtatcactttattgttcatagtattccggactaagcaaaaacggaaacggaacgggccggattgctcagttgcttgatggaacgcgacgtgctcacaccgaaaactagaactcctctctgataagacggcaccaagttaatttgacctcaaacagagaaagataaggcattgttgggtatgtatcggcaaaagtgtaaaaatcttgacaaaatcctttatatctgtgtttattctggtatgtaaacaaaaggtaagctcaatacaggttaagtttatggtttcgagataagataaatgtcatgtttgtcattaatggtctatttagattatgcggcagtaagtttaagcggtagtacttttgaaaaacaattaccagctaagaactttattgccaaataatttactattagttgggactagaca

SEQ ID NO: 10505 - DNA, 1386 bp, DROSOPHILA
cgattacggtcacactgcaatacttcttcgttgaattggaactatttttttgttttcgaaaacggataattgcgagcaacgactgtgtgaataaccacttgcacctgcaccgtaggagcaccacctgttgaccccacagcgaagacaatcggatcaatgtcgagtttacagcgcacgatgttgaagggcaagctgccacccacaattcctggcgggcgcattggcagagcggactcgttcaagaagtcgcgcattcgcgactacaagccgggcatgtggaacgaattctttgcggagaaggaggacgtcacggtggatgagcaacgcaccttccgcatctatcgcaccaagcaaccggagaagccgggtccagttctccttctgctccacggcggtggctactctgccctcacctgggcgcacttttgttctgaggtgaccagcatgatccactgccagtgcctgtgcatcgatatgcgaggtcatggggacagcaaggtggacgacgaggacgatctctccgctgatacgttggctaaggacatcggtgacttaatcctgaagctctatcctgaagaagtgccgcagctttttgtggttggccactcgatgggcggcgccatcgccgtccactttgcccacatggctctggtgcccaatttgattggaataaccgtcatcgatgttgtggagggcacagccatggaggcactagccagcatgcagagctttctgcgctcccgtccaaagtatttccagagtattccgaatgctatcgagtggtgcatccgaagcggccaagtgcgcaatgtggacagcgccaaagtgtccatgccgggacagataataaattgtacaacgaacaaactggcaacgaatgatctgccattaccagatgatgtattggaggaggcccaccacaacagtatgtttcccaatccgtttagcatttcggaggatgaagaatcgtcaccgccgggcgatgacgccgccgatggctcctcagaaagtgccgcagctggcgcggatttcaagaagcccaacacgaccaaatcgacaaccgaagcggccaaaaattacacctggcgcattgatctgtccaagtcggagaagtactgggtgggctggttttcggggctgagcgataagttccttaacttgcgcctgcccaagcaactactcctcgccagcatcgatggactggaccgcaccctgactgttggccagatgcagggtcgcttccagatgcaggtcttggcccgctgcggtcacgccgtgcacgaggaccgtccacacgaggtggctgaggtgattagcggctacttgatccggaatcggtttgcagaagcagccagcgaatttcgttgccacatgccgtcgtgctaa

SEQ ID NO: 10506 - protein, 402 aa, DROSOPHILA
MLKGKLPPTIPGGRIGRADSFKKSRIRDYKPGMWNEFFAEKEDVTVDEQRTFRIYRTKQPEKPGPVLLLLHGGGYSALTWAHFCSEVTSMIHCQCLCIDMRGHGDSKVDDEDDLSADTLAKDIGDLILKLYPEEVPQLFVVGHSMGGAIAVHFAHMALVPNLIGITVIDVVEGTAMEALASMQSFLRSRPKYFQSIPNAIEWCIRSGQVRNVDSAKVSMPGQIINCTTNKLATNDLPLPDDVLEEAHHNSMFPNPFSISEDEESSPPGDDAADGSSESAAAGADFKKPNTTKSTTEAAKNYTWRIDLSKSEKYWVGWFSGLSDKFLNLRLPKQLLLASIDGLDRTLTVGQMQGRFQMQVLARCGHAVHEDRPHEVAEVISGYLIRNRFAEAASEFRCHMPSC

SEQ ID NO: 10507 - DNA, 7357 bp, DROSOPHILA
ttttgaggatccttttctctttaaggcccccaaaattttcaacaggtgtcaaggaattgctacttatggttggccagaaaaagcataactatgatatattttgcaggtgtttctttgggccttgccacatttattcaatgtcaatagaacgttgtcaaacagtaaggcccgaaaataaatagtaagtctccggaattattatctttactggtcccgtaaatgttttataactttctggaattttttgtgcgctatatttttgtatatatacatacatatatcttgatttaaaggaaacacaagcaacatacattatttctttagtcactctactattactaaattaaatgcgataatattggaagctatcctcctttccattcaattgtggaagctccgcattgggataggttaagatgatcttatcgcgaggaagcacaaataatccgccttttagggggtctagcactctccaaacatcttgatggtgagatcatatagtagttagacttgctaatatcccagtatatatcgccgctctctcgtgtgggatatacatacttatattttaattttgaaagagagcgcagtcggcgttgatatcgttatctgggcagcaaaagcacacaaagtatctatatatctacgctggcaaaacagcagaagcggcgacggcgatgatcctctcatttgagatatttttgcttggcaaacattgactatatttttcggtgttttgtcaaaaatatatgacgaaagccagataattgccgtagtggtggggtcgcggtgggctggtgggcctctgccgctgcgctgccctggtacttttgtcatttgccgctggggcttttgttgtgttggtgctttgtgtgcgcgcgttgcgagcggcagactcaatatatctcaatcagtcggcgagcggccagcggacgagcggcaggcaaaaaattgaacaaaaaaaaagaaggaaatagacaaaatataaataaaaaataaaataaagcaaagcagaggcagtggacggcgtctctcggatcggttctcgcatcacgcatacgccatgtagtgccgacctgtgaaacgtgaacgtgaatgagcgaaacaaaacaaaatatgcaaaaataaatagaaacacacactttggaaatacagtttggagcggcgtcgcctggtcatgaatctcctacaaagcaagtgacaatatttaagccaacagttcgaagggaattataattaattctttgagtttttctcgcgcatatgtgtgtttggttttgcatactaagagactggctcttttcggaggcctttatttatagccgagcaataaaaataattaataagaattcgaaagacgcgagggcagcggtcgcttggcgatgattaaagtgcaagtgccagatacttgacaatgccacagacttctcgagaccccaagaccccaagacctcagagacacagagaacatcttttccccgatgaggttgtgccgagtgtagatgtgtatcttgctaaataaaataaaacatatttgtaaaataaataaaccgctgccccttgagcagcgcaccttgagacattgtgcgcgtttttcttctctggtttcagttcattatgcttcgcacttttagcgcttttccccattgttgtgccttttgtttggtctctgattttttttcgaattcgtaaataggcgatggaaaagttcccaaacaaaataaaaaatataagtctacttactacttcattgctagatcgtttagatacttctcggaattcagatttgaaatcatcatgtttgctacaaacatcgtacatacacaactcccatgatacttggatcctaactagagaacacaactatgatctttcgtattacaggaatcgcaaattgggcctcagacaatcgggatggcaatgtggcagataaggcaagtaatatgtaatatccacaccgaactatgtacatacatatataacattaattttgagccgttaaatcgagtcgtatgtgtatgaaatctgggttatttatggggagggcactgagataagagttgctacgcttcgttgttgtctaatttagttataatcgattggctggcggtgtgataaatagtaagaaatactcgtatgcatgggttcccgaacatgccacgtgtcacattctggcataaaggtgacacattttttacttttatccggtagctaagcaaattataaatgctaattagattaacaatgcgtttcggatttcaccttagaacatttaaagcttaatgggcaattgtggcccaacttttgacgcaagcgcatgcaaaatttgatcgaaaagcgagcaatattattacgaaatagggcaatgcatttgaagtgtattaatatatttcactgctgcaggtcgacaaaggtttctagttagtattattaatattagggattaatctaatacaatttaccatccacagtcagctgctgatgccgctaaactcaacaggaaggaatcgtacaaggcgcagaggaagaactacaggcgggagaagaaacgagtggccagtgagctgatgaactccctgcaggatcctgcagttatagtgctggcagattggctaaaggtgagtctaaataatattgccccattagcattttagtaatgtcaataatccaatttaggttcgtggcacactaaagtcctggacgaaactgtggtgcgttctgaagcctggcctactgctgatttacaagagccaaaagacgaagagcagccactgggtgggcacggtgatgctcacctcatgccaggtgatcgagcgcccgagcaaaaaggatggcttctgtttcaagctcttccatcccctggaacagtccatttgggcgccgcgcggtcctgacaaggaaaccattggtaaacatatgtttcaagattcgtttatacttcgttaggcttactagtttcacgataaatgaatttaatttacaattaaaactatatgagatttaatttattaaagtaactatcattctgtattgtaatattatggaagtatcaatttacttagaatacaatatgtttataaactctttaggaggcaattactaattatatttatttcgttaaggtgccgtggtccagccgttgccaaccgcttacctgatctttcgagctcccagtcaggcggccggcaagtgctggatggatgccctggagctgtccctgagatgttcggccctcctgttgcgttcgaatagcagtacgggcactgctccaacgtccagctatatcggcgaaccgctgcccgtctcccatgagacgcagtggtcggaggcggactacgagaagcacttcaacgatcacggtaagtgggcgcagttcctggcactgccatcggccgaggtggacacctcgcgctccgacaccagcctgtccgccccgcggacacccactccactgctgcagcagctctacaccagtgctgttagcaactgggagcgcaccaagcgactgccccgcttcggtcatcaatcggagcagcgaaagacctcgtacagcgatgcctccagtgcagagcagggcgtgggcgtcggattgagcctgcttcagcgcaagcggcgccacttgagccccatgagcaagtccatgtccctgggagctactctgtgcaacagcagctccagcgaggatgaggacgagggctataaccacagccagacgggccttcgtcctgtgagcgctccgcccgattgtctaatgatgccgcgctttcgtctgaacgtgaagggtgaaaacgccccctctttgctgttgttttacttagatgttcatcatttgggggaagcatattagaagactttgtattttgattgttaaatagttcatgacgaatttacatatagacttgtatattgtttattgacattactttgtaaagtgtaaatctagtgagtcatgaacaagaagcagttaatataaatcttgaatttcaatatgatattcaaaccctttgaatagtttgcatttgttataacgaaaaaaaaaaatgtttattttcaagacttccaatttgttctccccccaagttagctagtcatcatcagagattatacacacatagtagcagtggaattgatgattcaaaattattttgtatattcaccgcttggcattgggacccaatatcccaagatttttcttcgatttgatcaacacatatggtttatcctagcgctaaataccctttacagtattctgcttttgtgcccgtgcgacaggcgggaaattataccctgattttcgccagattcagactgctaaagaaatgtctgtgatttattttgatctgctcttacaatcccaactaacttgctcgaatgacttttcagatttggacgctgacagccagaatgaagcacccaatgccgtcatgtctggtctggagtcggaatccgaatcggatccggcagagccggcgcaggatgatgtcgttgatcagcagtgtgtggagacctcgtatgtgcccttcactgaggaggagtttggcgaggtgggctagcaagttctttaaagcgaatttttgacctaaccaacatatctaatctttacttccagcaaggggagcaggtagaggagttggcagaggagaacaagagcctaatttggtgcattgtcaagcaggtgcgaccgggaatggatttgagcaaggtagtactacccacatttatcctggagccccgctcattcctggacaagttatccgactcgtattaccatgcggacttgctctctaagtgtgtattcctagtttaaacctaacatcaacgatatagcaactagtaaacttttttttcgatcgcagggccgttcaggaagatgacgcgttcacacgcatgaagcttgtagtgcaatggtacctgtccagcttttacaaaaaacccaagggcctaaagaagccctacaatccgattctgggcgagaggttccgttgctattggcagcatcccagtggcagccgaaccttttatattgcagagcaggtgtcgcaccatccgcccgtatcggcattctacgtgacgaaccgcgaggacggcttcagcatcacctgctccatcctggcgaaatcgaagttctacggcaacagcacttctgcggtgcttgagggcgctgccacaatgacgttgctgccgcgcggtgagtgttacacggccacaacgccgtacgcccactgcaagggcatcctgatgggcacgctctccatggagctgggtggcaagatcaacatcgagtgtgagaacaccggttacaggacggagctggaattcaagctgaagccgttcctcggaggagcggacgccaccaatgtggtagtcggcaagatcaagctgggcaaggagacgctggccactatcaacggtcactgggacaaggagtgtcgcgtaaaggactccaagacgggagaggaaacggtattgttcaaggtggatgctgagacacgttccaagcgtcttacccggtacatggtgccgctggacctacaagaggccaacgaatcccagcgcctgtggcagcgagtatccgaagcgattgccaatgaggatcaggttgcggccacagaggagaagaccgtgctcgaggagcgccagcgagctgatgccaaggagcgactcagctccgactctgtccatatgcccgatctcttcgagctggacagctacggtcaatggctgtacaagtacgccgatctgcggccctgggactcgcgcaacgatgtccgccagtacgagtgtcagttcaaggtcctgacccagacgcgtcacaagtccgtgcccattgtccatggggccgagatgatccaccccctgcgcagctccatcgagacattatcccgcacccaaagacaatcgccagccggacagcccttaccgccgggcggctccgctgtgcccaaggccaagaataagagcttggtgctggcgccgcgcgacactaactcggactccagtcagtcgccgcagggagcggtcaagcgcagctcctccagcgccattaagcagtaagtagtttgtttgcgcgcaaacctttgagaataatttcatatctaatggttatggttttccccttgtagacttgctttggccgtggaccaggtgaaccgggtgttggagcagcatacccgacagctgaatgagatcagccagcgcctggagcgcatgcagtactcgcccccgcctagtagcatgagtgcgcattcgcttcatatgttgggcggcggcgtatcgcagtcgacggtgatcaagtcgctaatctacgctctgatcgggctggctttcagcctgatcctgcgctggctgttcaagtagattggcgaagtcgttgttggtgtcatttcgtttaggattatgaaaagttttggtcaacctatagatcgatatgcatatatatatatatataaatatatatctatatatacatacataccctagagtacagacaacgtatatatactttactgaattgtacatttggtcctactcaaatgccttcgcacgctgccagatatataagcccgaccgaggcgcgtggccagaacatccgttgtgagaaagtctaatcacgaactatgtctaggattaagtgtttgtcttatgtaagtcccagcaatccaagtctctcccgcagacaaagtccatatgcaaatctcttcccttttagccttgggcattcctttctcaagataaaacgtctgggtaggttagtttgtcggagatatacatttatatcaaaatatacacatacgtacgagtagatgcaccagatttcgtaaaaattccaatttaaacgatgctactacaaagctagttcgcttttcctttccttcgatagacagttaatattaaatgacacgatttaggatgaacgacgaacgaacaatgctcgagaggctctgccccataaagcaccacttatacacagtgcaacataccttagagatttaatgcgagaagtgcttatagtaattacttttagtgtctcttatacacgaattgtttttcctcttcccaatacctgcatacttagaatttaataaactctccccatttcaaatcaaaacagacgtgttttcatctgggcaaagtggtaattaatagctgctatcgttaacaatataataaaaagtatagttaaagtttctgtttgcatgttttattgttgtttttgctcttcgcttcgcttacatttacaagtagtttatatatatttatatatatactatatattctctacaacatttacgatcgatctgtatcaattcaattatagctggttttactcgttttacttcgttctccttatcgattc

SEQ ID NO: 10508 - DNA, 2632 bp, DROSOPHILA
ataaagcaaagcagaggcagtggacggcgtctctcggatcggttctcgcatcacgcatacgccatgtagtgccgacctgtgaaacgtgaacgtgaatgagcgaaacaaaacaaaatatgcaaaaataaatagaaacacacactttggaaatacagtttggagcggcgtcgcctggtcatgaatctcctacaaagcaagaatcgcaaattgggcctcagacaatcgggatggcaatgtggcagataagtcagctgctgatgccgctaaactcaacaggaaggaatcgtacaaggcgcagaggaagaactacaggcgggagaagaaacgagtggccagtgagctgatgaactccctgcaggatcctgcagttatagtgctggcagattggctaaaggttcgtggcacactaaagtcctggacgaaactgtggtgcgttctgaagcctggcctactgctgatttacaagagccaaaagacgaagagcagccactgggtgggcacggtgatgctcacctcatgccaggtgatcgagcgcccgagcaaaaaggatggcttctgtttcaagctcttccatcccctggaacagtccatttgggcgccgcgcggtcctgacaaggaaaccattggtgccgtggtccagccgttgccaaccgcttacctgatctttcgagctcccagtcaggcggccggcaagtgctggatggatgccctggagctgtccctgagatgttcggccctcctgttgcgttcgaatagcagtacgggcactgctccaacgtccagctatatcggcgaaccgctgcccgtctcccatgagacgcagtggtcggaggcggactacgagaagcacttcaacgatcacgatttggacgctgacagccagaatgaagcacccaatgccgtcatgtctggtctggagtcggaatccgaatcggatccggcagagccggcgcaggatgatgtcgttgatcagcagtgtgtggagacctcgtatgtgcccttcactgaggaggagtttggcgagcaaggggagcaggtagaggagttggcagaggagaacaagagcctaatttggtgcattgtcaagcaggtgcgaccgggaatggatttgagcaaggtagtactacccacatttatcctggagccccgctcattcctggacaagttatccgactcgtattaccatgcggacttgctctctaaggccgttcaggaagatgacgcgttcacacgcatgaagcttgtagtgcaatggtacctgtccagcttttacaaaaaacccaagggcctaaagaagccctacaatccgattctgggcgagaggttccgttgctattggcagcatcccagtggcagccgaaccttttatattgcagagcaggtgtcgcaccatccgcccgtatcggcattctacgtgacgaaccgcgaggacggcttcagcatcacctgctccatcctggcgaaatcgaagttctacggcaacagcacttctgcggtgcttgagggcgctgccacaatgacgttgctgccgcgcggtgagtgttacacggccacaacgccgtacgcccactgcaagggcatcctgatgggcacgctctccatggagctgggtggcaagatcaacatcgagtgtgagaacaccggttacaggacggagctggaattcaagctgaagccgttcctcggaggagcggacgccaccaatgtggtagtcggcaagatcaagctgggcaaggagacgctggccactatcaacggtcactgggacaaggagtgtcgcgtaaaggactccaagacgggagaggaaacggtattgttcaaggtggatgctgagacacgttccaagcgtcttacccggtacatggtgccgctggacctacaagaggccaacgaatcccagcgcctgtggcagcgagtatccgaagcgattgccaatgaggatcaggttgcggccacagaggagaagaccgtgctcgaggagcgccagcgagctgatgccaaggagcgactcagctccgactctgtccatatgcccgatctcttcgagctggacagctacggtcaatggctgtacaagtacgccgatctgcggccctgggactcgcgcaacgatgtccgccagtacgagtgtcagttcaaggtcctgacccagacgcgtcacaagtccgtgcccattgtccatggggccgagatgatccaccccctgcgcagctccatcgagacattatcccgcacccaaagacaatcgccagccggacagcccttaccgccgggcggctccgctgtgcccaaggccaagaataagagcttggtgctggcgccgcgcgacactaactcggactccagtcagtcgccgcagggagcggtcaagcgcagctcctccagcgccattaagcaacttgctttggccgtggaccaggtgaaccgggtgttggagcagcatacccgacagctgaatgagatcagccagcgcctggagcgcatgcagtactcgcccccgcctagtagcatgagtgcgcattcgcttcatatgttgggcggcggcgtatcgcagtcgacggtgatcaagtcgctaatctacgctctgatcgggctggctttcagcctgatcctgcgctggctgttcaagtag

SEQ ID NO: 10509 - protein, 762 aa, DROSOPHILA
MNSLQDPAVIVLADWLKVRGTLKSWTKLWCVLKPGLLLIYKSQKTKSSHWVGTVMLTSCQVIERPSKKDGFCFKLFHPLEQSIWAPRGPDKETIGAVVQPLPTAYLIFRAPSQAAGKCWMDALELSLRCSALLLRSNSSTGTAPTSSYIGEPLPVSHETQWSEADYEKHFNDHDLDADSQNEAPNAVMSGLESESESDPAEPAQDDVVDQQCVETSYVPFTEEEFGEQGEQVEELAEENKSLIWCIVKQVRPGMDLSKVVLPTFILEPRSFLDKLSDSYYHADLLSKAVQEDDAFTRMKLVVQWYLSSFYKKPKGLKKPYNPILGERFRCYWQHPSGSRTFYIAEQVSHHPPVSAFYVTNREDGFSITCSILAKSKFYGNSTSAVLEGAATMTLLPRGECYTATTPYAHCKGILMGTLSMELGGKINIECENTGYRTELEFKLKPFLGGADATNVVVGKIKLGKETLATINGHWDKECRVKDSKTGEETVLFKVDAETRSKRLTRYMVPLDLQEANESQRLWQRVSEAIANEDQVAATEEKTVLEERQRADAKERLSSDSVHMPDLFELDSYGQWLYKYADLRPWDSRNDVRQYECQFKVLTQTRHKSVPIVHGAEMIHPLRSSIETLSRTQRQSPAGQPLPPGGSAVPKAKNKSLVLAPRDTNSDSSQSPQGAVKRSSSSAIKQLALAVDQVNRVLEQHTRQLNEISQRLERMQYSPPPSSMSAHSLHMLGGGVSQSTVIKSLIYALIGLAFSLILRWLFK

SEQ ID NO: 10510 - DNA, 6621 bp, DROSOPHILA
cagacaataatgggaatcagacaaaaacatgtgccataacaagccaccccccatcggcggtaataactcgtcttcacacctctcaggctgaactttaaccctggcgggaaagaaaacattaaataacccgccaatgtccgcctaatggaatatgctgaggcattttgaaaataaccatacggacgacaaacaaacatttcgtcctgtcatgcgctaattatgagcagccaaccttttgacaagccccctgagtggaaatttttaaagtagcagcacgtaaatgggcttgccggaaaacaaaccccatgaataggcaacatttttaccaatttggctggataccctactcgaaaacgatgcaataaaaacaaagtgatttatataaataaaaatatttaaagtaaagttagtattactatatgtagctattctgtagtgagtgaactatattgacaatactaacatttaaaataattacttttaagcatccattgctgttctattcccacatcactcaaaaatatgcataccctttcccaggacccataaaaatgagcagaaatattccgtttgcctcggggagaatgggaatagctttccaccatcgaacatccgagaaaaacacgaaaaagaaaagcgtgagccaaaattgaacggaaaagtacagcgtgaaatttgcatgagacaaatgtggaaaagtactcacaactactctgcgagtggagcaaaggaagtgaaaaatggtaaaagtatcagcgggaaaaataagtaggaaagtatttggcttaagtcaaccagcaattttgctttcaaattaagaaagagccaagttaaaaagttaaccaaacaattaaagccctaacataaaagttcgcctaacaaaataagttggctctttaaagcaagagtaacgtaatgcgatgatatatttttctggctagttttagtctaatttattaattagcttaataattacatgaattcttgtgtatcacaatacttaagatgagcgaagctcctcagaatcatccggctcttccgaatagtccacgttcttctcaaatagatagcactgctgccagttggagcccttgaacttgccagagaaaacgggctgccagttccaaatgagatgtctggtttttaatttgtcactttcgaactgattgttgttgcggcggcagaagtcaacaaaccgactgccaaagatttgggacaaatcgatacccatgcgagaatgcgccatgtaacatttgtccggtgagttgaaaagctgctcaaatgcagcgcgctcaggatgaaactgacatccaaagatgggaaaacgcctgtgctcgacaatcgtgatgaattccagtcctgaagtgtccttctgagtggccaggggatgccaatccttagctagaccataggattccaaactctctttagtgatgcaataccgatgctgatggcaggcaaatgggtgcttctccatctcatcggcaaccgatttcggcagacttccaagcagttgtgattgttgatagtcatcggtcagagtaactggcatcgcctccctcatgggctgacaggcgattcgaacattcggtgcttcggcagcgtgaataaggatcaactggaagccaagacaagttccccaaacgggaaagtatgcgccacgatcatccaacttcttcgcccgcatattacgctccatagccaattggtagatgagctcggcactccggacgcaatcgctggtcacatccggattggcttgcctatcagcctcgtcgatgaacacggctccacctggcagaagaatgccatttaactggctcatcatcaacgcatagtaagctcgttctcggccgatcctaaaaataaataattaaaaaatttcactattcaacgtatgtgtttatgatatttaaatgcccccgcgttttcaaatgaaatcgaaagcactttcgtttgccgactacaataaatttgccttaaatatgaacacctctccccgctcatgcgttaatcgcactgcattctgcaaaacttattttggcaaactgccagatgaggtaattaattctcgtgcatcgtttgtttatacaatttgtttattggtaaccagatgggcacacccaatgccccaatggcatccaagtgcttcaaattggcagcgggcagataaagtgtggcccagtgacttggcgaaatcgatgcacatgatgcttttgcagatttgagacaccccaatcatacgaatcgcttttgccctatttgttggtacgtgactttcgatctaaatgcttggaatgcttgcggctaatgaaaatatggttatacacattaaaccatacaaaaagattacgaattgattctgtccccttttatatttgtcatattatttcctagcaatgtaaaaattggtaaaataaaagtcaaagtgttgcaaaatgattgaaaatttataacttaccaaatgggaaccacatgcgcaccggatgcctccaaaaatttgacataggatgcagccaaatagctgtgatatgcaccactaaagttctgctgcagttgcgtggcgatatcgatgcacatcacaccaactgtcggtacgcggttgaggtacggcgcatcggtataagcgctttccgccatcgtcttcttcggatttcagactacgagctagtggccagatataaatgccatacattcctatttattcgggcacgagcagatagaaatgagtctcgcattcgagtcggcgagagaaaaacaataacctagccaatatattgtacttttgcaaccattgtcgttggaattataagtaagataaaatttatcatgagccaagctatagtggctaagtaatgtaaatgatttatatgaattataaatctataattataaatatatgaattatgatattatgattacgtttcctaaaaagggtaatagtacgctagtcaattattgtaaattaaataatttcgtttaaaaaccaaaaaaaaaaatgaattatatattatatgtataataaatagatgatatacttaatacacttcaaagctataaaaaaaagcgtttccgaccctattaactatatacatttttgatcggaatcacttgaccaatggatctttccttgcccgtccgcaacaaagtagaaaaacgccaacgttagcttaagagtttaatgattatgctgatccagatgcttttcctggtctagaatatcaggggtcagtgggaagttttaggtaaaactaaaaaaaattcccttgtgacataaaactcccagctcatgctacaaaaagattaaagggtggccatacaaggagacttcttatatgctcatttgattcattcgtatatgcagatgatattaacatatggatgcacttcgtttttatgtatgtaagttttattttcttaattatcacttattatgctaaactattcacttatatataaaaaaggaaaatatacatactttatatactttacaatagcattgcaaagagagatggctttcttttaatatctaattaaaatttgactatgttttaattccgttgaattttagtcggtgttattgatatgatattgtttttattattaaaatgcttcttaaaatatcttaacatgtataatgtcgcagaatctagtataccaatcaatcttacaatcttacaatcttaccatacgagtaagggatataaatatgttcaccagtaaacataaactattatattagtctcttgatttggcaagaatatttaacgcttaaagatagaattttgttttgcttaaaattatccatctacatttttttaattaaatagctatgagcaattaggtaatatactgagtaattagtatctgatagtcgaggtaatctcttggcatataatctcctcatgccaaccatatccaaaaaacaaaaattaccaattttacccacgacaacaaggtcaatatcttctgatattacgctaatagtaagtattttgattagaaatcacgctatcaagctatctattgaagattaagttataaaatcgatcaagaaataatcccgaaaatatcgtgtgcgtaaatgatgtgatatttgtgaactctacgcaaagttcaaagtcctggccacaactttggtgagcaaagcagtcaattaattaattgataagagaaccagagtcaggagcaatccacttagtaaaggcatagtggtagaaccgtcaccgcctggtacaacaatgggaatgtagccgccactactacccccatcgttattgccgccctcatcagggatctccggaatttcgggtatttccatttcaacattggtaaataggtattgctgtatgtacgaggagcccagaatcgaagtatactccggcttataattgtagatgagcgtcctggcctgctccgtggcattcgaaaagctctgattactctccctcgcctcactcacaaagaaatcggcgaagaattgaccacttaacacagcagctgcggtatggggaatgcttgtctttgtaaactcgtacagcggtttctccggatggaattgtactccatagaaggggtactttatgtgctctacggtggaaataaactcaacgccattccagtcatgatttagggacataacccgccaagtttcgtttagtagatcccgctcgaagtctttttccgtatagcagaactgatgccagtgataggtcacattctctttgaccatggtgtccaccacatcatcggtgatggatgcaaacaggcggctcttcttatagtctagataaaaatatgtagattcagcattcggaatatataaattcatataacaaactataccttctttaaactccataggcacggccatgccggtcgcttcgcaattaatgcggtgttccgtttcgttggccagcttgtaaaccaatagttccatgcccagacaagtgccccacaccggcataaagacgccctgatcatttagttcaatggccaagtggatgaggtgttcgcccgcatccgcatacccattactctgattaaaccaagtggctccaccgggcaacaagactctattgaagtagcaataaatttagatgcgggaacttcctagaaagtatatttatacttacccatttatcttgcgcatgagatcgtcgtagtagctgcgattgcgaccgatcctgtcaaaggtatttgtatgaaaattgtttattaattgatttcaggcaatcttatcaatacaacgaaatttcggtctccaaatcaaatttactctctaatgaatttatgttctataaatacacgtgtcggaatacttaatgccaccctaccctattcgaccttatcgagcagtggcagaattaccggtcacgataagatctttgaatctttctgctcacttaccaaatcggcactactcgggctccagctccttcgagatacttcacatacgaggcggctatatagctggtcttgttatcaaaatgtctcgagatcaaaccatcgacgtaaacttcctgtgtgagaacccctatgatgggcgatgagatgccagcctctgaagcggccaacagagctccgatgaagatcagcaagctgatcgagaacttctgcattttgttagatcttaaaacgagtattttatcttccgaaatatccgtttttctttggttcggttggaggtatcttcagtttcctaagtaccttgttatgagctattgattattccacaggtaattctttaaaaacacgctaagtcggtaagctagctttctcagggaattctttcttagcttgttgttttaattattcgcaagttttccggctgccagaagtatttcccaacgggaagtcttggcaagggcacaggtgagtccaacctcggtgaccaattaataggaactgtccgctgaggcaacagtcgatttgaatttatataaggtgcgacgattttcctcacctatacaaatggctcaggctgtgtgcgtgggcatgagtttgcgatgtgtgatttctagggccttcggggggtgtacccctggcgacttgagtccagcagatagtactgcgattaattgattatattttttttccaaagtattgtgaccgtggcacagggtgctcaatgagaaggggaattactcctggggcttccatcgaaagttggataaaaacctgttttattcgggcactattggataattaactaattgcatcgatcataactgttcagtcgcgatttttattcacattataaaacaaacgaagtctgtgttattgtttacttaacagctgatagatagcaacaggcggacgtgtgtgtgtgcgatcagaaccgattgccaagtcgattaatgccaattcagctgcccagcaaactttgttgcttctgtttaatgctgttctgaatactcagcaggtacttcatctctacgagggtttctttgactcccgaaagatctttgctatcgaaaagggcatttaacttccgggccatctcctccagttccttgatgagctgaatatttaaattctccagcgtttgggtgtcttccgcatcctccacctcctcgttccgctccatcatggccatgagaaactctttgttaagagcgc

SEQ ID NO: 10511 - DNA, 2019 bp, DROSOPHILA
atgcagaagttctcgatcagcttgctgatcttcatcggagctctgttggccgcttcagaggctggcatctcatcgcccatcataggggttctcacacaggaagtttacgtcgatggtttgatctcgagacattttgataacaagaccagctatatagccgcctcgatcggtcgcaatcgcagctactacgacgatctcatgcgcaagataaatggagtcttgttgcccggtggagccacttggtttaatcagagtaatgggtatgcggatgcgggcgaacacctcatccacttggccattgaactaaatgatcagggcgtctttatgccggtgtggggcacttgtctgggcatggaactattggtttacaagctggccaacgaaacggaacaccgcattaattgcgaagcgaccggcatggccgtgcctatggagtttaaagaagactataagaagagccgcctgtttgcatccatcaccgatgatgtggtggacaccatggtcaaagagaatgtgacctatcactggcatcagttctgctatacggaaaaagacttcgagcgggatctactaaacgaaacttggcgggttatgtccctaaatcatgactggaatggcgttgagtttatttccaccgtagagcacataaagtaccccttctatggagtacaattccatccggagaaaccgctgtacgagtttacaaagacaagcattccccataccgcagctgctgtgttaagtggtcaattcttcgccgatttctttgtgagtgaggcgagggagagtaatcagagcttttcgaatgccacggagcaggccaggacgctcatctacaattataagccggagtatacttcgattctgggctcctcgtacatacagcaatacctatttaccaatgttgaaatggaaatacccgaaattccggagatccctgatgagggcggcaataacgatgggggtagtagtggcggctacattcccattgttgtaccaggcggtgacggttctaccactatgcctttactaattggtgtgatgtgcatcgatatcgccacgcaactgcagcagaactttagtggtgcatatcacagctatttggctgcatcctatgtcaaatttttggaggcatccggtgcgcatgtggttcccatttggatcggccgagaacgagcttactatgcgttgatgatgagccagttaaatggcattcttctgccaggtggagccgtgttcatcgacgaggctgataggcaagccaatccggatgtgaccagcgattgcgtccggagtgccgagctcatctaccaattggctatggagcgtaatatgcgggcgaagaagttggatgatcgtggcgcatactttcccgtttggggaacttgtcttggcttccagttgatccttattcacgctgccgaagcaccgaatgttcgaatcgcctgtcagcccatgagggaggcgatgccagttactctgaccgatgactatcaacaatcacaactgcttggaagtctgccgaaatcggttgccgatgagatggagaagcacccatttgcctgccatcagcatcggtattgcatcactaaagagagtttggaatcctatggtctagctaaggattggcatcccctggccactcagaaggacacttcaggactggaattcatcacgattgtcgagcacaggcgttttcccatctttggatgtcagtttcatcctgagcgcgctgcatttgagcagcttttcaactcaccggacaaatgttacatggcgcattctcgcatgggtatcgatttgtcccaaatctttggcagtcggtttgttgacttctgccgccgcaacaacaatcagttcgaaagtgacaaattaaaaaccagacatctcatttggaactggcagcccgttttctctggcaagttcaagggctccaactggcagcagtgctatctatttgagaagaacgtggactattcggaagagccggatgattctgaggagcttcgctcatcttaa

SEQ ID NO: 10512 - protein, 672 aa, DROSOPHILA
MQKFSISLLIFIGALLAASEAGISSPIIGVLTQEVYVDGLISRHFDNKTSYIAASIGRNRSYYDDLMRKINGVLLPGGATWFNQSNGYADAGEHLIHLAIELNDQGVFMPVWGTCLGMELLVYKLANETEHRINCEATGMAVPMEFKEDYKKSRLFASITDDVVDTMVKENVTYHWHQFCYTEKDFERDLLNETWRVMSLNHDWNGVEFISTVEHIKYPFYGVQFHPEKPLYEFTKTSIPHTAAAVLSGQFFADFFVSEARESNQSFSNATEQARTLIYNYKPEYTSILGSSYIQQYLFTNVEMEIPEIPEIPDEGGNNDGGSSGGYIPIVVPGGDGSTTMPLLIGVMCIDIATQLQQNFSGAYHSYLAASYVKFLEASGAHVVPIWIGRERAYYALMMSQLNGILLPGGAVFIDEADRQANPDVTSDCVRSAELIYQLAMERNMRAKKLDDRGAYFPVWGTCLGFQLILIHAAEAPNVRIACQPMREAMPVTLTDDYQQSQLLGSLPKSVADEMEKHPFACHQHRYCITKESLESYGLAKDWHPLATQKDTSGLEFITIVEHRRFPIFGCQFHPERAAFEQLFNSPDKCYMAHSRMGIDLSQIFGSRFVDFCRRNNNQFESDKLKTRHLIWNWQPVFSGKFKGSNWQQCYLFEKNVDYSEEPDDSEELRSS

SEQ ID NO: 10513 - DNA, 4590 bp, DROSOPHILA
acgatttcggtggctgaatgagtgacaatgccaatacgctggccacgcacatgtgccagtgtgcactgcgagaaatagtaaagcgaattttcgaaaaaaaaaataaattaaataatatgaattatttaactaaaatttttttggtttaaacttattcattaaattgcattatttgtactacacaggtaagtatttggcttacaaatcgaattacaaacttataaataaaagggtatgtattttcatttactgctagattgaaatatgactgctatcgatcagatataataaaatactctctcaaatcagcatgattcaaattgggacagtatatgaatcagaaaattaaaatgcaactcgcattgcatggtagaactggtggaatttcccaaacgtttgttcacattctatagaaagagaaataataaattgcacttttaggcacaaaaatatttgaatattaaattcatattaatatggatccaattagatgaagggatattaccttcatctaattggatccatattaatatgaatttctagtttaagctgcgtttcagatcatatcacgttaacagctccaaatatttccctcagtgctaattggggaattacccgaaccttttgcgaatccgtaacgctcttgggccgtagatttattcaactattttgtgccgtgccggtagatgcgagaaaatatctcacttgatggttaagtagttgaggtgacatatgaacagacagccagacagccggtggctcagggccccgcccagatttggaatacatttcgaccggccgactcgtcttgggttgtattggcttgtcttgtctctttggcccataagtaaccatttatgaattaagcaaacatctgtgttcggggcatctcatctcgttgactggagggagcataacatagtttagaactacacaaacgcacacggctgttggccggctataaattagtgcctcgcctcgatttgggacatcagttgagtttcgttcaggttgccggcagcatcagtagcaccactagcatcaccagtatcaacatgaagctgtacgtttgcgtttcgctggcccttttggccctttcggcaccagttccttccgatgccctgttgggcgccaaattggccctgctcaaggccattggcggcggtctgggtggcggcagctccggcggcggtggctactccaccggcagtggtggctatggaggcggctatggcagcggtggatactccggcggctacaatcagggatattacaaccagcccagcagaccggtgtacaactccgaatacggcagttcctcatcctcttccgccagcagcagcagcagctatggaggcagctatggcggtggttatggcggcggctacggtggtggcgagcaggtcatcaaggtcatcaaggtggtggagcagccctcttactcttacggacggtcctctggctatggtggcaactatggaggatactcgtccagtgcctcgtccagcgccagcgccaactcatactccgctccctctgtgagctactctgctccagctcccgctgtgacctattccgctcctgcacccgctgtgagctactctgccccagctcccgctgtgacctactccgctcctgctcctgccccagctgtgacctactctgctccagctccggtggtgcgcgttcaggccgctccagctgtgacctactccgctcctgctcctgctccagctgtgacctactccgctcctgctcctgctccagctgtgacctactccgctcctgcccccgctcctgtggtgcgagtacaggctgctcccgctgttacctactccgctcccgctcccgctgttacctactccgctcccgctcccgctgtgacctactccggtcccgctcctgctgtaacctactccgctcctgctccagttccagtggtgcgttactcagccccagctccagctcccatcagctacgcccctgctcccgtgtcctacgccccgcagccacagagccaacaggtggtgaagaccatcaagctgatcgtcgatgaggatcgtgcacccgcccaggtttacggaccaccagcggtggagtccagctactccagtgcttcctcctccgctgccgcttccgctggtggatacaacggtggctacaacggtggatacaacggtggctacaacggtggctacaatggcggttccaatagcggcttctcaggtggattcaatggcggctggaagcgtggcggtatctttgagaagctggtgggctgctaggtgctcatgtaaccataactcaaagccactcaaggactccaaaatctaacctaacctaaccgtactcaactattttttttctagttctaaaacgaatacctttatttttttgttcgatcgatgtgtacataaaataaatcaatatacccgatatcagttctttataactttatactcttatgtaatcgccaatacctcagtcaaattcgtctgtctgttagcttatatgtatgtagatgcatatatctttttttttgggattttttagggttcattgtgttattgattcttagccaaattaacaccaagttgctaactcccaacgaatcggttgcgattcatattccaattccggatctgaagagatcgcggagagggccctgagaacaaggttaagatcgagggacagaaagattctggtttatagggttctgatttgcatttgaatatagtatgtgcttgggggtttttttctaataaacagaaaaaatgttaatcaaattgctaaattgtgtgggagatgtttatatacatttaaaaaaatcatatacctttgatatgcctgctttaaaattttttagaatcttttaggcttgcattaaaatgaattaagctctacatataaacaatgatggactaaatcaaactatatttcatattaattgaataattgaatcaaagtatctatgaaaaattctaatagattccacgatctttatcggctaagtgtcatgcgatttgaggtgcagtcatccaaaatcgtcaccgatgggcgttcatccaagaccaagaacatccgttcgccggcgcatataaaagctgtgatcccctcgaagaatcggccaaacaaaatgcaggtgcttaatgtgcaattgtttatttgggcaatagtttttgcggctttagtacgtggtcatgctgtggagaaggagcagccggcgagccacggtgcgtatgagcgacgctatttgatgtacttcccttatttgtgtttttattatatctgcagcttatggaccacccatacacatcagctcaggtgtactccagctagctccggatacggaacaaccccatctgctgctggtgcccagctcgtactccatgtcactgggaaatccctggccgcattactatgtggacaccttgaccgcatcgcatttgccacattcagtgattccatcgattccatcgataccttcgataccttcgatccacgaaccccgcatcgtggtcaatgataatgtggacttttcgcaactcaaattgccccagcatcaagttgtccactcccacggccgctaaatgggttcattgcgaaacaatttataaactatcataaataactacttttcggcggtcttattactttaagttaagtttttttttgtttgttttcaatttattattcaataaaattgctataaaatatattggtttttaaggttgacgaatgcatggacaatatttatatgtgtgccaaaaacacaatttttaaatatgtaacatttttaaacatgcagattttgtaattaattaaaatccaggacatctttttaacttatttaaattttcataaatacttgaccatatttatttataggttgtgcccccaagagagcttttcaattcaatttaacttacatttattttaataatcgttaaaaaaaaaacacttttataataatataatctttgagcattttgataggtcttgtgtgcgactatcacagtcttagtagagatgttccagctggtggtgctccgccaggtggtggtcgtgctccgcctggtgctccacctgctgttcgagtgcctggtgctggatgtggtgcagttcgtgctcatcccgatccttgaactcgtacagggtgctgtagctgaaggcgcccttgccatgatcgatgccgggcacagccttgtggtcctcgtagtgggagtgcaactcgctggcctcggcgtactcctcgccggcatcgctgctgccgtaatctgacgggaagctctcctcgcccaggtgatcgccgagggagcccaagtgatccgcctccgcggaggctccgaattcgtgcgaagatgagctgaagtccagcttggacaaggcctcgccgccagtcagaccgccggcgtagtggcccaaaagtcccgccgaatggaccactgcattggaggacacatcatcccccaaaggataacattggatgcctagcagcagctgacccagaaggatcatcagtttcaggcgataggtgaacatggttggatgtggtagaagtgttttaaccgacgcggcgaaatgtttcga

SEQ ID NO: 10514 - DNA, 1786 bp, DROSOPHILA
tttcgttcaggttgccggcagcatcagtagcaccactagcatcaccagtatcaacatgaagctgtacgtttgcgtttcgctggcccttttggccctttcggcaccagttccttccgatgccctgttgggcgccaaattggccctgctcaaggccattggcggcggtctgggtggcggcagctccggcggcggtggctactccaccggcagtggtggctatggaggcggctatggcagcggtggatactccggcggctacaatcagggatattacaaccagcccagcagaccggtgtacaactccgaatacggcagttcctcatcctcttccgccagcagcagcagcagctatggaggcagctatggcggtggttatggcggcggctacggtggtggcgagcaggtcatcaaggtcatcaaggtggtggagcagccctcttactcttacggacggtcctctggctatggtggcaactatggaggatactcgtccagtgcctcgtccagcgccagcgccaactcatactccgctccctctgtgagctactctgctccagctcccgctgtgacctattccgctcctgcacccgctgtgagctactctgccccagctcccgctgtgacctactccgctcctgctcctgccccagctgtgacctactctgctccagctccggtggtgcgcgttcaggccgctccagctgtgacctactccgctcctgctcctgctccagctgtgacctactccgctcctgctcctgctccagctgtgacctactccgctcctgcccccgctcctgtggtgcgagtacaggctgctcccgctgttacctactccgctcccgctcccgctgttacctactccgctcccgctcccgctgtgacctactccggtcccgctcctgctgtaacctactccgctcctgctccagttccagtggtgcgttactcagccccagctccagctcccatcagctacgcccctgctcccgtgtcctacgccccgcagccacagagccaacaggtggtgaagaccatcaagctgatcgtcgatgaggatcgtgcacccgcccaggtttacggaccaccagcggtggagtccagctactccagtgcttcctcctccgctgccgcttccgctggtggatacaacggtggctacaacggtggatacaacggtggctacaacggtggctacaatggcggttccaatagcggcttctcaggtggattcaatggcggctggaagcgtggcggtatctttgagaagctgatgcgatttgaggtgcagtcatccaaaatcgtcaccgatgggcgttcatccaagaccaagaacatccgttcgccggcgcatataaaagctgtgatcccctcgaagaatcggccaaacaaaatgcaggtgcttaatgtgcaattgtttatttgggcaatagtttttgcggctttagtacgtggtcatgctgtggagaaggagcagccggcgagccacgcttatggaccacccatacacatcagctcaggtgtactccagctagctccggatacggaacaaccccatctgctgctggtgcccagctcgtactccatgtcactgggaaatccctggccgcattactatgtggacaccttgaccgcatcgcatttgccacattcagtgattccatcgattccatcgataccttcgataccttcgatccacgaaccccgcatcgtggtcaatgataatgtggacttttcgcaactcaaattgccccagcatcaagttgtccactcccacggccgctaa

SEQ ID NO: 10515 - protein, 576 aa, DROSOPHILA
MKLYVCVSLALLALSAPVPSDALLGAKLALLKAIGGGLGGGSSGGGGYSTGSGGYGGGYGSGGYSGGYNQGYYNQPSRPVYNSEYGSSSSSSASSSSSYGGSYGGGYGGGYGGGEQVIKVIKVVEQPSYSYGRSSGYGGNYGGYSSSASSSASANSYSAPSVSYSAPAPAVTYSAPAPAVSYSAPAPAVTYSAPAPAPAVTYSAPAPVVRVQAAPAVTYSAPAPAPAVTYSAPAPAPAVTYSAPAPAPVVRVQAAPAVTYSAPAPAVTYSAPAPAVTYSGPAPAVTYSAPAPVPVVRYSAPAPAPISYAPAPVSYAPQPQSQQVVKTIKLIVDEDRAPAQVYGPPAVESSYSSASSSAAASAGGYNGGYNGGYNGGYNGGYNGGSNSGFSGGFNGGWKRGGIFEKLMRFEVQSSKIVTDGRSSKTKNIRSPAHIKAVIPSKNRPNKMQVLNVQLFIWAIVFAALVRGHAVEKEQPASHAYGPPIHISSGVLQLAPDTEQPHLLLVPSSYSMSLGNPWPHYYVDTLTASHLPHSVIPSIPSIPSIPSIHEPRIVVNDNVDFSQLKLPQHQVVHSHGR

SEQ ID NO: 10516 - DNA, 2514 bp, DROSOPHILA
cgcagtttgcagttggtggaatatctgatggaacagatggaccaacaaaatcaatggacgtacataatagaggttgagcaggatttcggacgaggtccttctgctgctttaacgatgttaaactttcagagccactcaaaatgtgttgcattacgaatttccgcttccgtttgcgtcagcggtggcaaattaaatttgcagctaaagttgggttacagccaagtgcctcattcgacaaaatgctgcagtggcatacttgtcaatcttttgtcaattaacaacccgaaggcaggacaattgaatgtgggttgaaatcggattggttttttgagacaatgccaaattacacgacctccaagccaaagccactggagtttgtcatcagattgtttgcaagatgtcatacaagcaattacaaaataattgatcatatagaatctattgtgcgaaggaataacaaaaggtacacacgacttgtgtgctttaaactgactcaatatgtggaagtttaattcgaatgccctataaaacaatatcgcaagctagcagagtgcgatatttagtaataataagactttaataattcgttgtcttgtcgaaatataataccacatgtatataggtcactttaccatttataagcttgtgtaacaatgttggagtagcgagaagtaacagagtaaggtatgcaaaaatatttgcatgccctgtgaagcaagaaaagacacccaaacgagaggaaaaacagtttgacattgacattggaaggagccaaaaagagagagaaccgcagccaggacatcgagagctttgcaagctctctcctcctagcggtataaaagccacttcctggcgagtcgagactgcatttgccaacaaatcgcgaaaggggcaggacgagcccaactaagagtagcggtgatagtcgaacggcacgcgtttcatcctcggttatttgtattccgaatatacccatgtagtttttcttatgttggctaacatgcctggcctgaaggagcagccccatccgatgcgtagactcattagacagctatcaaaccatgttctggacggcggtagcctcctccacactctcgtccaacagtgccgagagctcggcgggattggccagtgcggcgcccagttaccagcagcagcacacgaagccatcgccgctgagagcctccgccagcagttggcagcttagtaatgcagcattcaagtcgcgcctgcaacagcaacagctactgcaccagcaccagcaacagatacagcagcagcagcacgagcagcagcaacaggagcagcagcagcaacaggagcagcagcagcagcagcagcagcacgagggcgcatctcatcaggaagtgcaaccgaatagggaggaaagacgggtggtggggcaaaagaccaaacttcagacagcaaatatcaaaaaaaaaatcagtcccaagagtgagagtaaaatattcaaagctttcacctcctgcaagtgcacccaaaagtaggagtagcatcacgtgcaagtgtacaaatgactcaacaataacaaccgaaccacaaatcgaaactgatatgaaatattttttgatgcattttcaaggtagaaacattgagacattgatgaaaatacaaaccaaaggcactataataacaagtaaaaacgttcaagttcctgtgcatttttaagtgaaacaaagtaacattaaatccatgtaatgtgcgcaagttttaaggaataaaacataactctcatggtaagatttgcatattctgggtctgaattatattctctaaacaaatatatgaaagcatatccattactatatattcgcttttaaaagatggctcccatattgcctttgattactcacagacctctgcggttttccttaatccgcaaatttattatcatatctcaacggaagcatatttgtcagatactcgccacatttcatttcgcatccatcaaagttttgctttgattagcacatgatttgacatgctgaaggttaatttgcatgattgaagtcggccagaaaggctttttggccggcggggcaaaggccatcaatcaaaaaaggacgatttccgcccaaaatatgttaattatttgtcaactctgcgcgcaacactcgtatgtaggatgtatggaaactgaagaaaatctactaaaaatctacacatttaaattaatgttttgctagtcaaggaggagatgtaaagatatatcttccttatatcttcccatacctcttccttaccactttgaacgaactttcggaaatcaatttgcttgctctatttgattatctttagtattccttagtttttctacaacttttgctgttttataacatcattataattggttctttgaaatgtgctgcgacataagtaactcaacacccttaaagttaaaatgcattagttatttttaggaagccaaagaaagtgaaaagttggcattgaatcgatgggaaacattttcaaggcaagactgtcagtaatcgc

SEQ ID NO: 10517 - DNA, 514 bp, DROSOPHILA
atgcctggcctgaaggagcagccccatccgatgcgtagactcattagacagctatcaaaccatgttctggacggcggtagcctcctccacactctcgtccaacagtgccgagagctcggcgggattggccagtgcggcgcccagttaccagcagcagcacacgaagccatcgccgctgagagcctccgccagcagttggcagcttagtaatgcagcattcaagtcgcgcctgcaacagcaacagctactgcaccagcaccagcaacagatacagcagcagcagcacgagcagcagcaacaggagcagcagcagcaacaggagcagcagcagcagcagcagcagcacgagggcgcatctcatcaggaagtgcaaccgaatagggaggaaagacgggtggtggggcaaaagaccaaacttcagacagcaaatatcaaaaaaaaaatcagtcccaagagtgagagtaaaatattcaaagctttcacctcctgcaagtgcacccaaaagtaggagtag

SEQ ID NO: 10518 - protein, 148 aa, DROSOPHILA
MFWTAVASSTLSSNSAESSAGLASAAPSYQQQHTKPSPLRASASSWQLSNAAFKSRLQQQQLLHQHQQQIQQQQHEQQQQEQQQQQEQQQQQQQHEGASHQEVQPNREERRVVGQKTKLQTANIKKKISPKSESKIFKAFTSCKCTQK

SEQ ID NO: 10519 - DNA, 5424 bp, DROSOPHILA
ggttcacattcccctcaactgcaggtgagtggcggcgtctgataagccgtgattagtaatggactttagaacgatgtcggaaaatgtcttacaagtattacactttttgtttcaattgttaaataaaagaagtaatgagctggagatttaatttagttcatcattcacatgagatacaaaaaattcttcgtgctgagaaccagttttacctttgtatccattaaaacctatgtatagcaacgtaatcgattcccggaactagtcgttgccttatcagtttctaattgacttttcggcttcggcgtctttcagctccatcaaatcagcgcctccgacggccatgccctgatcgccgacgtctgccgcgagttgtacgaagacagtaagacggagttggtgcagagcctacttaagcagaagcgcgaagcgctgacggagcagatcagcgacatgctgagcaagcgactcgggttcgaggccccggagccggagctgggcatcgtgttcgcccggcagacgtgcacctacggcctgcttccctggcacgcgcgcttcaccgagttccacacgcatcccagcggacgccacttcgacgtggagacgttcgccagcatcctgtgcaagtactcgcggtgcgagcagcggtggggcacgtaggcacatcgttcgcgtgggtagcgacacccttatattaactagttaccttaacattatgtaaattatcgccaggaattccttttagttcgtaagagtaaactgcaaaagtgtattgttcacatgaaagtgtcttttgctggagaggatcgcgcgtttctaatggcggtgcaacgcagcagctcgtatcttgtacataatattcgatctttattgagtgacgttttgctgtgcttaagcttaaggcgcaactagatgagtatatgtaagtgggcagacttaagcgctatggttaaaagtattgtattgcttttcgttcaagtgtcatctccggcgctcagccgctctactcccgaccgggctcagcgtggcgcttggacaggagattgacgtcggtcagatacgtgttcttgtcgatgttgtgcggaccgggacccgtgggcatccgctcgtggaggccgtggaaggagttgcgcagatcctcgagggagtcggccaggcccttcttgatgctggcgaactcggtggacatgagcgacagcttgcccagcagatagttgaggttctcgtccatgtcgatcatgtgtttcttggtctcctccacgcggctgccgagacccatcatggtgatgagagtgctgttgttgtagccatcggaagcggactggatatctccgagcatcagccggctctggctgatctcgccggccatgatctcgatgcggtgccacacctggttcagctccgtttccagcagtccgctgatgttcttgttcgcctcctgctggatgctcaccaccgctccgtccagcgacgagaagcgctccttcagcagtccgctcagcgtggccatttcctccgccagcagcttgccaacccgctgcaccacgttcagtgtgccgaagtccaccttgcgctgcgtgtccagcacgacctccgagttggtcatcatgatgttgttgaacttaccgagcgcttcgagtccctcgttcagcttggcattgctctcgttagtcgaggcgaagtgcttgttgagaatgcccacgtccgcggacagctggcgaacgtccgcctggatgttggcctccgcctgctgcagtcgctccgtggcctccgtcgcagctgtatgcataatagggaatgaggaagtgaatgtggattgacccccaattgcgatgagttctacactcacctgacttctgttccaccgaggactcgctcttcagctgcgccagcgcattcagggtatcgttgttcagttcctggatgtaggcgcgatccgtctcgctcaggccaaccggagcagctggtcgctgcacagtctcgcttagagagctcacctggccgcccagcgaggtgagacgctccaggagttgggcctcgaactcagcgttcttcggtggagcggcggtggtcacgctggccgcgtgctcttgcagcttggcttcgatctgggacagcagctccggtgccttgggcagaccctcgaggcgcttctgggtctgatcggacgccttctggctgctctccttgagggcggccacgctggccgacaacttctggatctcctcgagcagcttggcgttgaggcgcttctgatcctccaggaactccttgggaatggcgggtggggcggccgcggctgggggagcgatcatgttggcgctgaccggcggcctcttgaagcactcgtcgttctcccgcatccacttgaacatgtgctccgttgcctggttgaagcggtccgactgcgagttgtacttctcctcttgctgaggatcggataagtttggatgataacatctactacccctttatggctgacttaccgtgatcagcatggtctctatctggctgacccgctcgtccaggcgcccgaagatcccattgatgggctccaggctcttctggcccttctggagcgactgcagcgccttcttgagcagctcgcccaacgcacgctcgcgatgctcgtgccgctccagcttattgtccagctgattgtaggagtagatcagcgactggatagttccgcgcagctcctcgttgctggaaagggtagggggttagggttagtggcttaaaattagcctcgctgcggaccattaatcatcggagtgggggagggcagatggcagcgggaccaccaccatgatggcgcgtctataaatattaagggctgggatctcagggtcaggagccctccactccgcacgctgtttgtgtgaactgcattgatggcgatggatgtggcatggctatgtgtggctgtggaggggaaacacggaacacatgcccatttgcatgggcgagcagtgggagctctgggagcactcccccattcccagccagagtcccaaaataaacaaacaaataggcgcagcgccaacatcttggctccctttgaaggcaccactcactactggggagtggctgtgcatgggctgcatccatactccatactccatactgcacgtcccacaaccatgatgcacatatgcgacggccccaggcgccgacaaatgcacttagtttgaagtctgggcacagtggagggcattatgagcgggaaccagaaccactccgcgatgtgtgacatgtgtcaagaccataaaaccggagggctgcagttgtggttcctcgaatccacatcggcccctccaagagattcaaacgaagaacttgaagtggcagcggatcaattgggtctagaaactgaagatctgagtgattttacgacgctaatggaagtttccgatggagttgggcaatcaataatgtgtatggagaaccaggagtgttggtatttagtggtttaagcgaagggttccacaatgtcattggaccaaagatctatgtacttattcaagcttttccccgaaaatgaatgaaatctactcacgagaccaatccagcggcgatgggttgccattgggcgagcgcaactaggaccaggagaactaattggagagggcgacttcctccggccatcgtgggtttggtgcgtcgatgcgatcttaaattggtaagcgagtccactgcgtggggtgacctgtggaaaaagaaatccaaatcgaaatcgaacggaaacggggaattgaggatgggtagcgatggcgcctccgttcgccgccagtggatgcggatacttcctctggagctgcgtcggcgaatgtttatcgctagcgacaatggggtaaacaaatgtaggcttatttatgtgcaatatttgcggcggtgcaggcgagcaataaagaaatgtcagtggaacaaagcggattggttccttgtccggatggacctcgctaaaaatacatacatatgtggatgcgatattgttcttgtggcgataaacaaatgacgcgaattatccgctggacactgcatgtgccagattcattctcctccgcgggaagatatggaggaagtgatgcattcgggaaattgggtcagaaataagcgagtgaaattcgcgagggcgaatcgaaattacaataagaccagttgccatcgcaatttccccggagatttctgctgtaggttggacatattcgcggcgataaggattgggttagaggttgacgaattgagaggggtgtacgaaaagttttggcctcgttcactaatcgcacattgcaccaggtagatagggaaaaactcacccttgggggaaattgaatggctcaagttcgaagagtagcctctgttttgcacacacacttggatcacttggctcgaaaacttggagctggacgtcctaacagctcgagttgcgaacgaggaatgatgctggaccagccgacttttccgtaccagctgtggatccgtgctgctccccgatagtggatcctctctctccgctctcagccgctcatgcgttcagtaattaaaatgggagatgtttagtggggatgagttcccgcatggaggcaagtcggggtgccgacgaatcaaaattcaatttattctaatacaaaatcatcgagcgcaatgcagacaaatgatttgggcggcgaaatccaagccaattaaaagctggcatcccaaatcgtttgggttgagttatttatttacatttatttgttccaatataatcgaattctgctggaggcgattccgggaaattggattcgaaaatgggtaaataagtttattaggcatatttcgtttacttgtggagaaggcagttatgtaagctcactcaataagtaataaccattaggattgtattttatcaagattgtaaattcagcactttatgtatttgaatttctatttggcgccaagctatggacaaaaatcattcacttggaactagaaaccgttattcgctgcgctgcgaatggcacttcagctggagcagaagaagaagaagatgcataaataacaaaaattggagaaaacataaataaagcgctgaataaatttaattaagctacgaaatgcccaccttaatagcgctggatgcatcgctatcgatgctgcgcccggtgccgggaagaaatgagcacacctaccagtcgctggccaccaagggcatccagcatctgctggacaatctcacggcggccggcaaattggagcacgttgctctgctctcctattcgacgacggcggaactgaaggtggacttcacgcgggactacgaccaggtgcggcaggcggtcaagaaggtggagcccgtggacaaggcctgcctgatgagcatgctcaaggcggtggtgtccataatgtcgccgtggggcaaccagaacatcctgcaggtggttg

SEQ ID NO: 10520 - DNA, 1834 bp, DROSOPHILA
ctcgagctgttaggacgtccagctccaagttttcgagccaagtgatccaagtgtgtgtgcaaaacagaggctactcttcgaacttgagccattcaatttcccccaagggtcaccccacgcagtggactcgcttaccaatttaagatcgcatcgacgcaccaaacccacgatggccggaggaagtcgccctctccaattagttctcctggtcctagttgcgctcgcccaatggcaacccatcgccgctggattggtctccaacgaggagctgcgcggaactatccagtcgctgatctactcctacaatcagctggacaataagctggagcggcacgagcatcgcgagcgtgcgttgggcgagctgctcaagaaggcgctgcagtcgctccagaagggccagaagagcctggagcccatcaatgggatcttcgggcgcctggacgagcgggtcagccagatagagaccatgctgatcacgcaagaggagaagtacaactcgcagtcggaccgcttcaaccaggcaacggagcacatgttcaagtggatgcgggagaacgacgagtgcttcaagaggccgccggtcagcgccaacatgatcgctcccccagccgcggccgccccacccgccattcccaaggagttcctggaggatcagaagcgcctcaacgccaagctgctcgaggagatccagaagttgtcggccagcgtggccgccctcaaggagagcagccagaaggcgtccgatcagacccagaagcgcctcgagggtctgcccaaggcaccggagctgctgtcccagatcgaagccaagctgcaagagcacgcggccagcgtgaccaccgccgctccaccgaagaacgctgagttcgaggcccaactcctggagcgtctcacctcgctgggcggccaggtgagctctctaagcgagactgtgcagcgaccagctgctccggttggcctgagcgagacggatcgcgcctacatccaggaactgaacaacgataccctgaatgcgctggcgcagctgaagagcgagtcctcggtggaacagaagtcagctgcgacggaggccacggagcgactgcagcaggcggaggccaacatccaggcggacgttcgccagctgtccgcggacgtgggcattctcaacaagcacttcgcctcgactaacgagagcaatgccaagctgaacgagggactcgaagcgctcggtaagttcaacaacatcatgatgaccaactcggaggtcgtgctggacacgcagcgcaaggtggacttcggcacactgaacgtggtgcagcgggttggcaagctgctggcggaggaaatggccacgctgagcggactgctgaaggagcgcttctcgtcgctggacggagcggtggtgagcatccagcaggaggcgaacaagaacatcagcggactgctggaaacggagctgaaccaggtgtggcaccgcatcgagatcatggccggcgagatcagccagagccggctgatgctcggagatatccagtccgcttccgatggctacaacaacagcactctcatcaccatgatgggtctcggcagccgcgtggaggagaccaagaaacacatgatcgacatggacgagaacctcaactatctgctgggcaagctgtcgctcatgtccaccgagttcgccagcatcaagaagggcctggccgactccctcgaggatctgcgcaactccttccacggcctccacgagcggatgcccacgggtcccggtccgcacaacatcgacaagaacacgtatctgaccgacgtcaatctcctgtccaagcgccacgctgagcccggtcgggagtag

SEQ ID NO: 10521 - protein, 554 aa, DROSOPHILA
MAGGSRPLQLVLLVLVALAQWQPIAAGLVSNEELRGTIQSLIYSYNQLDNKLERHEHRERALGELLKKALQSLQKGQKSLEPINGIFGRLDERVSQIETMLITQEEKYNSQSDRFNQATEHMFKWMRENDECFKRPPVSANMIAPPAAAAPPAIPKEFLEDQKRLNAKLLEEIQKLSASVAALKESSQKASDQTQKRLEGLPKAPELLSQIEAKLQEHAASVTTAAPPKNAEFEAQLLERLTSLGGQVSSLSETVQRPAAPVGLSETDRAYIQELNNDTLNALAQLKSESSVEQKSAATEATERLQQAEANIQADVRQLSADVGILNKHFASTNESNAKLNEGLEALGKFNNIMMTNSEVVLDTQRKVDFGTLNVVQRVGKLLAEEMATLSGLLKERFSSLDGAVVSIQQEANKNISGLLETELNQVWHRIEIMAGEISQSRLMLGDIQSASDGYNNSTLITMMGLGSRVEETKKHMIDMDENLNYLLGKLSLMSTEFASIKKGLADSLEDLRNSFHGLHERMPTGPGPHNIDKNTYLTDVNLLSKRHAEPGRE

SEQ ID NO: 10522 - DNA, 3664 bp, DROSOPHILA
gtgaccgtgcatttcgattgagctgagcttttttttttttgtttggctggccaaactccgaaaattaatggtatttgtgggcctatatagatctccacctcctctaaccaacgacaactccactcgagatctccgcctgggcggccttgacacaaatttggaatcacaccaaaaatgtccgaaattaatctctcctccaacaaatcgttacgcatttcgttaattatgttttccacctgtactcgatgcttgggcaatatgccgtgtgagatctaactacattggttatacataccttggtttgatttcttttttttaacttgtcgaggcttttcggtttcttttttttcggatatacgcgtcatttgccattaattagtcgagctattgatggtctcggttggagcgaacaaaaggcggcattgtgaatggttgtgcagttggccgggaaagtacagttaacagtgttgggcaacggccatgggtccgattgtggcagtgtgacaagttgaaagtttgggggtattaattaacgtaagcttagccactctaatccacttggtgattaaagtaaaaggttaatgggccttaagtgtgggaaagttgaaagggttaattagctctcgaattttgtagttggttttgttcccagtgctagtcaacgtttcagtttagtgttggaatgtagtgctgggataagtaaaggtacattctattacgagtaatagaagttatctaaactattccataaatatgggaacccctactttatcacgtcaaaagcagcagttacacgcgtcaactttaattgccattactagtcggaattaattacttgacttataaaaagcacgttgctcatttgctacattttgtccataacacttactacatcgattggtttgctgactgttgaaatatgtcggttttttgtagattcccgagtggaattttcttactacaacccccaactatgattcactgattcgttaatagaattcgttcaacgtcaattatattaaattttactataatatcccagaactctgccaggagctcagcaagtattcattttcaaatattaactctggataaaaaggcaattcacaacgctatagtaaaatgagctccatttatgagctgctggcccttaagaagttgcgccaggattcgccattagatttgcgatgagatcccatgtaggcactgggtccggcgatggcgggcggcatatccatctggccggagtaattgaatacgggagtagagggacggctagcgggagcacggctcttgacgaccattcggaaacggggcggttccacggatcgacgctcctccttcctcttgggcttcttctcttcctccttcttgggcaccagccctggcatctgaagtggttgcccgttgtcctggatcgcgtcgaagtcctgttgccatagagccacctgtttcatggcaaacttgtggtactgcttatcgatgccagatggtcgccgctttggtatcatcactatagtcttggctttcagtgcatacacaggtggggatatctgatggtagccgcgtcgttggtaatcccttggatatgcaggcggaatgccaaccaccttcttgcgcttcaaatgtggcttcacctcctctgtggtctccgactcccgggagcatgggcatgtgtgccacgaatgccagtgctccgcctcgctctcctcctggcgcttcctcaaccaatcggcagtgggacgattggaatcgtaaaccactgtctggctgtcttgagcttcctctgagctctctgtattgcgtctttggcgctggtagtcctccgattccctttgcatatcctcctcaatatacgtttcctttcgcttaaccggacgataggtaatgccggaggtattagtttccctcctagattccggacgattttgccatcgacggcgattctgttcgataatcgcctcctgacgcctttggtgatcggccggatcctgtgagatggtacgccggcgcaataagtccggttctgcctgacctttagcgaagtgactattgattcttcgttgggcctgcttgcgacgctcttcacgttccaattcatatttttgttgctcgtgacggattttgttcttggctatatagaggcgatcgttgcagtgggactcgtagcccaactcatccaaacgctcgggaaaatcgggagaccattcgctgtcacgccaaggagactcccggggcaccgcggacatctctttcatcttcttgatgccctggatttgtgcttgagtctggtcgtcgaaggtatatcggtctgcgtagcgacgattttggctggtaactgctggtaatcgtcgcaaactggaaaattgccccttggctttgttactaacaaaccgccaagaatgattcaggctcgttcgagccattttaaaagtggtattcatcttgctattgactcgtcttggattgaactcccttttcagaactaaaaattttgatgcgtgcacgagagggtgttgtctgaaaataaaactccgaactgaatttttgaattttcaattttgttagctacaaatttttaactccaaaaattaaagaccgaaattttgtgaactgaacgcttcgcaaactgggaatattatgagaacgctgatgattttttcccaggaagtaaaaggcaatgctatcccagttgaactcaaaaaatagaggtggtactcatgacctacttggcgtttaacattacgttaatccaatactagaaacaatctttgaaaatgcacaaaatatgtattcattaaaaggtttcctgaccacataagcggttaacctttgaagtaactatccattaggtttcacacccaaatgggaaagtgtggaaagcttaaatatgcagcatttatcttcgttggaggttgtctgccttccgcatcgcgcactccacttccatcgaattttgatagcagatttatgatgcacttccgccgctggctaaacttgacacactgagaagtttgtctggttttttttttcgattcgctcttcgatcgccggctttggtttcataatcgcagcgatccagttggactaatgaacttgaactaaccgatgtcacggcgcgtttccttttcttatttctttgccacagcttgccgcaccgtcttcgaatctcagcagcaaattggcgccgccgacgaatcttgagccctacaccatggctgtcatcacggaacatggcggcaccacctcctctcccccggaaaacaacaatagcatcggaaacggaaaacaccgggtcaatggccatcagttgagcacctcgctgaccataccggagttctttgcccacaagaacatctttgtcaccggcggcactggattcctgggcaccgttcttatcgaggctctgctggacacacatcccgacattggaaccatctacgttttggtccggggcaagcgcaagtttgatccgaacgagcggattcgtcgcctgctccaaaagccggtaagtctggtggcatttgttttagattgttttgaccggtcgaaggggggcggcaaccggccacgccctctgacacgacgcgccgtctgcaaggtatataattaaagccaattacgagtctctttatggagcgttaatttgtcaaagtcgtaacct

SEQ ID NO: 10523 - DNA, 1664 bp, DROSOPHILA
ggaaaaaatcatcagcgttctcataatattcccagtttgcgaagcgttcagttcacaaaatttcggtctttaatttttggagttaaaaatttgtagctaacaaaattgaaaattcaaaaattcagttcggagttttattttcagacaacaccctctcgtgcacgcatcaaaatttttagttctgaaaagggagttcaatccaagacgagtcaatagcaagatgaataccacttttaaaatggctcgaacgagcctgaatcattcttggcggtttgttagtaacaaagccaaggggcaattttccagtttgcgacgattaccagcagttaccagccaaaatcgtcgctacgcagaccgatataccttcgacgaccagactcaagcacaaatccagggcatcaagaagatgaaagagatgtccgcggtgccccgggagtctccttggcgtgacagcgaatggtctcccgattttcccgagcgtttggatgagttgggctacgagtcccactgcaacgatcgcctctatatagccaagaacaaaatccgtcacgagcaacaaaaatatgaattggaacgtgaagagcgtcgcaagcaggcccaacgaagaatcaatagtcacttcgctaaaggtcaggcagaaccggacttattgcgccggcgtaccatctcacaggatccggccgatcaccaaaggcgtcaggaggcgattatcgaacagaatcgccgtcgatggcaaaatcgtccggaatctaggagggaaactaatacctccggcattacctatcgtccggttaagcgaaaggaaacgtatattgaggaggatatgcaaagggaatcggaggactaccagcgccaaagacgcaatacagagagctcagaggaagctcaagacagccagacagtggtttacgattccaatcgtcccactgccgattggttgaggaagcgccaggaggagagcgaggcggagcactggcattcgtggcacacatgcccatgctcccgggagtcggagaccacagaggaggtgaagccacatttgaagcgcaagaaggtggttggcattccgcctgcatatccaagggattaccaacgacgcggctaccatcagatatccccacctgtgtatgcactgaaagccaagactatagtgatgataccaaagcggcgaccatctggcatcgataagcagtaccacaagtttgccatgaaacaggtggctctatggcaacaggacttcgacgcgatccaggacaacgggcaaccacttcagatgccagggctggtgcccaagaaggaggaagagaagaagcccaagaggaaggaggagcgtcgatccgtggaaccgccccgtttccgaatggtcgtcaagagccgtgctcccgctagccgtccctctactcccgtattcaattactccggccagatggatatgccgcccgccatcgccggacccagtgcctacatgggatctcatcgcaaatctaatggcgaatcctggcgcaacttcttaagggccagcagctcataaatggagctcattttactatagcgttgtgaattgcctttttatccagagttaatatttgaaaatgaatacttgctgagctcctggcagagttctgggatattatagtaaaatttaatataattgacgttgaacg

SEQ ID NO: 10524 - protein, 430 aa, DROSOPHILA
MARTSLNHSWRFVSNKAKGQFSSLRRLPAVTSQNRRYADRYTFDDQTQAQIQGIKKMKEMSAVPRESPWRDSEWSPDFPERLDELGYESHCNDRLYIAKNKIRHEQQKYELEREERRKQAQRRINSHFAKGQAEPDLLRRRTISQDPADHQRRQEAIIEQNRRRWQNRPESRRETNTSGITYRPVKRKETYIEEDMQRESEDYQRQRRNTESSEEAQDSQTVVYDSNRPTADWLRKRQEESEAEHWHSWHTCPCSRESETTEEVKPHLKRKKVVGIPPAYPRDYQRRGYHQISPPVYALKAKTIVMIPKRRPSGIDKQYHKFAMKQVALWQQDFDAIQDNGQPLQMPGLVPKKEEEKKPKRKEERRSVEPPRFRMVVKSRAPASRPSTPVFNYSGQMDMPPAIAGPSAYMGSHRKSNGESWRNFLRASSS

SEQ ID NO: 10525 - DNA, 4810 bp, DROSOPHILA
gtcgacgacgacgttgtgttgtgcagtccacctagtgaactatgatccagccgaaagtcatcgtcatcatccggatatagctgcacaggtatgctatccggtatggaatgcggttcaaacaaattaccatacggcggcagcgagtgattcagatcaacatgatgatcaactagatcactatcaaaattggagatacggaatttcgagcttggcggcgattgcggcgaatgcagggcagccgaatcctcaaacatgacctcctccttgatgaacatatcgttggagttgtcgccagagcccgaggaatacagatttggttccactttgataatggccgctgtggccagggacggtgacgatttctcatcgtcatcatcgtcatcgaaatgatgattgtgatgattatgatgatgactgtgatgatggtgatgctgttgcgtttgctgcgtatgcgtctgctgctgcggctgatcctcgtcgtcatcttcatcgtcatccatgtccgccaaatggcgacgtcggtggtgatttcggtggttgttgcgctgcgttacccgctgctgctgctgctgttgttgggctggttgctgctgctgctgctgctgttggtgattccttgtgctgcgtatgatagtggagcctccaagtgcagccgccgccgaggaagctatcgatagtggcacaccggtggctttggaaaccagcaccgtggatgaggagcaagaggtcgaggatgatgatggcgattgagctggcgaaataactgaaagagaaaaagggtttatattttgatacaatctgctagctagatttcaacaaatatcaacttagggtttaaacccaaaactactaaccacctgtttgctgcaccacactggtcagcgctgagccgccgctgccattgctgcttccggtcgaatgatgaatgatcggcgtctttcgtatcaactgcgagccattgctgagattgccgccggcgttggtggtgacaatgttggtactactgttgctgctgctattggtggaggaggtgttgccgctgccgttgctggtgcctgcaccgctctggatgacctgtgcatgcagcacgggcgttggatcggaggtatgttgctgctgctgctgctgctgctgctgctgctgggatccctgctgcatgtagttcttaatgacgatcgttcgtgttggtgccgaaacgagatattgctgctgcgactgctgctgctgctgctgttgctgatgcacatgctgctggtgcgacgacacttggtgctgcgaggctggcgaggatgaggtggaggagtgctggttcaggtgtagcgaggcattcgaggactccgatgagtcctcgccggtggtcaagcgattggtggttgcgttcacaatatgcgaggaggagttcataccgccgccgctgccatcctcctcgtccccgctcagtcccgactgatcgtctagttccatttggtggtgttgcgactgctgcaactgctgattgctactggtgcctggcctctcaatctcgtgcggcggctccagtttgacaattgttgtagtcgttgtggctgccgatacagctgccgatacgccgttgctgctggaattgctgctgctggaattgctactgttgctcgaattgctgctattgctggccttcgaggaggctgctccggcagcagtggcggctgcagcagctgctcccggctgatcccgcagatggacctgcatgtgcgtctgcagcgatgactgtgtgtgcagcttcttcttgcagatcttgcactcgaatgggaagtcacccgtgtgcgttctggcatgaattttcaggttgtagcgctgtccgaaacccttgccgcacacgtcgcatttgtgcagcttaacacccgaatgcagcttggaatggccgcgcaacgatgccagggcactgaacaccttgccacagatctcgcaggtcaggttcacattctcgttgtggatcttcttgtgcaccttgaagtactcgaagctcatgaactccttgtggcacacctcgcacttgtatttgtgccgctccgactgctggcccgtatggactcgcatatgcttgataaagttcggccggaaacggacgacgcgaccgcatatctggcattcgtacggcttgcagcgcaggcagtgcttctcgtagttcttcagcgacttcaacaccatgttgcagatggcgcacttcatattattggcatggccgctgcgatggatgtcgaaaagttccttagaatcgaacttctccacacactcgacgcactggtaactggtggtcacagtcgccgttgccgctggtgtgttattgttgctgttggtggagttggtggtgctgttgttgttggtggaggaagagccggatgctgaatgtttcactggatgggtttgctgttgctgctgctgctgttgtagctgctgctgttgctgcctctgctgttcttgttgcgcctgctgctgctgctgttgctgctgttgttgctgctgctgcctttgttgttcctgctgctgctgctgctgcctttgttgctgcgcctgctgttcctgctgctgcctttgctgctccaaggccaaggccaattgctgctcagccgctgccgctgccggcgtctgttgctgttgcgtctgcaatatcagctgtgtggccggcaacgcctgttgcaccacattcagcaccgtcatgggactccggctgatcacagcggccgccggcattctcacataggttgctccggccgttaggccgccaacagcattgcttatgtagacaggtcgtcgttgcagctgcacaagagccgcctcggtcacgggcaccgacaatcggtgggtggttgtgctcacaatactaccggcgggcagttgtaccaattgctgtgatcctccgccggctgttgcggcgccaccagcggcactactcgtcgctgctccagctgtttgcgttgccgcactaatttggtactccagctggccgtgctgcagctcctcgtcatcgtcctcatcctcttcctcctcctcgtcgggcatttcatcatcctcttccagctccagcttaacttgcgtggacaaatgcgcggtggtttcgggctcctcatcggcctcggctgcctgagcctcctcttcgatatcctgcagattctcatcgttcagctcgggatcttcctcctcctcgtcctcctccttgatatcgctggcggctaaaacggacgagttacccgtggcctggattatgatgcggcgtccgtttagcagatgatgttgctgctgttgctgctgctgctgaatgagcaactgttgctggttgtccaagtgattgctgttgttgctattgctactgctgctgttgctgctaaaggaagcgctgttgttggttgctgcggctgctgttgctgcagttgttgctgctactgctacggcagctgcggctgctgctgcggtcggtgggtggttgttgctgctgttgtccagcttcagatgatgatgcggatgatggtgttgctgctgctgctgttgctgctgaagatgctgctgctgttgctgctgatgcgaatgcgagtgaggatgatgctgcgagtgatgatggtgatgcacatgcgtatgctggtgaggatcgtcgtcctgctccatgggagcatcctgcagtataaattcgatctgttgcgatagggcgctatcgttaatggccattaatccgtccatatctttgacaccggcagcggcgccaacggcggggaagagcgatggcagcgccgtcgacgtcccgctgccgccgtcgacgttcgtcgcgctgctggccatggcagcgatatactaattgatgtatatttcccttatttgtatctgcaaatcgtacaaacatttggattagactcacattcggccatggctggtgggcaataacttacgttcttctcttgagctgttggggatgcgacgcctgtgtttggcgtaaacctccagctatgttgaatatattgttagcctgagaaatagaacaatattatgaactctgccacaaaatctaacaaacaagttaagtccattcgagtttctgatgtcttaaagtacgggttattaaataaaactagatgaaagcgaaatgctttcagtactgagaggaacaactatacaaaactttggtgattaagtgataatttcatcgaaacgaactagtttttgtttggaaaaagcagggcttgttgttacttacaattttttgtttgtttcttgtcgttttggctgccaaagttttcttttatgttactactccctatttaaaaatcttgcctttgggcgtctgttgtttcctcttctacagaattttgtttgtcgaagctgccataattaataattgttgtatatttttcaagttgccgcttcctcttcgccttcttcttcttctcatagatttgctgatgggcttcttcttctgctttagttattacatctgtttcttcctccgtttattctgttctctttcgaatgccgcttcttccttgactcgtattattattactattattcttcgattatacgattggaaaacacacacacacgcacacacacacacgttcttgtatttttgttgtattttgttttgtttttcgtttgctcaacgcctcgctgtcggcctttcctttatgttcacatttggttttttgggctgcacaaaaattttccatttccttgtcatgcggttttctgtgctttccatgcggcgacgctggcgtcgacgtcgctgctggctgcgctgctcctggctgtcgttgttgttttagcttttgttgtttccttgctt

SEQ ID NO: 10526 - DNA, 2672 bp, DROSOPHILA
atggccagcagcgcgacgaacgtcgacggcggcagcgggacgtcgacggcgctgccatcgctcttccccgccgttggcgccgctgccggtgtcaaagatatggacggattaatggccattaacgatagcgccctatcgcaacagatcgaatttatactgcaggatgctcccatggagcaggacgacgatcctcaccagcatacgcatgtgcatcaccatcatcactcgcagcatcatcctcactcgcattcgcatcagcagcaacagcagcagcatcttcagcagcaacagcagcagcagcaacaccatcatccgcatcatcatctgaagctggacaacagcagcaacaaccacccaccgaccgcagcagcagccgcagctgccgtagcagtagcagcaacaactgcagcaacagcagccgcagcaaccaacaacagcgcttcctttagcagcaacagcagcagtagcaatagcaacaacagcaatcacttggacaaccagcaacagttgctcattcagcagcagcagcaacagcagcaacatcatctgctaaacggacgccgcatcataatccaggccacgggtaactcgtccgttttagccgccagcgatatcaaggaggaggacgaggaggaggaagatcccgagctgaacgatgagaatctgcaggatatcgaagaggaggctcaggcagccgaggccgatgaggagcccgaaaccaccgcgcatttgtccacgcaagttaagctggagctggaagaggatgatgaaatgcccgacgaggaggaggaagaggatgaggacgatgacgaggagctgcagcacggccagctggagtaccaaattagtgcggcaacgcaaacagctggagcagcgacgagtagtgccgctggtggcgccgcaacagccggcggaggatcacagcaattggtacaactgcccgccggtagtattgtgagcacaaccacccaccgattgtcggtgcccgtgaccgaggcggctcttgtgcagctgcaacgacgacctgtctacataagcaatgctgttggcggcctaacggccggagcaacctatgtgagaatgccggcggccgctgtgatcagccggagtcccatgacggtgctgaatgtggtgcaacaggcgttgccggccacacagctgatattgcagacgcaacagcaacagacgccggcagcggcagcggctgagcagcaattggccttggccttggagcagcaaaggcagcagcaggaacagcaggcgcagcaacaaaggcagcagcagcagcagcaggaacaacaaaggcagcagcagcaacaacagcagcaacagcagcagcagcaggcgcaacaagaacagcagaggcagcaacagcagcagctacaacagcagcagcagcaacagcaaacccatccagtgaaacattcagcatccggctcttcctccaccaacaacaacagcaccaccaactccaccaacagcaacaataacacaccagcggcaacggcgactgtgaccaccagttaccatgcgccatctgcaacatggtgttgaagtcgctgaagaactacgagaagcactgcctgcgctgcaagccgtacgaatgccagatatgcggtcgcgtcgtccgtttccggccgaactttatcaagcatatgcgagtccatacgggccagcagtcggagcggcacaaatacaagtgcgaggtgtgccacaaggagttcatgagcttcgagtacttcaaggtgcacaagaagatccacaacgagaatgtgaacctgacctgcgagatctgtggcaaggtgttcagtgccctggcatcgttgcgcggccattccaagctgcattcgggtgttaagctgcacaaatgcgacgtgtgcggcaagggtttcggacagcgctacaacctgaaaattcatgccagaacgcacacgggtgacttcccattcgagtgcaagatctgcaagaagaagctgcacacacagtcatcgctgcagacgcacatgcaggtccatctgcgggatcagccgggagcagctgctgcagccgccactgctgccggagcagcctcctcgaaggccagcaatagcagcaattcgagcaacagtagcaattccagcagcagcaattccagcagcaacggcgtatcggcagctgtatcggcagccacaacgactacaacaattgtcaaactggagccgccgcacgagattgagaggccaggcaccagtagcaatcagcagttgcagcagtcgcaacaccaccaaatggaactagacgatcagtcgggactgagcggggacgaggaggatggcagcggcggcggtatgaactcctcctcgcatattgtgaacgcaaccaccaatcgcttgaccaccggcgaggactcatcggagtcctcgaatgcctcgctacacctgaaccagcactcctccacctcatcctcgccagcctcgcagcaccaagtgtcgtcgcaccagcagcatgtgcatcagcaacagcagcagcagcagcagtcgcagcagcaatatctcgtttcggcaccaacacgaacgatcgtcattaagaactacatgcagcagggatcccagcagcagcagcagcagcagcagcagcagcaacatacctccgatccaacgcccgtgctgcatgcacagcagcagcaacagtag

SEQ ID NO: 10527 - protein, 517 aa, DROSOPHILA
MASSATNVDGGSGTSTALPSLFPAVGAAAGVKDMDGLMAINDSALSQQIEFILQDAPMEQDDDPHQHTHVHHHHHSQHHPHSHSHQQQQQQHLQQQQQQQQHHHPHHHLKLDNSSNNHPPTAAAAAAAVAVAATTAATAAAATNNSASFSSNSSSSNSNNSNHLDNQQQLLIQQQQQQQQHHLLNGRRIIIQATGNSSVLAASDIKEEDEEEEDPELNDENLQDIEEEAQAAEADEEPETTAHLSTQVKLELEEDDEMPDEEEEEDEDDDEELQHGQLEYQISAATQTAGAATSSAAGGAATAGGGSQQLVQLPAGSIVSTTTHRLSVPVTEAALVQLQRRPVYISNAVGGLTAGATYVRMPAAAVISRSPMTVLNVVQQALPATQLILQTQQQQTPAAAAAEQQLALALEQQRQQQEQQAQQQRQQQQQQEQQRQQQQQQQQQQQQQAQQEQQRQQQQQLQQQQQQQQTHPVKHSASGSSSTNNNSTTNSTNSNNNTPAATATVTTSYHAPSATWC

SEQ ID NO: 10528 - DNA, 4894 bp, DROSOPHILA
ggttcacattcccctcaactgcaggtgagtggcggcgtctgataagccgtgattagtaatggactttagaacgatgtcggaaaatgtcttacaagtattacactttttgtttcaattgttaaataaaagaagtaatgagctggagatttaatttagttcatcattcacatgagatacaaaaaattcttcgtgctgagaaccagttttacctttgtatccattaaaacctatgtatagcaacgtaatcgattcccggaactagtcgttgccttatcagtttctaattgacttttcggcttcggcgtctttcagctccatcaaatcagcgcctccgacggccatgccctgatcgccgacgtctgccgcgagttgtacgaagacagtaagacggagttggtgcagagcctacttaagcagaagcgcgaagcgctgacggagcagatcagcgacatgctgagcaagcgactcgggttcgaggccccggagccggagctgggcatcgtgttcgcccggcagacgtgcacctacggcctgcttccctggcacgcgcgcttcaccgagttccacacgcatcccagcggacgccacttcgacgtggagacgttcgccagcatcctgtgcaagtactcgcggtgcgagcagcggtggggcacgtaggcacatcgttcgcgtgggtagcgacacccttatattaactagttaccttaacattatgtaaattatcgccaggaattccttttagttcgtaagagtaaactgcaaaagtgtattgttcacatgaaagtgtcttttgctggagaggatcgcgcgtttctaatggcggtgcaacgcagcagctcgtatcttgtacataatattcgatctttattgagtgacgttttgctgtgcttaagcttaaggcgcaactagatgagtatatgtaagtgggcagacttaagcgctatggttaaaagtattgtattgcttttcgttcaagtgtcatctccggcgctcagccgctctactcccgaccgggctcagcgtggcgcttggacaggagattgacgtcggtcagatacgtgttcttgtcgatgttgtgcggaccgggacccgtgggcatccgctcgtggaggccgtggaaggagttgcgcagatcctcgagggagtcggccaggcccttcttgatgctggcgaactcggtggacatgagcgacagcttgcccagcagatagttgaggttctcgtccatgtcgatcatgtgtttcttggtctcctccacgcggctgccgagacccatcatggtgatgagagtgctgttgttgtagccatcggaagcggactggatatctccgagcatcagccggctctggctgatctcgccggccatgatctcgatgcggtgccacacctggttcagctccgtttccagcagtccgctgatgttcttgttcgcctcctgctggatgctcaccaccgctccgtccagcgacgagaagcgctccttcagcagtccgctcagcgtggccatttcctccgccagcagcttgccaacccgctgcaccacgttcagtgtgccgaagtccaccttgcgctgcgtgtccagcacgacctccgagttggtcatcatgatgttgttgaacttaccgagcgcttcgagtccctcgttcagcttggcattgctctcgttagtcgaggcgaagtgcttgttgagaatgcccacgtccgcggacagctggcgaacgtccgcctggatgttggcctccgcctgctgcagtcgctccgtggcctccgtcgcagctgtatgcataatagggaatgaggaagtgaatgtggattgacccccaattgcgatgagttctacactcacctgacttctgttccaccgaggactcgctcttcagctgcgccagcgcattcagggtatcgttgttcagttcctggatgtaggcgcgatccgtctcgctcaggccaaccggagcagctggtcgctgcacagtctcgcttagagagctcacctggccgcccagcgaggtgagacgctccaggagttgggcctcgaactcagcgttcttcggtggagcggcggtggtcacgctggccgcgtgctcttgcagcttggcttcgatctgggacagcagctccggtgccttgggcagaccctcgaggcgcttctgggtctgatcggacgccttctggctgctctccttgagggcggccacgctggccgacaacttctggatctcctcgagcagcttggcgttgaggcgcttctgatcctccaggaactccttgggaatggcgggtggggcggccgcggctgggggagcgatcatgttggcgctgaccggcggcctcttgaagcactcgtcgttctcccgcatccacttgaacatgtgctccgttgcctggttgaagcggtccgactgcgagttgtacttctcctcttgctgaggatcggataagtttggatgataacatctactacccctttatggctgacttaccgtgatcagcatggtctctatctggctgacccgctcgtccaggcgcccgaagatcccattgatgggctccaggctcttctggcccttctggagcgactgcagcgccttcttgagcagctcgcccaacgcacgctcgcgatgctcgtgccgctccagcttattgtccagctgattgtaggagtagatcagcgactggatagttccgcgcagctcctcgttgctggaaagggtagggggttagggttagtggcttaaaattagcctcgctgcggaccattaatcatcggagtgggggagggcagatggcagcgggaccaccaccatgatggcgcgtctataaatattaagggctgggatctcagggtcaggagccctccactccgcacgctgtttgtgtgaactgcattgatggcgatggatgtggcatggctatgtgtggctgtggaggggaaacacggaacacatgcccatttgcatgggcgagcagtgggagctctgggagcactcccccattcccagccagagtcccaaaataaacaaacaaataggcgcagcgccaacatcttggctccctttgaaggcaccactcactactggggagtggctgtgcatgggctgcatccatactccatactccatactgcacgtcccacaaccatgatgcacatatgcgacggccccaggcgccgacaaatgcacttagtttgaagtctgggcacagtggagggcattatgagcgggaaccagaaccactccgcgatgtgtgacatgtgtcaagaccataaaaccggagggctgcagttgtggttcctcgaatccacatcggcccctccaagagattcaaacgaagaacttgaagtggcagcggatcaattgggtctagaaactgaagatctgagtgattttacgacgctaatggaagtttccgatggagttgggcaatcaataatgtgtatggagaaccaggagtgttggtatttagtggtttaagcgaagggttccacaatgtcattggaccaaagatctatgtacttattcaagcttttccccgaaaatgaatgaaatctactcacgagaccaatccagcggcgatgggttgccattgggcgagcgcaactaggaccaggagaactaattggagagggcgacttcctccggccatcgtgggtttggtgcgtcgatgcgatcttaaattggtaagcgagtccactgcgtggggtgacctgtggaaaaagaaatccaaatcgaaatcgaacggaaacggggaattgaggatgggtagcgatggcgcctccgttcgccgccagtggatgcggatacttcctctggagctgcgtcggcgaatgtttatcgctagcgacaatggggtaaacaaatgtaggcttatttatgtgcaatatttgcggcggtgcaggcgagcaataaagaaatgtcagtggaacaaagcggattggttccttgtccggatggacctcgctaaaaatacatacatatgtggatgcgatattgttcttgtggcgataaacaaatgacgcgaattatccgctggacactgcatgtgccagattcattctcctccgcgggaagatatggaggaagtgatgcattcgggaaattgggtcagaaataagcgagtgaaattcgcgagggcgaatcgaaattacaataagaccagttgccatcgcaatttccccggagatttctgctgtaggttggacatattcgcggcgataaggattgggttagaggttgacgaattgagaggggtgtacgaaaagttttggcctcgttcactaatcgcacattgcaccaggtagatagggaaaaactcacccttgggggaaattgaatggctcaagttcgaagagtagcctctgttttgcacacacacttggatcacttggctcgaaaacttggagctggacgtcctaacagctcgagttgcgaacgaggaatgatgctggaccagccgacttttccgtaccagctgtggatccgtgctgctccccgatagtggatcctctctctccgctctcagccgctcatgcgttcagtaattaaaatgggagatgtttagtggggatgagttcccgcatggaggcaagtcggggtgccgacgaatcaaaattcaatttattctaatacaaaatcatcgagcgcaatgcagacaaatgatttgggcggcgaaatccaagccaattaaaagctggcatcccaaatcgtttgggttgagttatttatttacatttatttgttccaatataatcgaattctgctggaggcgattccgggaaattggattcgaaaatgggtaaataagtttattaggcatatttcgtttacttgtggagaaggcagttatgtaagctcactcaataagtaataaccattaggattgtattttatcaaga

SEQ ID NO: 10529 - DNA, 1914 bp, DROSOPHILA
caccgccgcaaatattgcacataaataagcctacatttgtttaccccattgtcgctagcgataaacattcgccgacgcagctccagaggaagtatccgcatccactggcggcgaacggaggcgccatcgctacccatcctcaattccccgtttccgttcgatttcgatttggatttctttttccacaggtcaccccacgcagtggactcgcttaccaatttaagatcgcatcgacgcaccaaacccacgatggccggaggaagtcgccctctccaattagttctcctggtcctagttgcgctcgcccaatggcaacccatcgccgctggattggtctccaacgaggagctgcgcggaactatccagtcgctgatctactcctacaatcagctggacaataagctggagcggcacgagcatcgcgagcgtgcgttgggcgagctgctcaagaaggcgctgcagtcgctccagaagggccagaagagcctggagcccatcaatgggatcttcgggcgcctggacgagcgggtcagccagatagagaccatgctgatcacgcaagaggagaagtacaactcgcagtcggaccgcttcaaccaggcaacggagcacatgttcaagtggatgcgggagaacgacgagtgcttcaagaggccgccggtcagcgccaacatgatcgctcccccagccgcggccgccccacccgccattcccaaggagttcctggaggatcagaagcgcctcaacgccaagctgctcgaggagatccagaagttgtcggccagcgtggccgccctcaaggagagcagccagaaggcgtccgatcagacccagaagcgcctcgagggtctgcccaaggcaccggagctgctgtcccagatcgaagccaagctgcaagagcacgcggccagcgtgaccaccgccgctccaccgaagaacgctgagttcgaggcccaactcctggagcgtctcacctcgctgggcggccaggtgagctctctaagcgagactgtgcagcgaccagctgctccggttggcctgagcgagacggatcgcgcctacatccaggaactgaacaacgataccctgaatgcgctggcgcagctgaagagcgagtcctcggtggaacagaagtcagctgcgacggaggccacggagcgactgcagcaggcggaggccaacatccaggcggacgttcgccagctgtccgcggacgtgggcattctcaacaagcacttcgcctcgactaacgagagcaatgccaagctgaacgagggactcgaagcgctcggtaagttcaacaacatcatgatgaccaactcggaggtcgtgctggacacgcagcgcaaggtggacttcggcacactgaacgtggtgcagcgggttggcaagctgctggcggaggaaatggccacgctgagcggactgctgaaggagcgcttctcgtcgctggacggagcggtggtgagcatccagcaggaggcgaacaagaacatcagcggactgctggaaacggagctgaaccaggtgtggcaccgcatcgagatcatggccggcgagatcagccagagccggctgatgctcggagatatccagtccgcttccgatggctacaacaacagcactctcatcaccatgatgggtctcggcagccgcgtggaggagaccaagaaacacatgatcgacatggacgagaacctcaactatctgctgggcaagctgtcgctcatgtccaccgagttcgccagcatcaagaagggcctggccgactccctcgaggatctgcgcaactccttccacggcctccacgagcggatgcccacgggtcccggtccgcacaacatcgacaagaacacgtatctgaccgacgtcaatctcctgtccaagcgccacgctgagcccggtcgggagtag

SEQ ID NO: 10530 - protein, 554 aa, DROSOPHILA; identical to SEQ ID NO: 10521

SEQ ID NO: 10531 - DNA, 10147 bp, DROSOPHILA
gttttccgcgaggaaacgcataggtggcgctgatgtgcagcagcagcccccagtgaaaagcttcacacccccgcagcacagcatcgattttccaatacaattttcacacatgccaccaacggcaaggtgaattttccaccttttacccatcacaaaagcaattttcacactttcttttcattcaacaccttgtggtcagtggttttgtggcgtaaaaactgctttttcagctgctctaaaattaaataagctcacatttgtttcaacagctcttatgaaaattctcttgcttttttgatttcactctagtattgatctatcggttatcgtcgagggctccaggttctctatagagatgggctcacatcaaactcacgcacgtcacgatacattaatagtcggattccactagcacattccgcagttaaatcttgaaatacttgttggtaattattaaaaatttaacataagcttgcatttttgtgctattttccaaattcttcaatgcaacttgttcactccagtaatataaatgttttgtaccacaactttaagccaatttctttttaattgcttataataaagaacaaatttattaattactttattatttttatttaatatgttctctaacattttaaatgcttataagtcgccgccaagtacagaagtatcagcaagaaaatatcgattgtaaattgatcgaattctgttttacatcactaatcggcagcggctgcaataaatttccgtaaaaaccgaagtaatccgcaattaaagaaagcaaaggacctgcatccgtgtgagatcgttcggcaccggtgccggcacatgaaatcctatcgagtgaccagtggaacagtgcgtacagcgccccggggcaactgaaaagataacctccaaagtccgtagacagcaggcagatgcacctgctccaccctttcccctcccaaatgcaagtgaaaatcgcgtttaaatagtgaataaaccctgcccagccatgtcgacgacgtcggtggtgcagcagttcgtcaacgggcttaagtcccgcaaccggaatgtacagaacaaggcaacccaggatctgctcttctatgtgaagaccgagctacgcgaaatgtcccaggaggagctggcccaatttttcgacgagttcgaccatcacattttcacgatggtgaatgcgacagatatcaacgagaaaaaaggcggtgccctggccatgagtgagttcctggctccccggcagtgcttgagaggatttaacgtcttccctttcagagtgcctgattaactgcgagggcagtcttactgccaggaagggcatttcgccctatctcaaccgcctgcgcgatcttctgctaatcaacgatgtgtccgtcatggagattgccgcccgctccctggtcaaattggccaacatgcccacctccaagggcgccgattccttcgactttgatattaagaaggcttttgaggtgctcagaggcgagagacaagaggtgaattataagggaaacctacaaattaagcttttaagtctgattttgagatgaagatggaaaaactttataatgaaaatgaaaatagtagttgtaagcatggctagagttatccaaattcatttatatattatttttttcagtaccgccgccattcagccgtctttatcctccgtgagctggctatcgccttgcccacatacttctaccagcacatcctgaccttcttcgaggttatctttaacgccatcttcgatcccaaacctgctatacgagagtcagctggcgaggctttgagggcggctttgattgtcaccgctcagcgagagagcaccaagcagtccagtgaaccacagtggtacagaatctgctatgacgaggcgaatggaagcttcaatgcagacttgggctctagcaaggatcagaaaggcgtgacccgagacgatcgcattcacggtggcctcgtcgtcttcaacgagctctttcgctgtgccaatgccacctgggagcggcgctacacgtctctgaagacgctgttccccaagacccaacacaataagttcctggaggccagcagttcgtcgagtatgggttcccagctgaatactctagtgccgcggctaaaggtgcccttcattgacaagctcggcagcacccaaacgcatttgggtgagggagagcatcacaaaggagttgccaagttcgcgagcgtgagtctaacgatcaaatacctccacacacgaatgtatttgtcattttcatttatttaccttttggtttacgtagtatgtactttacatgtatctaaaaaccaagcgatgcctgacgggaggaaatcagctgacctaattatagtttaaaaattgtgtaaaatgtagcagtagagtgtgattcgttaccagtagtaattgtggggcggcaatcatttagacaagcatgtttgtattaaaatagtatattttccatttgttcattacaaaaaagatattttaatgtttgttaatttaaaatacaaactatttagttatgtttaagcaagtaactaataatatcgacatccagcagcacaacgtactggagtccgcatatgctcaggagatccttcaggagcactacacctccatttgcgacaatgttttggagcagcgaacttcgaagtctccgtatgtacagcaggcactccttcaaatacttcctcgattggctgcctttaaccgcgcggtgtttgtggaaaaatacctgcagacatgcgtgtcgcatttaatgcagatcctgcgaggcaaggagaaggatcgcacggtggcgtacataaccattggttacatggctgtagcggtgcagagtgcgatcgaagttcatttatccagtataatgactagcgtgaaggtcgccttgccgtcaaaggatttgaccagcaaacgaaaggtaccagtggatcctgcggtctttgcctgcataacgcttcttgctcatgccgttaagtcggagatcgccgacgatgttaaggatatccttgagcagatgttctacacgggtctctcgccagctctgactgtttgcctgagggaactctccgagaatgtgccgcagcttaagtcggccattacagaaggattgatcggaatcctatcccaggtgctgatgaacaaggcggcaattttaccatacactgctttgccaacgatcgccatcgatggctcgctaatgcagaatggtgacggagcaaccacagtgctggcactcaaaacgctgggtaccttcaactttgaggagcaaaacatgctggactttgtgcaacggtaatttaatttaatttactatattttagttatattacaaggtttgatttctttttcagatgtgctgactacttcatcgttcacgagcagcaggagattcgtctggaggcagtgcaaacatgcacacgactccttaaactggcagtgcaatcctctgaaagtatggagaactccaagaccctcagcgacaccgtttcccacgtgattgagcgcctgcttatggtagccattactgatatggactgtaatgtgcgaatacgaattctacgttcgctggacgagacctttgatgggaagcttgctcagccagagtctctaaattcgctatttattacgctgcacgatgaaatctttgagatccgggagctggcaatggttaccattggaagattgtcgtccataaacccggcttatgtgatgcccaagctaagaaccaccatgatcgaattgatcacggatctaaagtactcgggaatgagtcgaaacaaggagcagagcgcaaagatgcttgaccatttggtgataagcacgcccaggctaatatcctcttacatgaatccgatcctcaaagccttagtgcccaagttgcatgagccggaatcgaatccaggagttattttaaatgtgcttcgcacaattggtgatttagcagaggttaatggaggctccgatgaaatggaattgtgggcagatgaccttctgtccattttactcgaaatgctgggcgacgctggcagtccggataagcgaggagtggctctgtggacgttgggacagttaatcagtgcaacaggcagggtggttaccccatatcacaagtaccccgtgctcatagatattttgattaatttccttaaaacggaacaacgtcgatccattcgaagggaaacgatacgagtgctgggcttgttgggagccatggatccttacaagcacaagatgaacaagggcttgattgatagccaaaaggataatgttttaatagcatactccgatggcaaagtcgatgaaagtcaggacatctccaccgctgagttgctagttaacatgggtaacgcattggatgagtattatcccgctgtggccatagctgcattgatgaggattctacgggatcccacgttaagtacacgtcacaccagcgtggtgcaggcggttacttttatcttccagagcctgggcatcaaatgtgtgccgtacttggcccaagtgcttcccaatttgctggacaatgtacgcactgcagataataatctaagggagtttctcttccagcagctcgccattctggtggcttttgtcaagctgcatatcatcagctacatgggagatatttttaagctgatcaaagaattttggaccattaatacgcctctgcaaaacactctaatcaatttgattgaacagatcgccgtggctttgggatgcgagtttagggattatttggcggagctgatcccacaaattctgcgagtgttgcagcacgataactccaaggatagaatggtcacgagaaggttgctccaagctcttcaaaagtttggcagcactttgggttactatctgccgctgattttgcctccgatcgtgaaactcttcgattctccgtacgtaccacaacaggtgtcaatggtagccctggaaacgatcaacaatctagcctgtcagctggacttcaccgacttctcctcgcgcatcatacatccgttggttcgagtgctggacgctgagccagagcttcgggaccaagctatgacaacccttcgctcactggcaaagcaactgggcaagaagtacctcgtgttcgtgcctatggtccagcgcactctcaacaaacatcgcattgtggatcccgagtacgaggagctactgagtaagattaagtcctgcagcacactggcggattcctatggggccggggagtcagaactgcggccgtccaggttcaaaaacaacgagccatttgtgaccgacagaaatagcaataataaaaatctgcaggttcgttgataatagtttattggtgtaaaatgattaattttcttttaggtcaccacaaacgaactacgaacggcgtggcaggtgacgcggcgggtgtccaaggacgactgggtggagtggctaaagcggttgtccattggcctgctgaaggaatcgccttcgcacgcactgagagcctgtcgttcgttggcccaagagtacgatacgctgttgagagatctttttaacgccgcatttatctcctgttggacggaactatcgccggatttgaaaaacgagctaacacagtcactgattcaagccctgcaagttaccgacatgccggaaatcactcagacaatcctcaacttggccgagtttatggagcattgcgatcgcgatccaataccaatagaaactaagctattgggtactcgagcgatggcttgcagagcgtatgccaaggcattgcgctacaaggaggaggagttccttctgcgagaagattcccaagtttttgagtccttgattctaatcaacaacaagctgcagcaaagagaagcagcggaaggtctgctcacaaggtatcgtaatgcagccaacgaactaaatgttcaaggaagatggtatgaaaaacttcacaattgggatgaggcgctggaacactatgaaaggaatctaaagacggattcctcggacttggaggcgcgactcggtcacatgcgctgcttggaggccctcggagattggtcggagctgagcaacgtgaccaagcacgagtgggaaaacttcggtacagaggccaaatcaagagcaggacccttggccgcagtggccgcctggggtctccaggattgggaggcgatgcgggagtacgtaaggtgtataccagaggatacccaagatggaagctactatcgtgctgtcctcgccgtgcatcatgacgactttgagaccgcacagcgccttattgacgaaacaagggacctcctcgacacggagctcacatcaatggcgggcgagtcctatgaaagagcctacggagccatggtatgtgtacaaatgctggcggagctggaggaggtcatccaatacaagctcattcccgagaggcgagagccgttaaagaccatgtggtggaagcgtcttcaaggaggccagcgactagtagaagactggcgaaggatcatccaggtgcactcgctggtggtaaaaccgcacgaggacatacatacctggctgaagtacgctagtctgtgcaggaagagcggctccctgcacttgtcccataaaactctggtgatgctgctaggcaccgatcccaagcttaatccgaaccagccactgccttgtaatcaaccacaggtgacctatgcgtacaccaagtacatggctgccaataatcagctgcaggaagcctacgagcagttgacgcacttcgtcagcacctatagtcaggagctaagctgtttacctccggaagcactaaagcaacaagatcagcgactcatggcccgctgctatctgcgcatggccacctggcagaacaagctgcaggacagcatcagaccggatgccattcaaggcgcactcgaatgctttgaaaaggccaccagctatgatcccaactggtacaaggcctggcacctgtgggcgtacatgaactttaaggtggtgcaggcccaaaaatcggcgctggacaaacaacagcctccgggagccagcatgggaatgacaatgggctctggcctcgacagtgatctaatgatcatacagcgatacgccgttccggcagttcagggattcttccgttcaatcagccttataaaagggaattcgctgcaggatacgctacgtttgttaactctttggtttgactatggcaaccatgcagaggtgtacgaggcgctgctctctggaatgaagctgatcgagatcaacacctggcttcaggttatcccgcagcttattgcccgcatcgatacccaccgtcagttggtgggtcaattaatccaccaactcctaatggacataggaaagaatcacccgcaggctctggtctatcctctaacagtcgcttccaagtcagcatcattggcgcgcaggaacgccgcctttaagatcctcgactcgatgaggaaacactcgcccaccttggtagagcaggcggtcatgtgtagtgaggagctcatccgtgtggcgattctgtggcacgaacagtggcacgaaggtttggaggaagcctcgcgtctttactttggagatcgcaacgtaaagggcatgtttgagatcttggagccactgcatgctatgctggagaggggaccacaaacactcaaggagacatccttctcgcaggcctatggacgcgagctgacagaggcgtacgagtggtcgcaacggtacaagacatcggcggtggtgatggatctggatcgagcgtgggacatttactatcacgtcttccaaaagatctcgcgccagctgccacaacttacctcgctggagctgccgtatgtctcgcccaaactgatgacgtgcaaagatctcgaactggcagtgcccgggtcctacaatcctggccaggagctcatccggattagtatcattaaaaccaaccttcaggtaatgataacattttctttggaattcttattggcttgtgggtattaatgcaagtttctacacataaattataggtgattacttccaagcagcggccgcgaaaactgtgcatacgcggctccaatggcaaggactatatgtaccttctaaagggacacgaggaccttcgtcaggacgaacgcgtgatgcagctattctccctggtgaacacattgctgttggatgaccccgacactttccgtcgtaacttggccatccagcggtatgcggttatcccgctcagtaccaactcgggtcttattggttgggtgccacattgtgacacccttcatacgctaatccgggactaccgcgacaagaagaaggtgccactgaatcaggagcatcgcaccatgctcaattttgcgccagactatgatcacctcacgctgatgcagaaggtggaagtgttcgagcatgcgttgggtcagacgcaaggcgacgacttggccaagttgctgtggctcaagtctccgtcctctgaattgtggtttgaacggagaaacaactatacccgctcactggcagtcatgtcaatggttggatatatcctaggtctgggcgatcgtcatccatcgaaccttatgctggatcgtatgagcggcaagatactgcacatagactttggcgactgcttcgaggtggccatgacccgcgaaaagtttcccgaaaagatacccttccgtctcacccggatgctaataaaggcaatggaggtcactggcatcgagggcacctacagacgcacctgcgaaagcgtgatgctggtgcttcgccgcaacaaggattccctgatggcggtgctggaggcctttgtctatgatccgctgctcaactggagactgttggatgtggacaagaagggtaacgatgcggtggctggggcgggtgctccaggtggacgtggcggttccggaatgcaggatagcctcagtaactccgtagaggactccctgcccatggccaagtcgaagccctacgatccgacgctacagcaaggcggcctgcacaacaacgtggccgacgagacgaacagcaaagccagccaggtaatcaagcgggtcaagtgcaagctaacaggcaccgacttccagacggaaaagagcgtaaacgagcagtcgcaggtggagctgctcatccagcaggcgaccaataacgagaacctctgccagtgctacattggctggtgtccgttttggtaggtcaaccgatccggcatagatcccgtgcgacaaccggcaattgactgagcgagattacgaacttacgattactactactaattgaattgggtgcatgcatctctggagaggattccgaggtgactgcaaactaggcattaagtataaaatatttttataatttatgttagagatacgcttaattatctattatttgtaaatcagattggaaactagattccaactttgtataaaccattaaaacccgtgaaacaatcaacgttctaaaagtgtagtttaatttgatttacccatccggccctccgaaaatcaattagaccatttgtataattcattattttttatttggaaatccaattgcaagtaaatttaattttttaaatcaccaaattacccgcacaactcggtattgtgtcgtttttttcgcaaccaagtagaaaaacaacgaaagatttgcgaaaattttcaatatttttcaaacatctaaattattaggactcctaacgggagcggtgattaatggtaactgctacttgcaggccacccaaaaatcgggggcaccacaaataaactaaatcctgcacaaagaatatttatatttatatgtagaagataggtagacactaaaactgcacattaaactagtcctaagtatagcagtatgggttaaagggtgcgcgacttagcaattgttccgcttgccacgctgctccttgcgccaggcgtcgatgcgctgcttcagctcaatgttggccaccagcatgtcctcggtgagtggctgtcggttgaacgggtccgtgcagctgttgagcaagtggcgggtaataatcgcccgatccatcaccgtgccggagggaagcaccacggggtccgacattagcgtgtccatcagcggatccttgaactcatcgggtgcgtcggcgcattcatcttcagtctgtaggttggtaactgcaagggaaacgtttgcatttgcatttcaatccgatttatttagttg

SEQ ID NO: 10532 - DNA, 7413 bp, DROSOPHILA
atgtcgacgacgtcggtggtgcagcagttcgtcaacgggcttaagtcccgcaaccggaatgtacagaacaaggcaacccaggatctgctcttctatgtgaagaccgagctacgcgaaatgtcccaggaggagctggcccaatttttcgacgagttcgaccatcacattttcacgatggtgaatgcgacagatatcaacgagaaaaaaggcggtgccctggccatgaagtgcctgattaactgcgagggcagtcttactgccaggaagggcatttcgccctatctcaaccgcctgcgcgatcttctgctaatcaacgatgtgtccgtcatggagattgccgcccgctccctggtcaaattggccaacatgcccacctccaagggcgccgattccttcgactttgatattaagaaggcttttgaggtgctcagaggcgagagacaagagtaccgccgccattcagccgtctttatcctccgtgagctggctatcgccttgcccacatacttctaccagcacatcctgaccttcttcgaggttatctttaacgccatcttcgatcccaaacctgctatacgagagtcagctggcgaggctttgagggcggctttgattgtcaccgctcagcgagagagcaccaagcagtccagtgaaccacagtggtacagaatctgctatgacgaggcgaatggaagcttcaatgcagacttgggctctagcaaggatcagaaaggcgtgacccgagacgatcgcattcacggtggcctcgtcgtcttcaacgagctctttcgctgtgccaatgccacctgggagcggcgctacacgtctctgaagacgctgttccccaagacccaacacaataagttcctggaggccagcagttcgtcgagtatgggttcccagctgaatactctagtgccgcggctaaaggtgcccttcattgacaagctcggcagcacccaaacgcatttgggtgagggagagcatcacaaaggagttgccaagttcgcgagccacaacgtactggagtccgcatatgctcaggagatccttcaggagcactacacctccatttgcgacaatgttttggagcagcgaacttcgaagtctccgtatgtacagcaggcactccttcaaatacttcctcgattggctgcctttaaccgcgcggtgtttgtggaaaaatacctgcagacatgcgtgtcgcatttaatgcagatcctgcgaggcaaggagaaggatcgcacggtggcgtacataaccattggttacatggctgtagcggtgcagagtgcgatcgaagttcatttatccagtataatgactagcgtgaaggtcgccttgccgtcaaaggatttgaccagcaaacgaaaggtaccagtggatcctgcggtctttgcctgcataacgcttcttgctcatgccgttaagtcggagatcgccgacgatgttaaggatatccttgagcagatgttctacacgggtctctcgccagctctgactgtttgcctgagggaactctccgagaatgtgccgcagcttaagtcggccattacagaaggattgatcggaatcctatcccaggtgctgatgaacaaggcggcaattttaccatacactgctttgccaacgatcgccatcgatggctcgctaatgcagaatggtgacggagcaaccacagtgctggcactcaaaacgctgggtaccttcaactttgaggagcaaaacatgctggactttgtgcaacgatgtgctgactacttcatcgttcacgagcagcaggagattcgtctggaggcagtgcaaacatgcacacgactccttaaactggcagtgcaatcctctgaaagtatggagaactccaagaccctcagcgacaccgtttcccacgtgattgagcgcctgcttatggtagccattactgatatggactgtaatgtgcgaatacgaattctacgttcgctggacgagacctttgatgggaagcttgctcagccagagtctctaaattcgctatttattacgctgcacgatgaaatctttgagatccgggagctggcaatggttaccattggaagattgtcgtccataaacccggcttatgtgatgcccaagctaagaaccaccatgatcgaattgatcacggatctaaagtactcgggaatgagtcgaaacaaggagcagagcgcaaagatgcttgaccatttggtgataagcacgcccaggctaatatcctcttacatgaatccgatcctcaaagccttagtgcccaagttgcatgagccggaatcgaatccaggagttattttaaatgtgcttcgcacaattggtgatttagcagaggttaatggaggctccgatgaaatggaattgtgggcagatgaccttctgtccattttactcgaaatgctgggcgacgctggcagtccggataagcgaggagtggctctgtggacgttgggacagttaatcagtgcaacaggcagggtggttaccccatatcacaagtaccccgtgctcatagatattttgattaatttccttaaaacggaacaacgtcgatccattcgaagggaaacgatacgagtgctgggcttgttgggagccatggatccttacaagcacaagatgaacaagggcttgattgatagccaaaaggataatgttttaatagcatactccgatggcaaagtcgatgaaagtcaggacatctccaccgctgagttgctagttaacatgggtaacgcattggatgagtattatcccgctgtggccatagctgcattgatgaggattctacgggatcccacgttaagtacacgtcacaccagcgtggtgcaggcggttacttttatcttccagagcctgggcatcaaatgtgtgccgtacttggcccaagtgcttcccaatttgctggacaatgtacgcactgcagataataatctaagggagtttctcttccagcagctcgccattctggtggcttttgtcaagctgcatatcatcagctacatgggagatatttttaagctgatcaaagaattttggaccattaatacgcctctgcaaaacactctaatcaatttgattgaacagatcgccgtggctttgggatgcgagtttagggattatttggcggagctgatcccacaaattctgcgagtgttgcagcacgataactccaaggatagaatggtcacgagaaggttgctccaagctcttcaaaagtttggcagcactttgggttactatctgccgctgattttgcctccgatcgtgaaactcttcgattctccgtacgtaccacaacaggtgtcaatggtagccctggaaacgatcaacaatctagcctgtcagctggacttcaccgacttctcctcgcgcatcatacatccgttggttcgagtgctggacgctgagccagagcttcgggaccaagctatgacaacccttcgctcactggcaaagcaactgggcaagaagtacctcgtgttcgtgcctatggtccagcgcactctcaacaaacatcgcattgtggatcccgagtacgaggagctactgagtaagattaagtcctgcagcacactggcggattcctatggggccggggagtcagaactgcggccgtccaggttcaaaaacaacgagccatttgtgaccgacagaaatagcaataataaaaatctgcaggtcaccacaaacgaactacgaacggcgtggcaggtgacgcggcgggtgtccaaggacgactgggtggagtggctaaagcggttgtccattggcctgctgaaggaatcgccttcgcacgcactgagagcctgtcgttcgttggcccaagagtacgatacgctgttgagagatctttttaacgccgcatttatctcctgttggacggaactatcgccggatttgaaaaacgagctaacacagtcactgattcaagccctgcaagttaccgacatgccggaaatcactcagacaatcctcaacttggccgagtttatggagcattgcgatcgcgatccaataccaatagaaactaagctattgggtactcgagcgatggcttgcagagcgtatgccaaggcattgcgctacaaggaggaggagttccttctgcgagaagattcccaagtttttgagtccttgattctaatcaacaacaagctgcagcaaagagaagcagcggaaggtctgctcacaaggtatcgtaatgcagccaacgaactaaatgttcaaggaagatggtatgaaaaacttcacaattgggatgaggcgctggaacactatgaaaggaatctaaagacggattcctcggacttggaggcgcgactcggtcacatgcgctgcttggaggccctcggagattggtcggagctgagcaacgtgaccaagcacgagtgggaaaacttcggtacagaggccaaatcaagagcaggacccttggccgcagtggccgcctggggtctccaggattgggaggcgatgcgggagtacgtaaggtgtataccagaggatacccaagatggaagctactatcgtgctgtcctcgccgtgcatcatgacgactttgagaccgcacagcgccttattgacgaaacaagggacctcctcgacacggagctcacatcaatggcgggcgagtcctatgaaagagcctacggagccatggtatgtgtacaaatgctggcggagctggaggaggtcatccaatacaagctcattcccgagaggcgagagccgttaaagaccatgtggtggaagcgtcttcaaggaggccagcgactagtagaagactggcgaaggatcatccaggtgcactcgctggtggtaaaaccgcacgaggacatacatacctggctgaagtacgctagtctgtgcaggaagagcggctccctgcacttgtcccataaaactctggtgatgctgctaggcaccgatcccaagcttaatccgaaccagccactgccttgtaatcaaccacaggtgacctatgcgtacaccaagtacatggctgccaataatcagctgcaggaagcctacgagcagttgacgcacttcgtcagcacctatagtcaggagctaagctgtttacctccggaagcactaaagcaacaagatcagcgactcatggcccgctgctatctgcgcatggccacctggcagaacaagctgcaggacagcatcagaccggatgccattcaaggcgcactcgaatgctttgaaaaggccaccagctatgatcccaactggtacaaggcctggcacctgtgggcgtacatgaactttaaggtggtgcaggcccaaaaatcggcgctggacaaacaacagcctccgggagccagcatgggaatgacaatgggctctggcctcgacagtgatctaatgatcatacagcgatacgccgttccggcagttcagggattcttccgttcaatcagccttataaaagggaattcgctgcaggatacgctacgtttgttaactctttggtttgactatggcaaccatgcagaggtgtacgaggcgctgctctctggaatgaagctgatcgagatcaacacctggcttcaggttatcccgcagcttattgcccgcatcgatacccaccgtcagttggtgggtcaattaatccaccaactcctaatggacataggaaagaatcacccgcaggctctggtctatcctctaacagtcgcttccaagtcagcatcattggcgcgcaggaacgccgcctttaagatcctcgactcgatgaggaaacactcgcccaccttggtagagcaggcggtcatgtgtagtgaggagctcatccgtgtggcgattctgtggcacgaacagtggcacgaaggtttggaggaagcctcgcgtctttactttggagatcgcaacgtaaagggcatgtttgagatcttggagccactgcatgctatgctggagaggggaccacaaacactcaaggagacatccttctcgcaggcctatggacgcgagctgacagaggcgtacgagtggtcgcaacggtacaagacatcggcggtggtgatggatctggatcgagcgtgggacatttactatcacgtcttccaaaagatctcgcgccagctgccacaacttacctcgctggagctgccgtatgtctcgcccaaactgatgacgtgcaaagatctcgaactggcagtgcccgggtcctacaatcctggccaggagctcatccggattagtatcattaaaaccaaccttcaggtgattacttccaagcagcggccgcgaaaactgtgcatacgcggctccaatggcaaggactatatgtaccttctaaagggacacgaggaccttcgtcaggacgaacgcgtgatgcagctattctccctggtgaacacattgctgttggatgaccccgacactttccgtcgtaacttggccatccagcggtatgcggttatcccgctcagtaccaactcgggtcttattggttgggtgccacattgtgacacccttcatacgctaatccgggactaccgcgacaagaagaaggtgccactgaatcaggagcatcgcaccatgctcaattttgcgccagactatgatcacctcacgctgatgcagaaggtggaagtgttcgagcatgcgttgggtcagacgcaaggcgacgacttggccaagttgctgtggctcaagtctccgtcctctgaattgtggtttgaacggagaaacaactatacccgctcactggcagtcatgtcaatggttggatatatcctaggtctgggcgatcgtcatccatcgaaccttatgctggatcgtatgagcggcaagatactgcacatagactttggcgactgcttcgaggtggccatgacccgcgaaaagtttcccgaaaagatacccttccgtctcacccggatgctaataaaggcaatggaggtcactggcatcgagggcacctacagacgcacctgcgaaagcgtgatgctggtgcttcgccgcaacaaggattccctgatggcggtgctggaggcctttgtctatgatccgctgctcaactggagactgttggatgtggacaagaagggtaacgatgcggtggctggggcgggtgctccaggtggacgtggcggttccggaatgcaggatagcctcagtaactccgtagaggactccctgcccatggccaagtcgaagccctacgatccgacgctacagcaaggcggcctgcacaacaacgtggccgacgagacgaacagcaaagccagccaggtaatcaagcgggtcaagtgcaagctaacaggcaccgacttccagacggaaaagagcgtaaacgagcagtcgcaggtggagctgctcatccagcaggcgaccaataacgagaacctctgccagtgctacattggctggtgtccgttttggtag

SEQ ID NO: 10533 - protein, 2470 aa, DROSOPHILA
MSTTSVVQQFVNGLKSRNRNVQNKATQDLLFYVKTELREMSQEELAQFFDEFDHHIFTMVNATDINEKKGGALAMKCLINCEGSLTARKGISPYLNRLRDLLLINDVSVMEIAARSLVKLANMPTSKGADSFDFDIKKAFEVLRGERQEYRRHSAVFILRELAIALPTYFYQHILTFFEVIFNAIFDPKPAIRESAGEALRAALIVTAQRESTKQSSEPQWYRICYDEANGSFNADLGSSKDQKGVTRDDRIHGGLVVFNELFRCANATWERRYTSLKTLFPKTQHNKFLEASSSSSMGSQLNTLVPRLKVPFIDKLGSTQTHLGEGEHHKGVAKFASHNVLESAYAQEILQEHYTSICDNVLEQRTSKSPYVQQALLQILPRLAAFNRAVFVEKYLQTCVSHLMQILRGKEKDRTVAYITIGYMAVAVQSAIEVHLSSIMTSVKVALPSKDLTSKRKVPVDPAVFACITLLAHAVKSEIADDVKDILEQMFYTGLSPALTVCLRELSENVPQLKSAITEGLIGILSQVLMNKAAILPYTALPTIAIDGSLMQNGDGATTVLALKTLGTFNFEEQNMLDFVQRCADYFIVHEQQEIRLEAVQTCTRLLKLAVQSSESMENSKTLSDTVSHVIERLLMVAITDMDCNVRIRILRSLDETFDGKLAQPESLNSLFITLHDEIFEIRELAMVTIGRLSSINPAYVMPKLRTTMIELITDLKYSGMSRNKEQSAKMLDHLVISTPRLISSYMNPILKALVPKLHEPESNPGVILNVLRTIGDLAEVNGGSDEMELWADDLLSILLEMLGDAGSPDKRGVALWTLGQLISATGRVVTPYHKYPVLIDILINFLKTEQRRSIRRETIRVLGLLGAMDPYKHKMNKGLIDSQKDNVLIAYSDGKVDESQDISTAELLVNMGNALDEYYPAVAIAALMRILRDPTLSTRHTSVVQAVTFIFQSLGIKCVPYLAQVLPNLLDNVRTADNNLREFLFQQLAILVAFVKLHIISYMGDIFKLIKEFWTINTPLQNTLINLIEQIAVALGCEFRDYLAELIPQILRVLQHDNSKDRMVTRRLLQALQKFGSTLGYYLPLILPPIVKLFDSPYVPQQVSMVALETINNLACQLDFTDFSSRIIHPLVRVLDAEPELRDQAMTTLRSLAKQLGKKYLVFVPMVQRTLNKHRIVDPEYEELLSKIKSCSTLADSYGAGESELRPSRFKNNEPFVTDRNSNNKNLQVTTNELRTAWQVTRRVSKDDWVEWLKRLSIGLLKESPSHALRACRSLAQEYDTLLRDLFNAAFISCWTELSPDLKNELTQSLIQALQVTDMPEITQTILNLAEFMEHCDRDPIPIETKLLGTRAMACRAYAKALRYKEEEFLLREDSQVFESLILINNKLQQREAAEGLLTRYRNAANELNVQGRWYEKLHNWDEALEHYERNLKTDSSDLEARLGHMRCLEALGDWSELSNVTKHEWENFGTEAKSRAGPLAAVAAWGLQDWEAMREYVRCIPEDTQDGSYYRAVLAVHHDDFETAQRLIDETRDLLDTELTSMAGESYERAYGAMVCVQMLAELEEVIQYKLIPERREPLKTMWWKRLQGGQRLVEDWRRIIQVHSLVVKPHEDIHTWLKYASLCRKSGSLHLSHKTLVMLLGTDPKLNPNQPLPCNQPQVTYAYTKYMAANNQLQEAYEQLTHFVSTYSQELSCLPPEALKQQDQRLMARCYLRMATWQNKLQDSIRPDAIQGALECFEKATSYDPNWYKAWHLWAYMNFKVVQAQKSALDKQQPPGASMGMTMGSGLDSDLMIIQRYAVPAVQGFFRSISLIKGNSLQDTLRLLTLWFDYGNHAEVYEALLSGMKLIEINTWLQVIPQLIARIDTHRQLVGQLIHQLLMDIGKNHPQALVYPLTVASKSASLARRNAAFKILDSMRKHSPTLVEQAVMCSEELIRVAILWHEQWHEGLEEASRLYFGDRNVKGMFEILEPLHAMLERGPQTLKETSFSQAYGRELTEAYEWSQRYKTSAVVMDLDRAWDIYYHVFQKISRQLPQLTSLELPYVSPKLMTCKDLELAVPGSYNPGQELIRISIIKTNLQVITSKQRPRKLCIRGSNGKDYMYLLKGHEDLRQDERVMQLFSLVNTLLLDDPDTFRRNLAIQRYAVIPLSTNSGLIGWVPHCDTLHTLIRDYRDKKKVPLNQEHRTMLNFAPDYDHLTLMQKVEVFEHALGQTQGDDLAKLLWLKSPSSELWFERRNNYTRSLAVMSMVGYILGLGDRHPSNLMLDRMSGKILHIDFGDCFEVAMTREKFPEKIPFRLTRMLIKAMEVTGIEGTYRRTCESVMLVLRRNKDSLMAVLEAFVYDPLLNWRLLDVDKKGNDAVAGAGAPGGRGGSGMQDSLSNSVEDSLPMAKSKPYDPTLQQGGLHNNVADETNSKASQVIKRVKCKLTGTDFQTEKSVNEQSQVELLIQQATNNENLCQCYIGWCPFW

SEQ ID NO: 10534 - DNA, 3328 bp, DROSOPHILA
gcgttacacaatggcggccaccgacgaccctcggccattccccgcccccgcagttgcttccactgcgccgctccttttggggccttttttgatttgttatttcagtcgtctggtttgcacttctgtgtacttttgctgcgctgctgctgcttcttcttcttctcttcttcaacacgctgcttacgcttccacgtagcgattgggagggcctgaatccgcggccactttgtcgcgcacttccccacgatcagtttccaccgttttcgctcgcttttggggcgctttctccgccgtttctgcagtttttccaggccacgctctttttgtatccgtatccttatcaaaacaaaaatgactggcgtggttttccagggctgagcgaacgggcagagctgcacccccgccgaacatcgagtaatcgactatcggccggccagggctggtggcgctagagagcctaacactgggtgggtcgataacagctatcgattatttggacactccgtgctgacaattcagctgattttaacctttcaattagtttatattcagatatcaacaaagtgtaattgttattttatctatactcgattttgtaactttgcgcccttcttagctttagttattctattattcggttcctttttgtttaatgagtcataatatgttctaaccgttacaaacacatatttatttgcgacccttaataaatcgctgttaaataaaaatctttcattgataggctacttaaagtaattataatattttggtttgctcgcacaaatttgattttaaaatctaaatcaataagcaatgaaattaaaattctagctttttaatagctgttagagataacttattcgttagcctaaacctatcgatagttgtcagaacttgttttgctttttacgttaaaacaaaacgcaacataaacaattgggagaattcatcacactatcctcagatttacatactttcaccggaaggtgaatctgtttaccatgggcgacatcgaagtaaagaaggaggaacaaccgacgacgccctccaattcctcgtccagtgacgacgacgaggaggccccaggctagtctaaatagttaggtctttactgtcactcattaattgaattgaattctagacgacacaatggataaggttcgacgcttctttgcaaacactctacatctcggcggctcctcggacgcaaaggaggaagttaaagtagagaaggtgagcggagcacccgataatttgattatcatattgattaaatcgcaaatttgcaggttattccagatttgagttttgacggctttgccgaacattggcgtgtgcatggtttccgcaagattgtgaccatggtgggagccggcatatctacatgttggtacattctatataccattgtaaaaacttactaagttatcgccattcctagctgctggcattccggatttcagatccccaggttccgggttatacagcaatctgaagaagtacgagctgccacatcctacggccatattcgatctggactacttcgaaaagaatccagcgccgttttttgcactggccaaggaactttaccctggatccttcattcccacgccggcccactactttatccgtttgcttaacgacaagggactactgcagcgccactacacccagaacatagacacgctagaccggcttactggcctgcccgaggacaagatcattgaggcccatggcagcttccacaccaaccactgcattaagtgccgcaaggagtacgacatggactggatgaaggcggagatcttcgccgatcgtctgcccaaatgccaaaagtgccaaggcgttgttaaaccagacattgttttctttggcgaaaacttgccaaagagattttactccagtcctgaagaggatttccaggattgcgatctgctgatcatcatgggcacatcgttggaagtgcaaccgtttgcttcactggtgtggagaccaggaccacgttgcattcgcctcttgatcaatcgcgatgcagtgggtcaggccagctgtgtgctctttatggatcccaacacgcgatcgctactcttcgataagcccaataacactagggatgtggcctttctgggcgactgtgatgctggcgtaatggctctggccaaagccttgggctgggaccaagagctgcagcagctaattacaagtgaaaggaagaaactgagcggcagccagaatagtgaggagctgcaacaaggcaaagagaaaccgcaatcggacccggataagatgacttcgggcgatagggacaagaaggatgcttcgctttagaccctaagattagttagtaacatccgtagttaatttgtagttgaattgtgcaatttgtttacatgtggattacgtgtataaagcggacaatgccaagcgcaggcattgctggctaataccgcgagctttctttctcctccgtttccggcattcaattattcaagtgccatttgtgagccattagcgtgtcccttttggccgggccaccataaaccgcaaaaactgattgagttgctctgccgtttccggcgcacaaaaagcagcaaaccgccaacaaaggttaactctcgacatgtttctgtttcgttttctgctctgatccgggcttggctatggatttcgatgctggtgttggtgttggtgctgatgctgatttcgattcagttacagctgcccagcccctcgacatggctcgaccgctgctgtgggcgtggcatgtggcattctaactgcctgtttgtgtggcttacacggatgctgctcctgctcctgctcctcctcctgctgctgctgctactgctgcatcaacttaatgactcgcaatctgtcctgcagaagcacacacgcacaaagcgaaagagacacacacggtagaccggtaatgaagcttctgcggtgaattggccaatagaaaatacgtacgggcaggactaattaaaaccaagctcgcaatcgggccagcggatagctactgccggggtacacaaccggatattgttaatcgttgacaggggcgacggttcggaggtggatgcatggtatgatgggaggcatcccagcctgtcaacttcgggacatgaatggctgcagatgcattaggaaatcaaatgcagccacggaaatattgatagccacgcaatttgttgcagtttcagctgccactgctgttgccattggaattgcacttgcttttggcccaaaacttttgcaattaaagctaatggcctaagatcttgtctatgtgcaattttcccgagtcttgccttctcagcgaatgttt

SEQ ID NO: 10535 - DNA, 1162 bp, DROSOPHILA
catgggcgacatcgaagtaaagaaggaggaacaaccgacgacgccctccaattcctcgtccagtgacgacgacgaggaggccccagacgacacaatggataaggttcgacgcttctttgcaaacactctacatctcggcggctcctcggacgcaaaggaggaagttaaagtagagaaggttattccagatttgagttttgacggctttgccgaacattggcgtgtgcatggtttccgcaagattgtgaccatggtgggagccggcatatctacatctgctggcattccggatttcagatccccaggttccgggttatacagcaatctgaagaagtacgagctgccacatcctacggccatattcgatctggactacttcgaaaagaatccagcgccgttttttgcactggccaaggaactttaccctggatccttcattcccacgccggcccactactttatccgtttgcttaacgacaagggactactgcagcgccactacacccagaacatagacacgctagaccggcttactggcctgcccgaggacaagatcattgaggcccatggcagcttccacaccaaccactgcattaagtgccgcaaggagtacgacatggactggatgaaggcggagatcttcgccgatcgtctgcccaaatgccaaaagtgccaaggcgttgttaaaccagacattgttttctttggcgaaaacttgccaaagagattttactccagtcctgaagaggatttccaggattgcgatctgctgatcatcatgggcacatcgttggaagtgcaaccgtttgcttcactggtgtggagaccaggaccacgttgcattcgcctcttgatcaatcgcgatgcagtgggtcaggccagctgtgtgctctttatggatcccaacacgcgatcgctactcttcgataagcccaataacactagggatgtggcctttctgggcgactgtgatgctggcgtaatggctctggccaaagccttgggctgggaccaagagctgcagcagctaattacaagtgaaaggaagaaactgagcggcagccagaatagtgaggagctgcaacaaggcaaagagaaaccgcaatcggacccggataagatgacttcgggcgatagggacaagaaggatgcttcgctttag

SEQ ID NO: 10536 - protein, 355 aa, DROSOPHILA
MDKVRRFFANTLHLGGSSDAKEEVKVEKVIPDLSFDGFAEHWRVHGFRKIVTMVGAGISTSAGIPDFRSPGSGLYSNLKKYELPHPTAIFDLDYFEKNPAPFFALAKELYPGSFIPTPAHYFIRLLNDKGLLQRHYTQNIDTLDRLTGLPEDKIIEAHGSFHTNHCIKCRKEYDMDWMKAEIFADRLPKCQKCQGVVKPDIVFFGENLPKRFYSSPEEDFQDCDLLIIMGTSLEVQPFASLVWRPGPRCIRLLINRDAVGQASCVLFMDPNTRSLLFDKPNNTRDVAFLGDCDAGVMALAKALGWDQELQQLITSERKKLSGSQNSEELQQGKEKPQSDPDKMTSGDRDKKDASL

SEQ ID NO: 10537 - DNA, 9907 bp, DROSOPHILA
tgattgaacctcatgaactgttaggcagaatggtttgtgatggctccgagtgggttatgaactggactcaccttgaggtacttcgctgggtaatatagactactgcgggtctcgaggcattcgtagtgtgccgaattggcagtgtaggaaacatcatgtctggttaacgcgataattaaccaggtgatcacttcggcggtgaacgagaggaatgaaatcgcaataatgggcactgcctgtggaatggaacccaaataatagtctggcgcaggatttcacatattaaaatatccttgcagaccactatattgagccatacccgcaataattcgtaagcgatcgttggaaaaccaaccatttcgagtcctaaccgcaactaaatgcgatagcaaaaagtattttacacgaaaactagcaaatgtgctataattgtatttatttttcttttttgcaataattaaaacaatacttatatcgcttatcgcatttctgcggctggggcttgatatagtggcctgggaaaatgtagctaaattgcttataattaagaggcaattaatataatgtcaggtgttaagaatagattttcaagtagtttgtcatctctatcgtaaatcattcaaattcgtaatatcccaacacttttcaagtggatgctacacttctcgacatcactttgcactctcttatttattggctttccctcattcccacggaccttttgtttttgaatatttttggacgtaggagaatagcaaaatttataaaaattttatataaaaaggagtagatggcgctttagagctaagtagctagttgtagtgttggcaaacgtacacacttagcagagcaactgcaagaatcagctgtcacttgccagctgctcggcaaccctcttttttgtcatttctcttcccacgctgcttccgaaatcctgacgtcggcagcgcctaagcagcgaaaacaacatttaagtttcagtcttcaaacagcgcagtcgcaaccgcaagttaataaggagcaaatcgagaccgaaataggataaatttagagtcgtgttacttgaacatttccgtcaaagttttgggcatttatttatggctttgcccctttgcaataattcgcgagcttgttgaacagcaaaaaaaaaaaaaacagaaaacgaaaatcattgccattggcaacaacaaagtagagccgaaaaaaagggaaccgtagtcaaagcaagtggcgaaaaaaagacgaaaggcagtccaaaaattgccacaaacaacaaaagtctatacttattatttggaaaccacacaagtgctgaaatagaccatttttttttaaatacaaacacaaacaattaaagagtataaaaacgcgcaaaccaaaaggaaaacagctaaacacaaattctgataaacgaagaaaaaagccttcaagattcagataaagcaggaaatgcacgcgcttcaggaaggcgccaccgtgctgcaccaccagcagccaccgccacccacttctggcgaggatcacctgctcaccgctgatagtttcttttatgcacgcagcaatcccatggagaacgcggccgcagcagccgccgccgcagcagcgggcttgattgatccgcaccacaatcgcgatctccaccaggcgctggtggcctcgatagccaataatagtgtggccgccatcggcggtggcctgaccacagcggcagtcttgaagagtgccgctcagcagtcccagcaggcggtgcaacagaaccagaacgcggtagtggtgacaccgggactggaacagcccaaacaggaaccagcccaacaggcggcactggcgctgctcaaggagaatgtaaacgcctccgccggagcgggacagaacaacggtcaggcggccatgggtggcagcaacaagagcggctcctctggcagatccacgcccagcctgagcggaggcagtggctccgatccggcacccggcaaactctttgtcggcggtctcagctggcagacgtcgtctgacaagctcaaggaatacttcaacatgttcggcaccgtcaccgatgtgctcatcatgaaggatcccgtcacccaggtaagccgaaatatcctctaatttcattttcatcaccactatgtatatctatctatctatcgcacattgtgtacctccataatccccctgcccttcgggtttacagctaccattttgtgatttaccttttgcacagctgcagaaactgcaggttttgtcgcccttttggcatcctcttcttcttccagccgaggtttagaattacagttctttcggcgttacgtgccaaaaacaaaagaagcggagtaagaaaatcggaaaggaggaggcgaagaaggtggaaaaggaagaggacaagggaccaccgaactgaaatttaatttaatcaggtttaatatgtagatcagcttgtccggggttgatccactcggaactgtttattgagatacgcactcgagcaccaatttccctgtcataatttgtatgcaggctgtatcagttttcttataagcgcatgatggccacattggccaccgttctccacagaatttggaggcacaacagttcagttaccatctgagttctattgaatagcttgaagaactaggggattgccatttgttcccaaaacgagtagattcgaactttcttttgataacaagacaaatggctttcgaaatcaccttttagattaccttttctctaagaaaatatatattacgtatcgatagtagtttttccctcgaaaacgcagttattgcagcggaaatggactttttcgtaatgcttaatgccttgagcaatttgtccgcttgataagcgaaacattatgcacacatcctacacatactagtatttagtgggcacacatacacatgtatgtatgtatgtatgcacatactcctttcaattcgactacatacaatgtgtggctggctccccagcggaaaagagcgcgcgcgccgctttctggccataaaacagcagctgctagctggcgcattgttccgagtcctgttccctcggcgcagctgttcctgcgacctccgcagctagggttcgctgtggatggatgcggcacaggacaaattctatagctgtacgtgcacctggggttgtttccgagccaattgcgcaattacggaatgagtcggcctgctacgactgcatgatagggcagttatattcgcggcgatcgactaacggggttgtgtcctggcccctcaggaagaccccgaaagatatacacacacaaaacacctttgttccgtccccccttcaaagaaccaaaaaaaaaaaaaagagtacacaagaaacaagaaacaaacaaaagaatgaagaaaaacaacagaagcgagaagaaaactggtttaccaactgtcttcggtccgcagatcgcttgtgaagacgatccttgcgatgatctggggagtactgtagtccataagcacctaggatcagtcaattatatacatagctagtcatatgtagtcaaccaaatgtacaaactactaaacataacataattttaatgaacacaataccacgaccaaaagtgaggaatctcgagtcaaggacaaggccggaagccgatcgaggaagcagcgaatacctggcctggtaaccacaaccacgattgcaaccacaggatgatgaaccagcgacggcttaggtacatttcataaaaaaaaataaaacaaaataaacaaccaatcgccaagtactctaactactgtataaaaaagagaacgtttagcgtacttgatttactcaacactggcgcatcgtaattctcgtatatcgtataactctgagcaataataacagctgcataattgtattcgtatctctaattgaatgtactcgttcttgtactcgtactccgtattatgtacttggtttactttagcttttttcacccaacaaaaaaacaaaaacgtattcaatgaacttataactccacgcattgatatcaagcaagcctcaaaagcaaattaaactaacgagtttccctgccatatcttttacacacatttgttagatctagaactcaataaaaactatattctaaagaggcgtactttacccccaataatactatccaaatgcccatgttcccactttagcgtaatatggattcgaatatcgccctggcaactgttgaattgattgtgtaacataaataagaaccttagcttagcataatttacccaatacatgcgtatttattaccatattacgagaccccgtaaattttagtccttataaataaccattatgcgacattctgtttatatgtgtttagttgttaatgcttcttaattttatttcgcataccgaatcatttaaattaaccaaccacaaagtaaaccatattttattttaagtagtttttaaatatgtcaagaaaacattttttttctgttgtgttgcgtcgtaattttctttttttttttaccatgttttgtaatcgcattagaagatcttccaaaaatcggcatactttatagatttcaactcataggaaatatcctaggcccggtatatgtaagtagctagttgtgttaacccaccaatcccagcccacaaaaagagctcgtcttttaaaggaaacgtatgcgaaaggtttaaatcatacactagaaaatatacacttttctctttaggtaggtagtctcatagtttctctatatttctatctcgaataatgtacaataaattgtatctgagtcatttgactcttctttgccctaggcttaagagaaaattgtattccccattactgtaatatatgtaaccggtacggaaataattaactagactaagccaacaaaagtcacaactcattatttgtaaaaactcttaagtagttattaagcaaaactaaccaatgaaagcgaattgtatggtaaaagggggtttaacttaacttgaaagaaaacgaatcgaaagaaagtgtaatcacttaaaaaaaaacgcatatctaaagcattcccaacttttctaatagtgcgttttatagctatatttgacaatagaactactagcagtaatatttaatagcttacgtaaatatggtattttaaacaaatattgtgccaagtagatttaaaattgctacaattgtattatagctctaaaacgcactactcgtactactctgtttattcaagcctaactatcacatagaccatatgtaattgccacatttgtatccttgagttcgcattcacagcaaagtgaacgaatgtttttggtatcctccagttatcgtgtatatataatctatgcctcccgtacctacatatatatctgggatctagaggggtgtcgcatctgtatggagaacatgttgaatgcatatatttcgtaatgtttctatgatatatgtatgttccagtttagcaaatgaccatataacgatcgatctacttgcgtataaatattggtattctgttaaaacagcaaaagtatccttagacgaattttagtttttagttgaaacatattttgtgttgtttggattttaattaaaacttgtttgtgtttactccacgaaagaacaaaaaaaaaaaagtgaaaacgatgcatatttgatgagcaaaaagcgtaaaaatggcacgcccaattcagtcaataaagccatctacatacatgcatataaactgtatccgtatctgtgtttacatatatctttatatatcatttttatatacttatggaagatcgagttccgatcgacttgattgattcttactttgttggacttttgctaacgtttcgtaggacattttacgattattaatcctagttatataactacaacatttgcaacttagacctagtcgcctttaaccgaagctctcttatgaaactaattacttcacataactaatgtatccgtccctatttgtttatctttcccacccacacaaaaacacaaacctcaactttacacctacagcgcagtcgcggctttggtttcatcacattccaagaaccctgcaccgtggagaaggttctcaaggtgcccattcacacactcgatggcaagaagatcgatcccaagcatgccaccccaaagaatcgacctcgtcaggccaacaagaccaagaagatcttcgtgggcggcgtctcacaggatacttcggccgaggaggttaaggcttacttcagccagttcggacccgtcgaggagacggttatgttgatggaccagcagacaaagcgccaccgtggcttcggatttgtcacctttgagaatgaggatgtggtcgatcgcgtatgtgagattcacttccacaccatcaagaacaagaaggtcgagtgcaagaaggcacagcccaaggaagcagtcacaccggctgctcagcttctccagaagcgcattatgttgggcaccctcggcgtccagctgcccacagctcctggccagctgattggagcccgtggtgccggcgtggccaccatgaacccactggccatgcttcaaaatcccacacagctactgcaatccccggcagcagccgctgccgcccagcaggccgccctcatatcacagaacccatttcaagtacaaaacgccgctgcggcagcctcgattgccaatcaggctggcttcggcaagctgttgaccacatatccgcagactgcgctgcatagcgtcaggtgagtaaaagcgctagataatctagacggaactaacatctgattaatccccattatagatatgcaccctactcgatccccgccagcgccgccactgccaacgccgccttgatgcaggctcatcaggcgcaaagcgtggccgccgctgcccatcatcaccagcagcagcaacagcagcagcatcatcaccagcagcagacccacaatgcccatgtggccgccgcccagcagcagcagcagagccaccacaacgccgtctcgaatcccgcttcgcaggcgcactcggcagcagcggctgccgccctggcggccaatgccgcgaatggggcaggtgccgctggagcccacagcctggccgctgccgctcagcaagctggcttaatggccggcaatcccctgaatgccgctgctgccgccgccgccgctgctgccaatccggcggctgcctactccaactatgcgctggccaacgtggacatgtccagcttccagggcgtcgattggagcaccatgtacggcatgggcatgtacgtctaagacgcgagttttgtttggtaatttgaatgaaacactctcaccatgcatacaccattcacaaccaccccccatacacccacaaccactaccacatgtgaacagcagccccccacatccattaatattcatagaaccacacacaaacactcatacgaagttggttttcctttgagtttggctaagttagtagtccgatacacggaaggcaaattaagtattatatttaaggcgccctcgagcgagttcgataaatactaactaatatatatatatataacaaatcataagcaatataagcgagaaaaaagaacaaaaacggaagcaaagcaaagcgaaggaaaaacaaaatttaaaaccaaaaagcaaaaattacggagcgttagagaagcaaaagaagaaaggaaaacacattaaaaaaccaccgattgtgattgcgtttaaatgtagccgttaatatataatttttagtgcataaaagaaaaccattaaatctaaattaaaataaacccaaataaaaactaaacgtatatataaatatacatacatatttataaaatgcaagagcaaggaatgaatcatataagttaactcacgctcgtataaccaagaatggcgctcactaattaaaaagttcgaaaaattgttcttttttttggagccctaaactcagctgaaatgaatgagaaactcctgcaagggcagtattaattaattgaatgaaacagcgaagaaaaacgttttgctcaagacaaagaactattcattatttttttaatcagcgatgaaaccctatattagactattattttagatgtttagttgagttcgaatttaattcacccagcatagaatacaacaacagagttaaccaatcactaacgaacatcaccaactcaccaacacgaaaactccaatatcctcctaccttctatctacccaaatctgttattgtacttaattatataacaattacaaataccacaacgaacaaaccaaaataacgttgtcttttatgtgtgcgactcttttttgatttagttctataactagtttattctgcactcaatctcaaacatttgtagcaagtaactaaataaccatttgttgaacattttggcatttgcatattcttattatactttcgagtgacgacaagttctcaaggctaccggcttcatttatagatcctaagatattcaaccgagaacgagtccttagggcactactaatattttagatccttcgacctatttcccaatcaccaagtctttcatttgcataaccatccaaacagctcatgaaccaggtaacataactttactgtagcttattgttttaaatggcacaatcttagttattaatattattttgtaattacccttatctgtagcatttgcatttgattttgcattcggcaaatacttcacccattgaaaccaagaaaattatcgaattaagaagaaacccggggcagatgctcctggatagttatgtatttgtctcatttgaatcgcttgcatgcttgaagtttaattttagttactagttatcatttggaaagtaatattttgcgtatgtaaatatctagtttatatacattacacacccacacaaaccacacattatatggaaaacaatgaaacatttgaagtaatttttgtgtttaataaaaaccaacaaacaaaacaacaaacaactttgccatgagttgagcaaacatttgtgttttcttatgatttgattaatttgattgtacatacttgaccacatttatctgtattatttgatttgatttgaattatctcgtaatccacacacttgtatctgttgttgtgctgtgctgtctttctctctactatctgttatctactcctcttagccatgtgtagaacttattacatttcgatgcatttgccaataccaaaaagttaacgattgtggcgaattgtttataattcctgtagattttcgatttcgactcggggggtgagtataatgtaatattgtttcgtataccaaagataacgcatattaacccaaattcattttacatttgctgggcctaagtcgaggctcaaataccacatctccatttgcagaaactaatttatttatttattatttacgcttaagaatctaacacattccagacatgctatggtgccatttacttatccatattaatatttataatttttttaactcgtctgtcagatctcgatctcagaacaattgcttttagcataaggttgattttaccctgccaatccaagatgattcttacgaattcctttttttactgactacacaaacacacactttgttctattaaaattatttatataaagaaaccaaataaaaatatatatatttcattattgcattttccatttatttctattagccgattaagcaagaagtcaaaaaatgctcccatagttgcctatgttcattgtagttcctttggaataactcttatagtttttgttcacttatccgtatgctttaatattcattcaaagcgacaaagtgtcggcgaattacttagatatttgtaatcttaacagtttcaacagtgtgaattcgatatatcttatatccaatgaaatgttttatttcccattctcgtaccaaagatatatacccaaagtagtagcttgctaattttgatata

SEQ ID NO: 10538 - DNA, 3959 bp, DROSOPHILA
caaccgcaagttaataaggagcaaatcgagaccgaaataggataaatttagagtcgtgttacttgaacatttccgtcaaagttttgggcatttatttatggctttgcccctttgcaataattcgcgagcttgttgaacagcaaaaaaaaaaaaaacagaaaacgaaaatcattgccattggcaacaacaaagtagagccgaaaaaaagggaaccgtagtcaaagcaagtggcgaaaaaaagacgaaaggcagtccaaaaattgccacaaacaacaaaagtctatacttattatttggaaaccacacaagtgctgaaatagaccatttttttttaaatacaaacacaaacaattaaagagtataaaaacgcgcaaaccaaaaggaaaacagctaaacacaaattctgataaacgaagaaaaaagccttcaagattcagataaagcaggaaatgcacgcgcttcaggaaggcgccaccgtgctgcaccaccagcagccaccgccacccacttctggcgaggatcacctgctcaccgctgatagtttcttttatgcacgcagcaatcccatggagaacgcggccgcagcagccgccgccgcagcagcgggcttgattgatccgcaccacaatcgcgatctccaccaggcgctggtggcctcgatagccaataatagtgtggccgccatcggcggtggcctgaccacagcggcagtcttgaagagtgccgctcagcagtcccagcaggcggtgcaacagaaccagaacgcggtagtggtgacaccgggactggaacagcccaaacaggaaccagcccaacaggcggcactggcgctgctcaaggagaatgtaaacgcctccgccggagcgggacagaacaacggtcaggcggccatgggtggcagcaacaagagcggctcctctggcagatccacgcccagcctgagcggaggcagtggctccgatccggcacccggcaaactctttgtcggcggtctcagctggcagacgtcgtctgacaagctcaaggaatacttcaacattgaggaatctcgagtcaaggacaaggccggaagccgatcgaggaagcagcgaatacctggcctgcgcagtcgcggctttggtttcatcacattccaagaaccctgcaccgtggagaaggttctcaaggtgcccattcacacactcgatggcaagaagatcgatcccaagcatgccaccccaaagaatcgacctcgtcaggccaacaagaccaagaagatcttcgtgggcggcgtctcacaggatacttcggccgaggaggttaaggcttacttcagccagttcggacccgtcgaggagacggttatgttgatggaccagcagacaaagcgccaccgtggcttcggatttgtcacctttgagaatgaggatgtggtcgatcgcgtatgtgagattcacttccacaccatcaagaacaagaaggtcgagtgcaagaaggcacagcccaaggaagcagtcacaccggctgctcagcttctccagaagcgcattatgttgggcaccctcggcgtccagctgcccacagctcctggccagctgattggagcccgtggtgccggcgtggccaccatgaacccactggccatgcttcaaaatcccacacagctactgcaatccccggcagcagccgctgccgcccagcaggccgccctcatatcacagaacccatttcaagtacaaaacgccgctgcggcagcctcgattgccaatcaggctggcttcggcaagctgttgaccacatatccgcagactgcgctgcatagcgtcagatatgcaccctactcgatccccgccagcgccgccactgccaacgccgccttgatgcaggctcatcaggcgcaaagcgtggccgccgctgcccatcatcaccagcagcagcaacagcagcagcatcatcaccagcagcagacccacaatgcccatgtggccgccgcccagcagcagcagcagagccaccacaacgccgtctcgaatcccgcttcgcaggcgcactcggcagcagcggctgccgccctggcggccaatgccgcgaatggggcaggtgccgctggagcccacagcctggccgctgccgctcagcaagctggcttaatggccggcaatcccctgaatgccgctgctgccgccgccgccgctgctgccaatccggcggctgcctactccaactatgcgctggccaacgtggacatgtccagcttccagggcgtcgattggagcaccatgtacggcatgggcatgtacgtctaagacgcgagttttgtttggtaatttgaatgaaacactctcaccatgcatacaccattcacaaccaccccccatacacccacaaccactaccacatgtgaacagcagccccccacatccattaatattcatagaaccacacacaaacactcatacgaagttggttttcctttgagtttggctaagttagtagtccgatacacggaaggcaaattaagtattatatttaaggcgccctcgagcgagttcgataaatactaactaatatatatatatataacaaatcataagcaatataagcgagaaaaaagaacaaaaacggaagcaaagcaaagcgaaggaaaaacaaaatttaaaaccaaaaagcaaaaattacggagcgttagagaagcaaaagaagaaaggaaaacacattaaaaaaccaccgattgtgattgcgtttaaatgtagccgttaatatataatttttagtgcataaaagaaaaccattaaatctaaattaaaataaacccaaataaaaactaaacgtatatataaatatacatacatatttataaaatgcaagagcaaggaatgaatcatataagttaactcacgctcgtataaccaagaatggcgctcactaattaaaaagttcgaaaaattgttcttttttttggagccctaaactcagctgaaatgaatgagaaactcctgcaagggcagtattaattaattgaatgaaacagcgaagaaaaacgttttgctcaagacaaagaactattcattatttttttaatcagcgatgaaaccctatattagactattattttagatgtttagttgagttcgaatttaattcacccagcatagaatacaacaacagagttaaccaatcactaacgaacatcaccaactcaccaacacgaaaactccaatatcctcctaccttctatctacccaaatctgttattgtacttaattatataacaattacaaataccacaacgaacaaaccaaaataacgttgtcttttatgtgtgcgactcttttttgatttagttctataactagtttattctgcactcaatctcaaacatttgtagcaagtaactaaataaccatttgttgaacattttggcatttgcatattcttattatactttcgagtgacgacaagttctcaaggctaccggcttcatttatagatcctaagatattcaaccgagaacgagtccttagggcactactaatattttagatccttcgacctatttcccaatcaccaagtctttcatttgcataaccatccaaacagctcatgaaccaggtaacataactttactgtagcttattgttttaaatggcacaatcttagttattaatattattttgtaattacccttatctgtagcatttgcatttgattttgcattcggcaaatacttcacccattgaaaccaagaaaattatcgaattaagaagaaacccggggcagatgctcctggatagttatgtatttgtctcatttgaatcgcttgcatgcttgaagtttaattttagttactagttatcatttggaaagtaatattttgcgtatgtaaatatctagtttatatacattacacacccacacaaaccacacattatatggaaaacaatgaaacatttgaagtaatttttgtgtttaataaaaac

SEQ ID NO: 10539 - protein, 611 aa, DROSOPHILA
MHALQEGATVLHHQQPPPPTSGEDHLLTADSFFYARSNPMENAAAAAAAAAAGLIDPHHNRDLHQALVASIANNSVAAIGGGLTTAAVLKSAAQQSQQAVQQNQNAVVVTPGLEQPKQEPAQQAALALLKENVNASAGAGQNNGQAAMGGSNKSGSSGRSTPSLSGGSGSDPAPGKLFVGGLSWQTSSDKLKEYFNIEESRVKDKAGSRSRKQRIPGLRSRGFGFITFQEPCTVEKVLKVPIHTLDGKKIDPKHATPKNRPRQANKTKKIFVGGVSQDTSAEEVKAYFSQFGPVEETVMLMDQQTKRHRGFGFVTFENEDVVDRVCEIHFHTIKNKKVECKKAQPKEAVTPAAQLLQKRIMLGTLGVQLPTAPGQLIGARGAGVATMNPLAMLQNPTQLLQSPAAAAAAQQAALISQNPFQVQNAAAAASIANQAGFGKLLTTYPQTALHSVRYAPYSIPASAATANAALMQAHQAQSVAAAAHHHQQQQQQQHHHQQQTHNAHVAAAQQQQQSHHNAVSNPASQAHSAAAAAALAANAANGAGAAGAHSLAAAAQQAGLMAGNPLNAAAAAAAAAANPAAAYSNYALANVDMSSFQGVDWSTMYGMGMYV

SEQ ID NO: 10540 - DNA, 3121 bp, DROSOPHILA
cggtatccacgtagcattgccggttgtcatgatgcgattcgcgaagtgcgcacgtaaccaactccctttcgaaattgcgtttcgtgtagacggcatcctggcgttccaaatatctatcaatatccttagattgcactttgccgcaacgacgaatcttgtagccagccttcagcaggatctctatgttgtccacagtgtaaagggcagtgcactcttcaaattcgatgaggtcttcggccagcggctcctgcagctttccagtcacggcatcgtagaacagggactgccaggtaagctccttggaactcctgtctgcttcagctgccgcaaacgcctgcggaattcatttgagcattatataagcccacaccctggggtgtcgtcttcacctctcagtgggtttggcattctcacctgagcaccgacgagcagcagacaaactgctaaaattttgcagggaacctccatcatggcggttcaattcgtttctgaggtggcttcgctggcaggtgaccaatttaaagcggcgcgcatttgatttttaatattttgtttttattctccattattaaattgcatttatctataattgtttaggggcccagcgcaatcagctaaatggtcggacggccaggtgataagtcttaagcattctaattgatgataacaatgagtgggcaaagtgccatcatcatgataaaggtctacgaatacggaactgggtgtgaagtagcagaaagtctttcaatcggtgagtaagctttttaggggtttgggaaactccaccgatttatgttctcagagggcttgaagggaaactttttggcgaaagttctaaggaaaaaaccgaatcgaactgataatgtaaagtaataaaagaaatacctagtcttattcgatacaaataaagccccctatattgattgttaaagatttctaagtaaacccaatgattgatctctgtgaagttaagcattttaataattatttatctctgaacttagttggtcaaaggcagatcttcgaacatcagctgtggcttcgcagacacttgctctttggttatctgggtgggcttctcctgctgctgctctctcagctgctgctccatcttttgtggcacctcacgctgggctgggatcttgtccagacacgaattaaagtcgttggccgcctggatggactgaaccttggcctcgctaacagcggagctgatgcagttcgatttctcggcattcatctgagtggcattggaaacgaactgggactgagcacggtaggcctgcgagttggaggtgtccagcagctggaggttcttgtcgaactggtggaaaatggaagttagccatgctgattaatttgtaaataacgtcaacacactcacagtggacacagtgcagttcaggaaaatagccgaatcggtctcgttgcggcacagctgcaggttctgctccagggtcaacaactggagacggatctggttgatggtggagttgctggtctgggtgtaggcgacattggtgcgattggctgcctcctcgcaagcattggtggcattggccaacttatcgccgttcttctgggtggtgttcaggtagatgttggcacaagtctgggcagcaggagtcagacctcgaccctcagcctcaccaaggaccatgcggaataggacctcctccagaccaatatcttctccaaaacgcggcacggcactgacctgagattgaggagaaaaagtgtttaatgttttaaagcaatttctatcttggtaatttaaaatacatatttcttaaatgttacacttgaaatctatacgtatgaaatctgcccttaaattctattatttctgagaataaacatttaagttgataagagctgacacatgccagtaaaattgattttatttgcccaatcgttgagttaaaaaagttgtaacaacaatactgcgagcgtttttacttacatacaagttaactttctattctatacgtctatacgctatagattggtactagaacttacgctgaaaatggtcacggccaacaggataactcgtgtgaaaagctgcatgtttataacttcaattactttcaatctagtgattctgaagaagtgctgcgccttttatacctcagcttctcagttaaaagatccatcaggatccaaaattagccactaattagcaatgcactatgattagataaattctagcacgaagacaacagcaattttcatttaattggctctttgcggggctaagagtcatatccaacgtggctaagataaatgttggttggcaggttaaataacacttcaatcagggaccgtgtcgtctgataagtctgcacatttccttggggtctgaaagtctgtctggtcgggttgttatctcctgtgcttatgatataagacctaattttacacatgctgaatcatgccattcgactttctggtagcgctttctatttgaagagccagtggtgatttgggcctttaagagccacttcagctgggattttaatctaccgattacatggccataaatcagcggaatctaacagcggcaagccagttctcagaatagatatagccaaaactgataagcagtaactttgtttgcctaaggtcattgaaagtaaaaacccaatttccatgaattcggttatcagctgttgccgcgtaccgaattcctatatcgatctaacgctgctgttggcaattgaaaaataataataatcaacaaatgtttggctgacgaatttactatcatctaattagcgaggcgtgcactaaatgtgtactcagttccaccattttttcttgcttcgaatattttgggaaaagtatcttgggaatgcggctaccacgtatttatcaaaaacacacaacgatgggaaaaaatctttacacatgtgggattcgcatacatcttgcgatagaccaaacaagatttataagctgagacattgctccaagcacctttgtggaaaagtcgtcgcaactcgaacgatttatcaaaagcataaagtgcaggtagcgccaacttttggtggtactacactgaaaaaataaccatatagattggaaattatttagctactatcgcgggatttatttttta

SEQ ID NO: 10541 - DNA, 756 bp, DROSOPHILA
gcgcagcacttcttcagaatcactagattgaaagtaattgaagttataaacatgcagcttttcacacgagttatcctgttggccgtgaccattttcagcgtcagtgccgtgccgcgttttggagaagatattggtctggaggaggtcctattccgcatggtccttggtgaggctgagggtcgaggtctgactcctgctgcccagacttgtgccaacatctacctgaacaccacccagaagaacggcgataagttggccaatgccaccaatgcttgcgaggaggcagccaatcgcaccaatgtcgcctacacccagaccagcaactccaccatcaaccagatccgtctccagttgttgaccctggagcagaacctgcagctgtgccgcaacgagaccgattcggctattttcctgaactgcactgtgtccactttcgacaagaacctccagctgctggacacctccaactcgcaggcctaccgtgctcagtcccagttcgtttccaatgccactcagatgaatgccgagaaatcgaactgcatcagctccgctgttagcgaggccaaggttcagtccatccaggcggccaacgactttaattcgtgtctggacaagatcccagcccagcgtgaggtgccacaaaagatggagcagcagctgagagagcagcagcaggagaagcccacccagataaccaaagagcaagtgtctgcgaagccacagctgatgttcgaagatctgcctttgaccaactaa

SEQ ID NO: 10542 - protein, 234 aa, DROSOPHILA
MQLFTRVILLAVTIFSVSAVPRFGEDIGLEEVLFRMVLGEAEGRGLTPAAQTCANIYLNTTQKNGDKLANATNACEEAANRTNVAYTQTSNSTINQIRLQLLTLEQNLQLCRNETDSAIFLNCTVSTFDKNLQLLDTSNSQAYRAQSQFVSNATQMNAEKSNCISSAVSEAKVQSIQAANDFNSCLDKIPAQREVPQKMEQQLREQQQEKPTQITKEQVSAKPQLMFEDLPLTN

SEQ ID NO: 10543 - DNA, 4668 bp, DROSOPHILA
agttgcggaagacctcgaacagagacatgaagtccatgattgttccgctccagaaagttggtgcatcggatgcgggcagcacggctgccacggctcctgctcctgcatacatgtattgaaaattttttatgtccttactttaagactgtgtttactttgtaatacaaataatcgtaaaaatttaaatcttaaaagttcgggctttaatgaaagcgtaacggtatttttcatctctgcacttcacagcactggccgcttggcgttatcgttatcgatgaccaaataatatagtaacaataaaagtcgtaaaaataataatgggaagtccagaattgccctcagatcccggtcaagagggacttccaaccccaccggttgaccatccacggggaggggtggagagcgaggatgacgatgattcggatgcatacgacggctaccaaccactcgctttggatgaggagaacgatgcagcggatcccgaggagatgtccagggagcaggagaccccgtccgcggataatgacgaagatgttgacctgatgactgccccagtcacccacggagaccccaacatgcctgccattgagcccgctgacgtggaaatcgagagacaagtctggagtgaaccaagacccagggaactccaaatggatcttgacaaaactcgaacggaacaggtaagacattccgatttacaattgcgagacatgccagcaactttcatcccgacactccagatactcaaagcgatgtccactataacgttacccaacatcacagtgccggattgggccagaggagtgcccgaggagcattggaagcatgagctgctggaccggattaacaaccggcaccatccacccgaaccctcaacgtcgtcgtcgcgcgagagtcatcagcattccaagaaagaatagcgtttgtgtgtatttagaaaaaaagttctccaatatatgtataatttagaatgatcataagaagttgcttggcggagatcttagaacacagccagcagggcctggcccacagaattcaccttgctgaagttcttgtcctgcggagtaatggtaagttccctcaacttgtccatcacatagtccacggacaccacctgcgcaatggtctcttggccgcacgaagtggtggtcaggttgccgatggcctgcatggaacggtagcacgcttccaagtccttggcccacttgagcagctccacaataccggaggtgaccacatgacacacctccgacttcgccacgtccagagtctgggagattgtgaggttcaaatagaaggtggccacggcaatttgcagattggcactgcccgtcttgatggctcccacgagatcgatgatctccgccagacgggacatcacattttgccggccggcggcgtggctcatgatgttggccaggcagcgcaccaccatgagctggttgggtgccgagccgctcaattgagggataacggtcgccaggaagttgtgactgttgttcaggacactgaagatggcttcatttcgcacggccaggcgaaggatgtccagcacggggaactgcatggacgccggccacttcagcaggatggccagagcttccagggaggtcagatcgagctcaggcgattgatcggcgagtttgattacggccaacaagacctcctctcccactcttccatcaggtaggcttagtttgccattgaactctctgccaaagagatgtagggattagttggggattagctgagaaaatatctaaacccacatcattttctctagcaccttcttggcatcacaggtgtcgaagatgcggtagttgctgacgggaaagtgtttgtcgccagaccgcacaaagtttacatccacctgcgactgagcattgctactcgctgtggagtaactcgaggctccagtgaagggatccacattgccgccgcttcccatattggtgttgctcgatccaggaacatagcgggagccaccagtaaatggatcctgatagccggttggcgcctgctccatcagcacggggccttccgagttctttataataaagttggccacctggtcgaggtaggcctgtggaaggctatggcgatggatgaaggtctgggccgcctgccacggatcgtcgctgcggttgtagggcaacttgataggtggctccgtgtcggaaatgtccacgctgaacacaaagtcgtactccttgccctcgtgcagtttcttgccggagttcgactgggttcctccagttgcgccagttacatcgcctaccaagttccagttacccagcgtccaggtgtagcacttcacggaaccatcggcatggcgcaccatcttcgtttgaccctcgcgcgttccattggacagaagagcctccggacctggaaggctgaagaaggataaccatatgtttagttctataagacagatccacttgtagcatactcagttttcttgacgccaccaatctcctcattaatctgagactttctagttgccactactaagtcgaaggctttaaggactgcttcacttgcttggcgagcaggaacgtggctgaataccctcaccacaccatcgctacagccggtgacaatgtccccgttctgtaggcacgttacggaccacactgaaatgccgggatggatgatgggtgctcccagctcatcgccggtgatcacattccacatgcgcaacgtgctgtcctcgccgcaggagaccaccacttggtcgcccagagcctcattgcgagccatggagtagatgtagttgctgtgtccgttcatctcgcgcacgcactcaccatcctcgttccagaagcggagaacagcgtcatttccgcaggagagcagtgtgttcgcatccagtcccatgacacccctcacgcaatccgtgtgacccttaagcaggcgcagcttctcgcctttcgcgttccagtagtagatgttcctgtccgcaccaccagtcacatacttccgctgctccttcaaggtggccaccgcccaaaccgccgcctcgtgtccctctaaagcaacgaaggacacatcacccgcctcgctgatggtccacacccgagcggtcttgtcccagctgccgctgatgaggcttcgtggctccaatcctgccgagagagcacacaccgtggactcgtgacccttgagggtcaacaggggcacaaagccgtcctgcttgtagatgcagatggtggcgtcgttgctggccgtgcagatccaccgctccgactccaggaagcagatgtacgagatgaagttcttgtggtcctgcaaagtaaggctttccaagtactcgttcctatgaggatcgaaggcagtttagtatgtatgtaattcatagcgaccagacccagccaaatctcacccatggggcttccagactttggtgctcttgtcccgcgaaccggacagaatggtctggcgaccttccggagttggaggtcccaccgctaccgcccgcacatccatgctgtggcccaggagctcgcagctcagcttgtagttgtccaacgatggctccatgcttggtgtcctgatcttcctgttatcccgttcaagcagctgcggtcaagaaatgttactttgtttgccggctgtcagcgattttgccattcggtgcgaaaaaatcgcacactcagatagtggtggaccgatccgatgggtttgaggtcaatagacgatagtttctgaatattctaacggccaaatttataaatttaaaaataaaaaaattctgggtattcggaatatgtaatgtccttaaaaattgtatatctaatttttaaataggtcgaatacagacaattattgtacgataataatttgttttcaaaatgttcgatatcaaaaaggttcatgaaggtggtagtgttggtaaagttatcgatgctccggaaaactatcgagaacggcttgataacatttgccatctctacgcttaaaagtattgtattattttgtttacatttaaatgggtggcaaaagttattattgcgactactgctgttgctttctgaaaaacgatctgaatgtgaggaaattgcacaatggtggtattgcacacgcaattgcaaagagcaactatttgaagcgttacgagggtaaagcttttgttgcacgatattcccgaaaaagctgaattttcaatatttgtagatcccaaaaagattttgactgaagagcggcagaaaactccttgcaagcgatactttggcagttactgcaagtttgaaacatattgcaagtttacccactatagtggcgataatctacgggaactggagaagttgggtgcgtgataaaacgcagatttaaaacgaaaaataacttcttcttgaaaactttcagttctcgctagaaagaagagaaaatcccgaaagaaaaccaacaaatgcaagagatggccctggaaaactcatctgcgaaagggattacccccttccttgcaacccattaacccggaaaaactcaagcaaaccgactttgaactcagttggggctaaatatatttacagaatgcacactttatgtcaagtattcagtatgctaattactttctccatgacgcgcgccactttcaggttgatgcgcaacgtgcgagcgtattcgtagtgatacgatttcggggaatgcccgcttaagttctcc

SEQ ID NO: 10544 - DNA, 2489 bp, DROSOPHILA
caccactatctgagtgtgcgattttttcgcaccgaatggcaaaatcgctgacagccggcaaacaaagtaacatttcttgaccgcagctgcttgaacgggataacaggaagatcaggacaccaagcatggagccatcgttggacaactacaagctgagctgcgagctcctgggccacagcatggatgtgcgggcggtagcggtgggacctccaactccggaaggtcgccagaccattctgtccggttcgcgggacaagagcaccaaagtctggaagccccatgggaacgagtacttggaaagccttactttgcaggaccacaagaacttcatctcgtacatctgcttcctggagtcggagcggtggatctgcacggccagcaacgacgccaccatctgcatctacaagcaggacggctttgtgcccctgttgaccctcaagggtcacgagtccacggtgtgtgctctctcggcaggattggagccacgaagcctcatcagcggcagctgggacaagaccgctcgggtgtggaccatcagcgaggcgggtgatgtgtccttcgttgctttagagggacacgaggcggcggtttgggcggtggccaccttgaaggagcagcggaagtatgtgactggtggtgcggacaggaacatctactactggaacgcgaaaggcgagaagctgcgcctgcttaagggtcacacggattgcgtgaggggtgtcatgggactggatgcgaacacactgctctcctgcggaaatgacgctgttctccgcttctggaacgaggatggtgagtgcgtgcgcgagatgaacggacacagcaactacatctactccatggctcgcaatgaggctctgggcgaccaagtggtggtctcctgcggcgaggacagcacgttgcgcatgtggaatgtgatcaccggcgatgagctgggagcacccatcatccatcccggcatttcagtgtggtccgtaacgtgcctacagaacggggacattgtcaccggctgtagcgatggtgtggtgagggtattcagccacgttcctgctcgccaagcaagtgaagcagtccttaaagccttcgacttagtagtggcaactagaaagtctcagattaatgaggagattggtggcgtcaagaaaactgaccttccaggtccggaggctcttctgtccaatggaacgcgcgagggtcaaacgaagatggtgcgccatgccgatggttccgtgaagtgctacacctggacgctgggtaactggaacttggtaggcgatgtaactggcgcaactggaggaacccagtcgaactccggcaagaaactgcacgagggcaaggagtacgactttgtgttcagcgtggacatttccgacacggagccacctatcaagttgccctacaaccgcagcgacgatccgtggcaggcggcccagaccttcatccatcgccatagccttccacaggcctacctcgaccaggtggccaactttattataaagaactcggaaggccccgtgctgatggagcaggcgccaaccggctatcaggatccatttactggtggctcccgctatgttcctggatcgagcaacaccaatatgggaagcggcggcaatgtggatcccttcactggagcctcgagttactccacagcgagtagcaatgctcagtcgcaggtggatgtaaactttgtgcggtctggcgacaaacactttcccgtcagcaactaccgcatcttcgacacctgtgatgccaagaaggtgctagagaaaatgatagagttcaatggcaaactaagcctacctgatggaagagtgggagaggaggtcttgttggccgtaatcaaactcgccgatcaatcgcctgagctcgatctgacctccctggaagctctggccatcctgctgaagtggccggcgtccatgcagttccccgtgctggacatccttcgcctggccgtgcgaaatgaagccatcttcagtgtcctgaacaacagtcacaacttcctggcgaccgttatccctcaattgagcggctcggcacccaaccagctcatggtggtgcgctgcctggccaacatcatgagccacgccgccggccggcaaaatgtgatgtcccgtctggcggagatcatcgatctcgtgggagccatcaagacgggcagtgccaatctgcaaattgccgtggccaccttctatttgaacctcacaatctcccagactctggacgtggcgaagtcggaggtgtgtcatgtggtcacctccggtattgtggagctgctcaagtgggccaaggacttggaagcgtgctaccgttccatgcaggccatcggcaacctgaccaccacttcgtgcggccaagagaccattgcgcaggtggtgtccgtggactatgtgatggacaagttgagggaacttaccattactccgcaggacaagaacttcagcaaggtgaattctgtgggccaggccctgctggctgtgttctaa

SEQ ID NO: 10545 - protein, 787 aa, DROSOPHILA
MEPSLDNYKLSCELLGHSMDVRAVAVGPPTPEGRQTILSGSRDKSTKVWKPHGNEYLESLTLQDHKNFISYICFLESERWICTASNDATICIYKQDGFVPLLTLKGHESTVCALSAGLEPRSLISGSWDKTARVWTISEAGDVSFVALEGHEAAVWAVATLKEQRKYVTGGADRNIYYWNAKGEKLRLLKGHTDCVRGVMGLDANTLLSCGNDAVLRFWNEDGECVREMNGHSNYIYSMARNEALGDQVVVSCGEDSTLRMWNVITGDELGAPIIHPGISVWSVTCLQNGDIVTGCSDGVVRVFSHVPARQASEAVLKAFDLVVATRKSQINEEIGGVKKTDLPGPEALLSNGTREGQTKMVRHADGSVKCYTWTLGNWNLVGDVTGATGGTQSNSGKKLHEGKEYDFVFSVDISDTEPPIKLPYNRSDDPWQAAQTFIHRHSLPQAYLDQVANFIIKNSEGPVLMEQAPTGYQDPFTGGSRYVPGSSNTNMGSGGNVDPFTGASSYSTASSNAQSQVDVNFVRSGDKHFPVSNYRIFDTCDAKKVLEKMIEFNGKLSLPDGRVGEEVLLAVIKLADQSPELDLTSLEALAILLKWPASMQFPVLDILRLAVRNEAIFSVLNNSHNFLATVIPQLSGSAPNQLMVVRCLANIMSHAAGRQNVMSRLAEIIDLVGAIKTGSANLQIAVATFYLNLTISQTLDVAKSEVCHVVTSGIVELLKWAKDLEACYRSMQAIGNLTTTSCGQETIAQVVSVDYVMDKLRELTITPQDKNFSKVNSVGQALLAVF

SEQ ID NO: 10546 - DNA, 5893 bp, DROSOPHILA
aaaaggacatcgcttgggggtattaaaatgggaaccggaacggaacggaacccataaagatccctaacgatcgatgaccaggataaaaatctcaaattacctccgggaatgcagatttagtgcggggataaatacaccagtctgatatttacaaaaaaaaaggaccatatcttgcttactatttttaatatatttatgtttagttattcaatcatttttgcccataaaattacctaaaatgacttttcaatcatttctaaaatatcattgattctaaatcgtatacgtatcttggatcatctggggacatttgaggatcctaccttaatccctgctcgcatttccattacccgtctccggtcattagtcattcggcaggcagatatgcaatttccggtaattcgtaactcgactagctttgcataaactctcaaccatatttccgcttattcaccagtccggtctaagtgcctctgacccgatcccgatcccgatcgcgatcctgaggacaacgacgacgacgaccctcgacgagtgtgactcaggcaattagcggaggaagtgagtcgaggagtttgggacagcagacggatttgtgtcattagcgcactcgcgcagctcgccacttgtgtccggcttcatttccattttcattcagttttcgggctggaaaaacccggggaaatctgagctgcgctcactaattgcaagtttgttatctttgggaacgcgcttaggctaccttacgccaaataaatctgataaaacaggcttacattttgcacatgaatcagacacatagatttattgtttctggtttttcttttctttcgtggtttacatgtaacttttggcttacaccgtacgtgggttagatatttgttgtgtgccatgccacaatttacaatatttactagacattttctcttttatcatcagccaacacaatggattgttcgttccagtattcgtaattcagcttgctatttcttgtgtactcttcgttagtttattatagttttatcacagctatacgtttatgtttacttcttaataattgtgtttcatattgattaaatatgcttctcaatccgtttgtgatgcggccacaaaaatatttgaaatacatttacaccaaattgcctacgaaagaatacttaagaaggaataataacatattttaataaggtaagaagtaggggaatatttcaagctgttttaggacagctcgaatccggtgttgctgcttacggcatagcgaagtttgtcccgcagcgtggacttcttttggtagttgggcagcttcagcagattgaagcaggtcgacgaggtgggcagtcggttgagtggatccttcttacgtatggcgaagaaaccgcgaatcacacttccgattgtgtcgcctgtatcctcgtcatcactaacctccacgcaacgaatcgagaatggtggctccaggtgggcgaaacccaaaagcggcggctttgagcagctggtgacaaactgaaaagttgaactcggctggttagtggcaccaatttgacttgaactatgaatgacatacctttaggaacagcttgcgctcctcctcggtgaaatccttggccaggatatcccagagccagcagaccacttgatgagtgtcgtggaagccaccgtagtaatgcgtatgcttttgcagatcctttaagtccaatggactagtgtccccagaaataaggcgctgcaattcgggaggcgagaaaagagacaaccattctggattgacgatgctgcggaagccacgattgaaagctatcgtctgctcgcgtatctgggtgttcatgtggaaaaaggccatgtagtgtatgtagaccagcttgttgtggtcattaaccacacgcgccttgccacccggatgcaaagcgagcgtgacaattttgcccattacatcctggtccacggaaaaggtaaggttcagatcggacacatcctgcttatagtgtttgatgaaggtaagactgcgatacaactcgttgtccagcgacggcagctcgtccatgcaggagtacagggcctgttgcgtctggccgagcagctgggagaggaagaaggaggcaaacggcacgtccaccacgatgccctcgtacaccgccttgcccagcatgcggcccacaaactcaaagagctccaaatgattgtcctggacgtaggaaatgggcgagggatataatcgctgatccgaggtggttttaaagagattcagcgacgggtcgaacacctttttgatggtctcctcaaggaattccttgaacactccatcctgatcaattcctgcctcgtgcagtccttgttgattgataaaacgcacgcggataacaccttttagggcttgcgtgggctgggcggccagttgccggtagccatcctccacaatacgatcgcgatgaatgacaattagtgcggatcgaggtgaggcgcaggcactctccgtcagacccatcaccgccttctcattctgcacgaactttcggaacaacttgacccgatcctcgtgcggtataatgtgcggcatcttggcgagcagcagcatcgcattcctcttggccttttccaggtcattgatgaacgtggagggtttcacctctggtatcagccagtgtttgggtggcgtgaatgggcgacgacaatcgcggcggtacaagcaaagcatcagagtgtgcagcgagaggaaaaccggatgctggacaatgttcttggcacctgctggagattgcaaaatgcatttaacattttcagtcaattaaatataattattttctgattctattaaatattaattgcttatttatagccgctgcatttagactaactagggaaaactaattaaattagattaaagcagacttacccagaagattatcgttaataagtttatagagaatattattaaggaagtaggtcagcaacacgtagtcgttgagtttgaaaggattctgctccgtgtacatttcgtgttcatccagaatcctacagagatggttttacatgttttaaaactaagttcagttttaaaatgaatctacatacgttacgtagtgcgtcatgcagtcgcaaaagagcatcagcatggcggtctgtggcttttgcaagtttgtttcggacttcagcagctccaagtactccttcatgccacaattggggccaagggacgtgattagcaaccaaatatcatatagcacattgtcgctgtagcaaatgccagtcagaatgtccagtttcatctgggaaagcgtgttgagggcggcataatacatgccgcagattcgtgacacctgcaccacctccgcactgtcgagcttgcgccactgctgcttagactgcttgctgctcgccactcccattaagtttacacctctcgtggagctgcgctccaaggcccgacgcagcagattcgatatagatggttgttggggagattgaaactcgatccgctcgtagttaagattgatttgcttcaagagatctccgagcaacagttttatgcagcgatgatcccacaacatgtggaactgcttcttaatcagcgccacattctgattttgagcaggctccggacccggagtatgccatcctaaaagctcgtgccactgagtaaatactcccttagtggtcaccgtgttgggtattagttccaacagcgatgtggtggtttcctataaggattacaagtataagtttttcaatcaagaagcgtttatgtaaaactcacagtcagtagtggataggccaactccttggactccccttggccatcgatattgaacaaattcactatgtttcccagaaaagccagggacttggtgcccggcatgctagtgccgaactcctcgaaccactgcacgtcccccgaaatgctaagcgccttcttaagcagtcccatcgatgagaactgttccaggcactgaggtacactctgttgcagatggtagattaaagcgggcacagacagaatctccgacagaaactttgccagtagattacgactgaagttgccatcgatcaggggacgaaggcaaagtgtaatgatggccaccagggtgacgggctttacagacaactcctcgcgaacagtgccgcgtatcaaaacgagctggatgataatatggagaataacatgaataagcttattaaaagaataaaagtcacaacatacccgcatgattttgtaaaaatcgtgctgcaccagatgaccttgaatattacaacagattttttgcatggccggctgcagtttctcaaactgggcattcctgagtatcgcccaggatttgggcgccgtgaagactaccagtgtgtgcagaaatagggcaagggacaagctgtcggcatggttttccggcttcagctccggcagcaatgtcaggcagttcgtgagcagtatcttgatgtgcgcgatccagggcaggctgcgttccttaaaaagacagagggcggcataggatagcttggtgttctccgactccattgccttgatgatgtaacggcagatgcgctccagacgctcccgtgcacgcacatcgctcttgtccagcctgatctgggtgaggtagcgacgaagcaccggatagacgttgcttgccacgagttccagttccgcatccttatcgtcatgattctcagtgaacatggcatcgaaatcgagtctgcaaaacgggttactatttaggatgttccataaaagtagatagacacttacatgattcgtttctggtacttcctacgcgccgcatatcccttgagcgtggactgcagcaggatggccgcctgttcgcgtcgcttttccagtgcccgctcctcccgcgccgcctttgtctgctccaggaagctggccttttggttttgggcaaacattttgctctgcagcaggttgaaagaattttgttgatgatgtattgttgttgaccagagcgtttgtttttgtcgggattgtggccgttccgggatgtatttatcgtttcaatcacttcctcgagctgaacgctatcccagagccttgattcagagcctcgctggatattttctgcattgcatatcgagcaaaatgcaaaaagaaaatatccttattttgttccaattggtggtacagtgtcaccgtctccgcttactgtcaaataaccacagaaataggccaaagcgcggagatcatttttgttggcaattttctagctaaaaccgtggtttgagtccgcgctgcatgagcacggcatcgaacctagggcagctttgctgctcaactgagcgtccatcaccaagggaaagtaaccgataaccgcttgcaagaaagatcgactgtatcgagtacacatcgatttttgttccagcactagcaacgctgcgttcgcgtgaataaataattaattaattgctgaaaaaatggattagctggcgaaacatgcatccgaccaagtgcaacagcaaccgtgcgcagtactcagtaatcgggcgtttgtgagcgtaagcgccatgaattgtgtgtctaaaaaaaagtaatggtttagcaaaaacaacaacgctaaagcccaaaagtgctaataaaaagtacacacatacgcactcacacaaacgcgcgcgcgagcaaaggtgaaaattataaattaataaatacgcgatccgatagcatatcaaattagcgaaatatgctcgtttctcgtgctgatcgaatcaaaactgtgaattgcaacagaaaataatttcaaggtttgcagcaggcgaatagaaggcgaaaaggtaattgaaaaatagaacgaattttggcacaagcgcactgtagctatatatttttgttgtctggccgaccgtggctaggtgggtggggcgtgattttgggggccaatcttgtgtgttctgtgta

SEQ ID NO: 10547 - DNA, 3455 bp, DROSOPHILA
atgtttgcccaaaaccaaaaggccagcttcctggagcagacaaaggcggcgcgggaggagcgggcactggaaaagcgacgcgaacaggcggccatcctgctgcagtccacgctcaagggatatgcggcgcgtaggaagtaccagaaacgaatcatactcgatttcgatgccatgttcactgagaatcatgacgataaggatgcggaactggaactcgtggcaagcaacgtctatccggtgcttcgtcgctacctcacccagatcaggctggacaagagcgatgtgcgtgcacgggagcgtctggagcgcatctgccgttacatcatcaaggcaatggagtcggagaacaccaagctatcctatgccgccctctgtctttttaaggaacgcagcctgccctggatcgcgcacatcaagatactgctcacgaactgcctgacattgctgccggagctgaagccggaaaaccatgccgacagcttgtcccttgccctatttctgcacacactggtagtcttcacggcgcccaaatcctgggcgatactcaggaatgcccagtttgagaaactgcagccggccatgcaaaaaatctgttgtaatattcaaggtcatctggtgcagcacgatttttacaaaatcatgcggctcgttttgatacgcggcactgttcgcgaggagttgtctgtaaagcccgtcaccctggtggccatcattacactttgccttcgtcccctgatcgatggcaacttcagtcgtaatctactggcaaagtttctgtcggagattctgtctgtgcccgctttaatctaccatctgcaacagagtgtacctcagtgcctggaacagttctcatcgatgggactgcttaagaaggcgcttagcatttcgggggacgtgcagtggttcgaggagttcggcactagcatgccgggcaccaagtccctggcttttctgggaaacatagtgaatttgttcaatatcgatggccaaggggagtccaaggagttggcctatccactactgactgaaaccaccacatcgctgttggaactaatacccaacacggtgaccactaagggagtatttactcagtggcacgagcttttaggatggcatactccgggtccggagcctgctcaaaatcagaatgtggcgctgattaagaagcagttccacatgttgtgggatcatcgctgcataaaactgttgctcggagatctcttgaagcaaatcaatcttaactacgagcggatcgagtttcaatctccccaacaaccatctatatcgaatctgctgcgtcgggccttggagcgcagctccacgagaggtgtaaacttaatgggagtggcgagcagcaagcagtctaagcagcagtggcgcaagctcgacagtgcggaggtggtgcaggtgtcacgaatctgcggcatgtattatgccgccctcaacacgctttcccagatgaaactggacattctgactggcatttgctacagcgacaatgtgctatatgatatttggttgctaatcacgtcccttggccccaattgtggcatgaaggagtacttggagctgctgaagtccgaaacaaacttgcaaaagccacagaccgccatgctgatgctcttttgcgactgcatgacgcactacgtaacgattctggatgaacacgaaatgtacacggagcagaatcctttcaaactcaacgactacgtgttgctgacctacttccttaataatattctctataaacttattaacgataatcttctggcaggtgccaagaacattgtccagcatccggttttcctctcgctgcacactctgatgctttgcttgtaccgccgcgattgtcgtcgcccattcacgccacccaaacactggctgataccagaggtgaaaccctccacgttcatcaatgacctggaaaaggccaagaggaatgcgatgctgctgctcgccaagatgccgcacattataccgcacgaggatcgggtcaagttgttccgaaagttcgtgcagaatgagaaggcggtgatgggtctgacggagagtgcctgcgcctcacctcgatccgcactaattgtcattcatcgcgatcgtattgtggaggatggctaccggcaactggccgcccagcccacgcaagccctaaaaggtgttatccgcgtgcgttttatcaatcaacaaggactgcacgaggcaggaattgatcaggatggagtgttcaaggaattccttgaggagaccatcaaaaaggtgttcgacccgtcgctgaatctctttaaaaccacctcggatcagcgattatatccctcgcccatttcctacgtccaggacaatcatttggagctctttgagtttgtgggccgcatgctgggcaaggcggtgtacgagggcatcgtggtggacgtgccgtttgcctccttcttcctctcccagctgctcggccagacgcaacaggccctgtactcctgcatggacgagctgccgtcgctggacaacgagttgtatcgcagtcttaccttcatcaaacactataagcaggatgtgtccgatctgaaccttaccttttccgtggaccaggatgtaatgggcaaaattgtcacgctcgctttgcatccgggtggcaaggcgcgtgtggttaatgaccacaacaagctggtctacatacactacatggcctttttccacatgaacacccagatacgcgagcagacgatagctttcaatcgtggcttccgcagcatcgtcaatccagaatggttgtctcttttctcgcctcccgaattgcagcgccttatttctggggacactagtccattggacttaaaggatctgcaaaagcatacgcattactacggtggcttccacgacactcatcaagtggtctgctggctctgggatatcctggccaaggatttcaccgaggaggagcgcaagctgttcctaaagtttgtcaccagctgctcaaagccgccgcttttgggtttcgcccacctggagccaccattctcgattcgttgcgtggaggttagtgatgacgaggatacaggcgacacaatcggaagtgtgattcgcggtttcttcgccatacgtaagaaggatccactcaaccgactgcccacctcgtcgacctgcttcaatctgctgaagctgcccaactaccaaaagaagtccacgctgcgggacaaacttcgctatgccgtaagcagcaacaccggattcgagctgtcctaaaacagcttgaaatattcccctacttcttaccttattaaaatatgttattattccttcttaagtattctttcgtaggcaatttggtgtaaatgtatttcaaatatttttgtggccgcatcacaaacggattgagaagcatatttaatcaatatgaaacacaattattaagaagtaaacataaacgtatagctgtgataaaactataataaactaacgaa

SEQ ID NO: 10548 - protein, 1078 aa, DROSOPHILA
MFAQNQKASFLEQTKAAREERALEKRREQAAILLQSTLKGYAARRKYQKRIILDFDAMFTENHDDKDAELELVASNVYPVLRRYLTQIRLDKSDVRARERLERICRYIIKAMESENTKLSYAALCLFKERSLPWIAHIKILLTNCLTLLPELKPENHADSLSLALFLHTLVVFTAPKSWAILRNAQFEKLQPAMQKICCNIQGHLVQHDFYKIMRLVLIRGTVREELSVKPVTLVAIITLCLRPLIDGNFSRNLLAKFLSEILSVPALIYHLQQSVPQCLEQFSSMGLLKKALSISGDVQWFEEFGTSMPGTKSLAFLGNIVNLFNIDGQGESKELAYPLLTETTTSLLELIPNTVTTKGVFTQWHELLGWHTPGPEPAQNQNVALIKKQFHMLWDHRCIKLLLGDLLKQINLNYERIEFQSPQQPSISNLLRRALERSSTRGVNLMGVASSKQSKQQWRKLDSAEVVQVSRICGMYYAALNTLSQMKLDILTGICYSDNVLYDIWLLITSLGPNCGMKEYLELLKSETNLQKPQTAMLMLFCDCMTHYVTILDEHEMYTEQNPFKLNDYVLLTYFLNNILYKLINDNLLAGAKNIVQHPVFLSLHTLMLCLYRRDCRRPFTPPKHWLIPEVKPSTFINDLEKAKRNAMLLLAKMPHIIPHEDRVKLFRKFVQNEKAVMGLTESACASPRSALIVIHRDRIVEDGYRQLAAQPTQALKGVIRVRFINQQGLHEAGIDQDGVFKEFLEETIKKVFDPSLNLFKTTSDQRLYPSPISYVQDNHLELFEFVGRMLGKAVYEGIVVDVPFASFFLSQLLGQTQQALYSCMDELPSLDNELYRSLTFIKHYKQDVSDLNLTFSVDQDVMGKIVTLALHPGGKARVVNDHNKLVYIHYMAFFHMNTQIREQTIAFNRGFRSIVNPEWLSLFSPPELQRLISGDTSPLDLKDLQKHTHYYGGFHDTHQVVCWLWDILAKDFTEEERKLFLKFVTSCSKPPLLGFAHLEPPFSIRCVEVSDDEDTGDTIGSVIRGFFAIRKKDPLNRLPTSSTCFNLLKLPNYQKKSTLRDKLRYAVSSNTGFELS

SEQ ID NO: 10549 - DNA, 3723 bp, DROSOPHILA
ttggcggcaactcacaaggtattcgtagcatttataatagtcactatgcatagctgaaacttataatcgatggtatttggaatggagcaacttcaatcattcgaggatattatatttgagaatatttgttttaaaatagaagattgtaaatagatcattgacataccatattgagatgccggcgtgggcatggtaagacatttaaagtaatctaagaataaactgtaaatagacttccattacatgcaatgtattgaattgagaaataagatgagaattcacgaacttgttaccacaaaacttataaaatgcatacctatgccaataagtcatgggggattgaaaaccgcatattttgatggttcatagtggtacgtaagatataatgtatgcttagatgttcatatttattgactggtactggtactgacattttaatgttacaaacaatggaattagcgtaaaatgataatgataaagccatacagatttgttacctaataactcggaaaatttgatcgtcacctttaaactgttattctgctcagtgttcgatatttagtatatagattgatttatgtaagcacctttagaagtatgctaattcatatactgtatgtacaactgtaaataaatattacttccgtgagcgttttcaaaagcgctgtcttcaatccaaaatgggcagaagtgccagtttcgttttgtttaccctcgaatacggagtgcaaaacgacttttaaattttgttgccgacataagaacgttttaaataaacagatcaattttaagaaacccgcttctggttaagttatttgctcttcagttgggtggtacacatttaaaaaatgaatacgaaaatgttatgaatatttttgaactcattttcaaatgtaagacccccttccgatttctgtttcatataccgcagttccgtgaggtgcaatcttagcttgtcgttgtatttgacacaagttatcgataattctacatagctgaactaccatcgctgaaaaatgttggcaaaacaaaaagatgagatccgaaattttggcaagcgcctttttgggcctggcggttaggtcgattatctcgctgtactcctactccggcttcgattccccgccgatgcatggcgactacgaggcccagcgccactggcaagagatcacggtcaatctggcagtgggggaatggtacacaaacagctccaacaacgatcttcagtactggggcctggattatccgcctctgacggcctaccacagctatttggtgggtcgcataggagcatccattgacccccgcttcgtcgagctgcacaagagcaggggattcgagtcgaaggagcacaaacgcttcatgcgcgcaacagttgtttctgctgacgtgctcatctatttgccggcaatgttgttgctggcctattccctagataaagcctttcgaagcgatgataaattgttcctattcacgctggtggccgcgtatcccggacaaacactcatcgacaatggacactttcagtataataatatatcactgggctttgccgccgtggcaattgccgcaatcttgcgaagaagattctacgcggctgcatttttcttcactttagcccttaattataagcaaatggagctgtatcacagcttgccgttctttgcgttccttctgggtgaatgtgtaagccaaaaaaggtgggtacttgcgattcaaaacgacttttttttaatagcaagacagctaaagaatcctcgatactaaatctaaactcatcttaatcttttcaaccacagctttgcttcttttatcgctgaaatctcacggatagcagccgttgtcttaggaacatttgctattttatgggttccttggttgggatctctgcaggccgtacttcaagtactccatcgcctgtttcctgtcgcccgaggagtttttgaggacaaggtggccaatgtttggtgtgccgtcaacgtagtttggaaactaaagtaagaaagtagaatcaagttggatacaattttgtaatgtaacaaattgtaggaagcatatcagcaatgaccaaatggcccttgtgtgcattgcatgcacgttaattgcatctttgccaacaaatgtactactctttcgaaggcgaactaatgtcggatttctattagcgcttttcaacacgagcctggcattcttcttgttttcatttcaagtaaaaacattgaactttaaagcgagttttgtattaaaacttatatatttttaggtgcacgagaagaccattttgctgactgctttaccagcacttttcctacttaagtgctggcccgacgaaatgattttatttctggaagttaccgtattcagcatgttgcctcttctagcaagagatgaattgttggtgcccgccgtagtggccactgtggcttttcatttgatattcaaatgttttgattcaaagtcgaagctcagcaacgaatatccactgaagtacattgcaaatatatcgcagattctgatgatcagtgttgtggttgcttctctgaccgttccggcacctacaaagtatccagatctttggccccttattatttcggttacaagctgtggacacttcttcttgtttttcttgtggggaaatgttcaacaatttagcagcaagttaagttagtttctaagataagcattccataacaatatctacaacataagccaaagaaatgtttgtaagccctttatcgagtcttgttttattttgtgccaattatgtttaatttaagcagttaattcaaggtgaaataaggtatttgggtataaatggcttagtcacttccaatactcttatagcccttttcccgtatcttatcatggatttaatcagcgtatagtgtctacactatgcacaaagggtactagtgtggatataaaccaaaataattcagaattaatattgtaaaaagattcacttgcttaaaatatgtgaattttggttttaatcttattgaatttaattttaacgcatttcgaaagtcgaatgacccacaaaagcgactattttgttggatagtgtatcaatgcttttgaagagataagataagataactcgtgaaatattaggtgaataatatgtggggttttgttcattgtgctcttgttagttatgtacagttaatcgatcggtgaacacgcctatagttcaattttagttggcaaaagaattttgagaactatgaatttaacaaaatcagctacgttagctgctgcgattttttgtatcgttttgagccaagtttctgggcagacgaaagatgaaaccaccacaaccgagacgccaaaggtaccacataaagtgtttaatttttaattttctgaaattggtgtgggtgtgcgtattacgaatgcaattgtaaactgaataataaagccgattacattaccaatggaattgatacatatagttagatttcaaatatcatttgtgcaacttaactaaaaagatatgtgcatactgctgtaaattagtgaacagattatgttaaattgtgttaaatatttgtgaaagtaatagaatgactaaattatatgtatcactatcaaattcgtgataagaaaaagtcttgcaaagctaaatcgataaagatgactcaaagaaagaccgaaaaattcaccacacaaaaaatttaaaaaaaaatgagaacagtgtgtaatataaataagttgtttaaa

SEQ ID NO: 10550 - DNA, 1476 bp, DROSOPHILA
ctaccatcgctgaaaaatgttggcaaaacaaaaagatgagatccgaaattttggcaagcgcctttttgggcctggcggttaggtcgattatctcgctgtactcctactccggcttcgattccccgccgatgcatggcgactacgaggcccagcgccactggcaagagatcacggtcaatctggcagtgggggaatggtacacaaacagctccaacaacgatcttcagtactggggcctggattatccgcctctgacggcctaccacagctatttggtgggtcgcataggagcatccattgacccccgcttcgtcgagctgcacaagagcaggggattcgagtcgaaggagcacaaacgcttcatgcgcgcaacagttgtttctgctgacgtgctcatctatttgccggcaatgttgttgctggcctattccctagataaagcctttcgaagcgatgataaattgttcctattcacgctggtggccgcgtatcccggacaaacactcatcgacaatggacactttcagtataataatatatcactgggctttgccgccgtggcaattgccgcaatcttgcgaagaagattctacgcggctgcatttttcttcactttagcccttaattataagcaaatggagctgtatcacagcttgccgttctttgcgttccttctgggtgaatgtgtaagccaaaaaagctttgcttcttttatcgctgaaatctcacggatagcagccgttgtcttaggaacatttgctattttatgggttccttggttgggatctctgcaggccgtacttcaagtactccatcgcctgtttcctgtcgcccgaggagtttttgaggacaaggtggccaatgtttgcaatgaccaaatggcccttgtgtgcattgcatgcacgttaattgcatctttgccaacaaatgtactactctttcgaaggcgaactaatgtcggatttctattagcgcttttcaacacgagcctggcattcttcttgttttcatttcaagtgcacgagaagaccattttgctgactgctttaccagcacttttcctacttaagtgctggcccgacgaaatgattttatttctggaagttaccgtattcagcatgttgcctcttctagcaagagatgaattgttggtgcccgccgtagtggccactgtggcttttcatttgatattcaaatgttttgattcaaagtcgaagctcagcaacgaatatccactgaagtacattgcaaatatatcgcagattctgatgatcagtgttgtggttgcttctctgaccgttccggcacctacaaagtatccagatctttggccccttattatttcggttacaagctgtggacacttcttcttgtttttcttgtggggaaatgttcaacaatttagcagcaagttaagttagtttctaagataagcattccataacaatatctacaacataagccaaagaaatgttt

SEQ ID NO: 10551 - protein, 461 aa, DROSOPHILA
MRSEILASAFLGLAVRSIISLYSYSGFDSPPMHGDYEAQRHWQEITVNLAVGEWYTNSSNNDLQYWGLDYPPLTAYHSYLVGRIGASIDPRFVELHKSRGFESKEHKRFMRATVVSADVLIYLPAMLLLAYSLDKAFRSDDKLFLFTLVAAYPGQTLIDNGHFQYNNISLGFAAVAIAAILRRRFYAAAFFFTLALNYKQMELYHSLPFFAFLLGECVSQKSFASFIAEISRIAAVVLGTFAILWVPWLGSLQAVLQVLHRLFPVARGVFEDKVANVCNDQMALVCIACTLIASLPTNVLLFRRRTNVGFLLALFNTSLAFFLFSFQVHEKTILLTALPALFLLKCWPDEMILFLEVTVFSMLPLLARDELLVPAVVATVAFHLIFKCFDSKSKLSNEYPLKYIANISQILMISVVVASLTVPAPTKYPDLWPLIISVTSCGHFFLFFLWGNVQQFSSKLS

SEQ ID NO: 10552 - DNA, 12260 bp, DROSOPHILA
ataatcattggtacagacaattaaaataaagctaggtgaagacttatgtacaggtaaaaagttaatgaacatgaaataattgaacccaatttccggattttctgatgaaaattcttcttcaattcgggatgataaatgattgatcgatggtgatgctcaaatgcttaggaaaattatatatcgtgtgtgtacaacaacaagaacaacaactatctattgtatatttttattggattagaattatatcattggaatccaaacaaaagtcgtacaaaacaagaaggaaatatttatatttatatatatataagaattggaattatcaaactgattggtgctggaaattattgaatttgtacatcaacgaaaatcgcatttaagattaaggggaaaaaaatgggagaaaagagttgtacaaaagttcgctcggaatcgtaatgaaaatcaaattagcggcgttcaaaatcagaaattgtatttaacttgtaactgttttgtttcacttgaaattttattgcgatagagagttaagacagaaagagagaaggagtgaaaatattctctgtgttcgctgatttgtaatatatatcgtttggaaaacgaaatcaaaatacgaaaacgaaaacgagaaaacacttggggtatcggaacagaaatggatttctatagtatagtatatattatcccgctggtggaattgttatgttgtctggaagaacctgcatagttattcatctcataaagtgcgttcgagattaaagtacatgttttgtattattttgtagtatttcagatttcttttgaaaacgaatcaaccgaaaaggaactgaaaacgttaaacaaaacacattaactcttattagcccgttaaagttcttcgaatcgttttgcagtatcgttcgatcattggttaattcgtattcaattcgaaccaaagaataactgaagagtacgtaaaacaaaatgcgaaagtccattggcagctcgatctgcacaaagcctacttacttttgcccggctggccgcgcccgcccattccgggcatcatgttgtcacgtggcgggggcggcggccccctcgctcctggcccctgacccctgccccgttggctcagaccgccgcggccggccactccgcccggacccatctggttgttgtactggtcgggcgcgtccgccaggaagttagacggcaccaggccgcgcacgccgtccagttcgcccatgtagaaaccgtcttcatccatatcaccgtagacgagtatgatttcgcccgtcttgaaacacaattccacctgctgtttgggggggaagatttcaaacatacgtaattaattaaaaatattaataaatatattaacattatttataaatttaagatcttagaacgaacttagaggatatgggcgcatgtgttcaagcttttcttttatatatcctttatatttttataaatatgagtatacaagacgaattgcaatagaggcttcctaattgcatttaatgtaagtacggaatttgcctaacaaaaatataacgtatacgtaatgtgggactatttatttgaaatattacgtatacgccgcgtgggactatttttggatactataagtatgattaattactctacttattggtaggaaaacgagttttcatagctagcagagctcctagcaataatattgatccttgagacagaactcacttctttggccaccggagcaagaacatgttggctaaatcctggcagtaaactgccaaatagaccgcccataagactacttcctgcctgactttcttctcgtctcgtcttcttttgtatgcaaatcgaatgagcaacagggcaaataaagatctactttttagacttacctcggcatccacattgggactcaactcctggggatcgtagtcgtagagcgcgatcattcgcttcacgggcatgttggcatagatgtcaccccagcggtcgcggctcacgttgcgcatgctctgctgcggagcaccttggccgggcatcacctgggcggtgccgcccacgccgactccctggccctggcccatctggcccggcatttgaccgggcatctgtccaccggcagtcatggaggcggtggtgtcctccacctcggagaccatgttgtgcggcacatagcctcggcggccacgtaactcgccccagtagaagccatccgcatccttatcaccaaatacctattttaaattaaatgggcatatgccgcaataaccagatattagtggtaagtcattgattatggggcaatgagtgattattgtagttgttaagtgtattggagtgcataacgctaacttaacgagtatttatgaaactattagaagagagaacaacgtctacatagtggatatagagtactgtttggttagatagttgtgattgggttgggttgtcttgatctggtggtcaggggttaactctcaacgaatctgattcttaggatgagattactgaggatgtaaagagatcggagcgaaggaaaaacatgcactgattcattcaattagcgcaacaagcaagcgcagccaattcatcattggtcgccaatgcatccaatttgcatcttcgattgggttttgcggatctaatcgcatcagatcggatccaatcggatcgtatcgggctcaccattgggtggttggttgctcgttgaggtcgctgcttcggctggaaagtgtcttggtggttctgtgtggattggcttatctcgggaatcagggggcttaccttgatcgtgtcgccctcctggaagggcagctcttcgtcgcagccatcgggatttggactcatcgtggatgggtcgtagtcgaacatggccacaaaatagcggggcttcttctgtgctccgggcatctgacccggttgtcccggttgaccgggctgggcctgctgctgtcctgcctgctggccgggcatcatctggccctgctgcatctgctgctgctgctgttgctgctgattgagcggtcctcgtggtcccatcatctggccaggcatctgaccggacatctgaccgggcatttgacctggcatctggccaggcatctgaccagccatttgtccagccatctgacctggcatttgaccaggcatttgtccaggcatttgaccgggcatctgacccgacatctgaccctgcatctgcccttgcatctgcccttgcatttgcccctgcatctgctggccctgcatattaagctggccgggaactggtcctcgaaagcgtggcccacccatgggaccctggggtccgtagggctgctgctgctgttgctgtggtccctgcggtcttcctggaatcgggaccatgccccgttgcgctcctggttggcctggctgatagccctggttgttggtgatggcgacgatcgcaggaatttgaatcaatttgaatgaatttaaaattttgttagcgtttgattttggacactggttttcattttttcggggtgttgcaattggtaattagtactctgtttttcattcacattgtctttagagaggtttacgtttagcaaagtggaggcgtctgcgtttagctggatcgctttagcattcatctctttagactactaaggaggtacgaaagctgtatgtgtttgtctagtgtgtgtagagtgtttcaatggagcattacgagctaaatacatatatagaaactgaaaagccaaagatctatagctgatagtcgaagtacgaagctaaacgagtatgaatactgaggggttaggatgttgtcggtagtaagaaagcacggagtttctttatgtttggagtcttgatggtatcttcaagtgacttgtgtggttgtttacacatgtttctagcatttacatatatgtataaagggagctcttatatagaggtatttgtagatacatttggacagaagaatcagacaagggtttgactaagcactgagtccaatcgcggtagactaaaggtaactctttcttctaagacctactgatcgtaggaccagaaatagccatgcaatttgtagccctgttttaatatttattttccaatctttaagattttagtggtacttacaggtcagccgaaatatttaaatttcttccctaatagttaattagttaattatttactaaggaaaaaaattagaaaaatctacaaaaaactgaaaattaaaccaaagtctgattttttctttcttgaatatacaagcctaattgtcgcagttgtttagcaataattctagctaagctaaccaaataaatatgcatcgaatctagaagatacttgtacgcaaagtgttacagatacttaacgctagtgtgttgtgtggcgaggtgtgtgtatgtgtgtgtgtgttcaatatgcggagatgttgtgggtataacttacattctggttcacttgattctgtgtgggtttcgagaagaggccaccgagaaggccacctaacaatccggagcctgcgtcgggctgtttgtcgatttcggtatcggtatcaaggtgtacgggttcgatttcagttttggtttcggtttcatataatgaaaatgaacatgtacttgtttcgtttaaaattgttcgttgcattgcgttttccttaagacaattgatcggcatttccgctcaatatttagttagaactctacttgaaatcggaacaactcaaccaagttcaaaatcttagatatattttattattattcggtaattgcattttgcagctgacatgctagttgtgaactatactcaaactaactgataacccaaaatcgaaaggaaaataaaccaaagggttctagcaaaagtcgcatactctggcatatctcttaagtacaaaaatgatatgaaataataaaagtaaaatgtgaataactttacatacatacaagttctttgggtgggagaagaagaagggctcaattcaattgcttgggttcttatcgccaaggactaatcgaggactcaattgtctcgcagttctttgacatgtgaaatttgtgtgaattttgtgcgattgtctcaacaatttctctcagtgtatgtatataataggttcatttgcaaaataaatcgaccgaaagtagtagtagtagtagtagtaggatatagtattggaaatttaaggcagtcaaaaagatattggaggataaacagagagagaagatgtaaggaagaggtaaatgtttaaataaataaaactcaacgtggaactctcaagagaaatataaaacttcagaaatgattcgatgcaatagagggtattcgtatggatttcgggtagttccgattcaatcttggcatggaggtgcgcgggttttacaagcaatgggttcttaaatttcaaggtattccttttgtgtgactagcattcgggttggttgatagtatgtggaagtttacacgagatcaacttatgtatgtacattcttcgatggtgtgttggcttcaagttaagattacaatagaattgagaagagctctcagccaattgaaaatcgaaatgataaaatgaaacgagttcacacaaacattatttacagtgtacgcgttggccggaccaccaacacggcgtcgcactcacctgatgacccggttgacccggctgaccctgctgctgttgctgctgctgcatctgattgggatcgtactggccgtgatcctgctgcccacccatcatgtgctggccctgttgacccggctggccgggcatgccgcccatctgctgctgcaccgtcatcccgtgcggtccctgcggcaattgcggacccatgcccatctgattgggacccctgcgagccaccgcattgcgcacagtgtctacaaaatggcatggaagagttccttaatcagaagatgcttcaatcggaagataaggatagagcttacttggtatcaagatgggcgcactgtccgccgactgggaatcgcgggacttggtgcgtatggtcacggcacgcggattgaagacgcccagcttgccaatgtcgatgagggcgtggtcgccggtgggcgagttaatgtcggtgaccttcttaccatcggcgtacacagcatagccggttacaggccccgtcgaggtgggcctgttaaccggctgccatgtcaccagaatggtaccatcctgcggaccggcctctagctgaatctcctgcggcggatcgggcaggcccttggtgagggtgcggaagtcagcatacgctccgggcgcctcctcctgtcccggccgcccagctccgcccgtttggcccacattcgccgcatgctggcccacggcccgcagatgcttggcccgcaccgtcacccggtactgggtgctcggcgccaggccagtgattgtatgcctatacatgcccggcttgacggtgcgcacctccacattgtttacacacaccacgtgctggtggttcgagttggccggcagccacgagatgaccgccgaggaacaagttatgtgcgaggcgcgcaccgccgaggggcccagatgagcggtgtcccgcccgatgatcatcgtgcaggcggcatcccgcgatgtctgtcggttctgggttacgctccgcacgctgatgcgatgcggctggaggggcagagaatcggatgtcattactcggtctcataaatggataagtgagcgagacgtctcataagatcaagaataaattaaatgttctcatttttggaaacattatgttaccattttctaattgattgaatgccaaattgaatattgtatagttattgtattcaagaagatataaaaaaaaagtacgatatgatagatcagatttgtagggtttttaccacaatatcattgcgatttactgctattagacatagacgtaagtgtattggtcataaataaatgtgtgtattgcactcgattatttattggtaacatgcgaaagttaaatagtgagtggaaatggtaaatggaaaccggagtaaatcgtctaaaaacaacatgacatgtgtgcatcttgtttaaagacggttcactggcattagtatttgatcttggggttggatggtgcttcaaaggatgccactgcttcgtagatcctaaaaaccgatctattcttgattttaagatgactctcattcccactgttggcagctcatctcacccgcgtggagtcaacgccctcgataagcgcgcgtgtgcgttcgttggccttcacggtgaccttgagcacgccgtccacgtagacgtggtagctgtcgatgaggttgtagcccactggctccggcggcgaccagccaatgagcacgctcttgttcagctgccgttccagcgtcaagtgcttgggtgctggaactgcggggaggagcaagaagtgtgtcattagccagctgattgacccagggacaatagcgcagctctaaatgcagcggactaggtgctagcgatgccccaaacggctcaaggtggattaaatcgcggaacgggaatctaatcaagggtctaagtaatgctcacattcatgccatgcacagggcgacgcattcgaggatcgccacaaaaaccaaaagattaacaagttgaaaggaccaagtgattttggaccgggaatagttaccattgtcgctgatgtcgtcctggtcgtgctccagatcggtgtgcgtctcacttaagcgtgccagatcctcgtgggtgtgtgtgagcaatgggttgtgcggtggcaaggagggcagcgacgtggtgtcgcactgcatcgatccgtcctcggcatcgcgcagcgtcgacagcaccgcctggtggaactccaggaggtcgtcgcctagcagatacagatacagatacagatacagatacaaatgcagatacaggcagagatcgtgggtaagctattgcgcttggcagtcattaacccacctactaagcgttgcacaaaggaggcaggaacaaggccgcgtcgcccgtccagcagctccgcatctaggtagccaccttggggctcaccactggtccacaccagcagatagtcgccggcgcacagggagagctcgccctcagcctccctgcaaggcatggaaaggaattcattatgaacactgaaaataacaaaggttaatctgatgtgttctaggcataggttcggttaatcatacaaccgttggagggatcgtttaaggattgcgcataaggaaaatcgtttaaatattgtatttataactcattggttagttaagaagattgaagttaaaagcatataacaaaaatacataattgcttgctcggtgtatcttaaatagtactaaagaaatctgttgaataccgttggtaatctaggtaattagctattaattaaattgatttataagtacagtagttatatttccctttatattgagagttaaacgctaaaatgctagtaagctacgaaaatataatatggcgtatacggctggtttgctttctagttaagaaaatgttgcatacttttaggtggttctgttttcgatttaaatagatgtacataaattgtattaattaattattattaaaatgtcttaagagaataaataataaactgaatatctaaaatgtgtttgaatttattcttgtatgctggatttaattaatgtaggttaattaattaaagattgatgagtgatatttgtctcgtgtaaatgattttcataacttcatgcaatggggaaatggctttcgggtaatatttaataaaaatcgtgactacttactctggaggatcatagggaaatctggctatgaatacgcagcagcggccctttccaggaatatcgagcatatccacctgcggttcactggctccatttaggccatgattgcgagctgttcataagatgagatattagttataatcttggaaaatgattagaccattatactcactgtccaaatctagggcacccagtgccagaccgccgcggttatgcatcatggagacactgaggccgtcggtgaactcgtccagtccccagttgttcggcggaatgggtgagcagggcgagctgcggttgtaccgcgtcagcggtatgtcaatctcgtccagcattttcattttggaagcctgtcgcagggcggccgcggtgaatggatacgaggcgctcgacgccacgtccaggaacggcggaccataggagctgcccagaccaccggctcctccgccgccaccgcttaggccgtacagagatgtggctccagtgatgccgccaacacttggtcccacgcccaatccgctcaagccggtggaacccagtagggtgccggtgtccagcaggcccagattggccatggtcgggtgcgtcagcgaggtgccgccaccggcgcccaaagctgagtagctggtcgagccggcgggcggcaggttatgcgagttgagtgacaggaggggcatggttgtgctctgcaaattgtacagctgtattgttccgcgcttctcggttcgattcaattcgattcgtaatttgatttgtttccaattcaaattcaattcgggtttaatttcagttgccgtttagtatgtatgtgtattgtgtggaatttggaatattcgggttttttttcagaatttacagggtattcgttgtgtttgtggtatttgtacaggtgttgttacacaaacatagaatcacacacacagagatacagatgcagacatacatatagatcgagtcgattgattgattcgttttgaccgcacatcaatcataatcggagttatgggaatcgagttagagatttcatcattattacagtagtagtagtaatagagagagagagaaaaaaagggaagacagagaaagcacataaaacggaaagagagatcacagatacacgtttattcagctgccattggaaaaaggcatctagaacgtcttaaatggacatctatgcatgaacaactgagcatgttggtggtgattttcggctggtcatgagtgcctattgaatctgcaattaacttaagccgtctccaagcgaggattcgtggttatgcaacacggctagcatccaatcatcaccattaaaaagtttatcaacgagtaacggaaagctttcaaacatgtaactccttcaagagatataaacttagtaagtatgtatatgtctgtaaatgcagcagatgcatgagctaggttgtgtacaatcagtttaacaatatatgaacttcgaaggaatgcttcaaaactatttgattagcttgcaagaaatgaactgagtataagaagcagttcttcgatttgtgcatgaccaatgatatatgaatatacatttgaataatattagtgacatttataactaataccatcctcgatacgagtgatttacaatgaaattttatagcatgccagcgaatttgatttcaatgatacagagaatacttatgtaacaggcaatcaaaggtcgaatacagatactcaaacgatttagtttttaaatggttgtgtttgtgattcagtgtaatgtgatattcggtgggtggctttcgatgtgaatgtatttattttcatcagtaatgagactacaacaaacggccggtggctgcagcagcgacgatcaacagaagcggatggtcgctatatatgctatatgctatatggctaggctatatggctactcaaacggatcgaatttacatacaacttataacgcatatatatagcactttctagatgtggcaagcttttaagcaaatcgatcggcagcggtacataattgctgtggttgctgttgttgttcgtagttcattgcgattgaaaataggtggtttacctgacttaatgccgttggcatagccttcatcgtgtgaatatttaccggcaggggtggaatgccagtgattccactagttccgctcagcagtttctccacggacgtctgtccggttccgtactgcatcgattgaatggcatggctgcttagactcgaggatatgccgctgattgagttgggcaccagggccgatatggatgataggccgccttggccgccgcccccgaccacgcctcccgatccagcggagacgctgtgggcggcagcagcggcggccgcgctgtgcgagccaagactggtgccgctcaagctggtgctggccccaccattgggcagcgtggaggccagcgattgcggcaggcttgagtagccggaggatagggcggagacaccgccgccgccgccgccgacgccacctcctcctcctccgcttcctcccagaactgctcttttgtagcggttcagttcttcttcgagttctgcgggcattacaaattccattctatattctatttctgtattagtgttatctctggcttgcttaccactctttgatatggttctaaattcgctatttaccgtgctcaacatggaactgggcggcaatgctgacatgctggcgctggccgaggtgcgaggttgttccagctcggccagcacgcgattatcctgcaattaggcaataaggatagatagatttgtagtaaaatgacaattctctagagaacttgaatgtacatcttaataggctattactttagcattgatctattatttccccaactgccctgagaagtccgaagtagacaattttgtatagaaaaaaatccaaattcaacgtgagcaatccaaaccagattggacggatggatagctcggtgccatccggagccgaaagcggtcttatcaaggagtacaaggactttgccaaatgcctggacgaactggagttcaagaccgatgagctgctaatcgatgctaaaatggtggatcaggagttggccaactgccacaagtttcgcgaggatcagctgctgaagcatctgacggagaagaacgacgacgacgagcagatgcagttgctgcgggaaaacatcgagctcaaggcgaccggcgttgagttccaacacggcattgagctgatcatggagaagtaccgtgagcacagcgaaggggacatgttaatcgatacctaccaactgagggagcactacctggccggtttgtcgaaggtggtcgaagagcaggatgcccgcatcgagcgtatggttgatgtgatgaagctaactgtcgacttcgaggaccggagcagtgccgagaaccagcagatcatttgccagctgactgatgaaaatgagcagttgcgtcgtcagttgcagatcagtaccaccgatgagctgttccgccagggagcactgagctccagcgaaagtagcactcagatcggaccaaacgattctttggattcgagtgccacccgggagaatag

SEQ ID NO: 10553 - DNA, 3756 bp, DROSOPHILA
atgcccgcagaactcgaagaagaactgaaccgctacaaaagagcagttctgggaggaagcggaggaggaggaggtggcgtcggcggcggcggcggcggtgtctccgccctatcctccggctactcaagcctgccgcaatcgctggcctccacgctgcccaatggtggggccagcaccagcttgagcggcaccagtcttggctcgcacagcgcggccgccgctgctgccgcccacagcgtctccgctggatcgggaggcgtggtcgggggcggcggccaaggcggcctatcatccatatcggccctggtgcccaactcaatcagcggcatatcctcgagtctaagcagccatgccattcaatcgatgcagtacggaaccggacagacgtccgtggagaaactgctgagcggaactagtggaatcactggcattccacccctgccgcgcggaacaatacagctgtacaatttgcagagcacaaccatgcccctcctgtcactcaactcgcataacctgccgcccgccggctcgaccagctactcagctttgggcgccggtggcggcacctcgctgacgcacccgaccatggccaatctgggcctgctggacaccggcaccctactgggttccaccggcttgagcggattgggcgtgggaccaagtgttggcggcatcactggagccacatctctgtacggcctaagcggtggcggcggaggagccggtggtctgggcagctcctatggtccgccgttcctggacgtggcgtcgagcgcctcgtatccattcaccgcggccgccctgcgacaggcttccaaaatgaaaatgctggacgagattgacataccgctgacgcggtacaaccgcagctcgccctgctcacccattccgccgaacaactggggactggacgagttcaccgacggcctcagtgtctccatgatgcataaccgcggcggtctggcactgggtgccctagatttggacactcgcaatcatggcctaaatggagccagtgaaccgcaggtggatatgctcgatattcctggaaagggccgctgctgcgtattcatagccagatttccctatgatcctccagaggaggctgagggcgagctctccctgtgcgccggcgactatctgctggtgtggaccagtggtgagccccaaggtggctacctagatgcggagctgctggacgggcgacgcggccttgttcctgcctcctttgtgcaacgcttagtaggcgacgacctcctggagttccaccaggcggtgctgtcgacgctgcgcgatgccgaggacggatcgatgcagtgcgacaccacgtcgctgccctccttgccaccgcacaacccattgctcacacacacccacgaggatctggcacgcttaagtgagacgcacaccgatctggagcacgaccaggacgacatcagcgacaatgttccagcacccaagcacttgacgctggaacggcagctgaacaagagcgtgctcattggctggtcgccgccggagccagtgggctacaacctcatcgacagctaccacgtctacgtggacggcgtgctcaaggtcaccgtgaaggccaacgaacgcacacgcgcgcttatcgagggcgttgactccacgcggccgcatcgcatcagcgtgcggagcgtaacccagaaccgacagacatcgcgggatgccgcctgcacgatgatcatcgggcgggacaccgctcatctgggcccctcggcggtgcgcgcctcgcacataacttgttcctcggcggtcatctcgtggctgccggccaactcgaaccaccagcacgtggtgtgtgtaaacaatgtggaggtgcgcaccgtcaagccgggcatgtataggcatacaatcactggcctggcgccgagcacccagtaccgggtgacggtgcgggccaagcatctgcgggccgtgggccagcatgcggcgaatgtgggccaaacgggcggagctgggcggccgggacaggaggaggcgcccggagcgtatgctgacttccgcaccctcaccaagggcctgcccgatccgccgcaggagattcagctagaggccggtccgcaggatggtaccattctggtgacatggcagccggttaacaggcccacctcgacggggcctgtaaccggctatgctgtgtacgccgatggtaagaaggtcaccgacattaactcgcccaccggcgaccacgccctcatcgacattggcaagctgggcgtcttcaatccgcgtgccgtgaccatacgcaccaagtcccgcgattcccagtcggcggacagtgcgcccatcttgataccaaacactgtgcgcaatgcggtggctcgcaggggtcccaatcagatgggcatgggtccgcaattgccgcagggaccgcacgggatgacggtgcagcagcagatgggcggcatgcccggccagccgggtcaacagggccagcacatgatgggtgggcagcaggatcacggccagtacgatcccaatcagatgcagcagcagcaacagcagcagggtcagccgggtcaaccgggtcatcagggctatcagccaggccaaccaggagcgcaacggggcatggtcccgattccaggaagaccgcagggaccacagcaacagcagcagcagccctacggaccccagggtcccatgggtgggccacgctttcgaggaccagttcccggccagcttaatatgcagggccagcagatgcaggggcaaatgcaagggcagatgcaagggcagatgcagggtcagatgtcgggtcagatgcccggtcaaatgcctggacaaatgcctggtcaaatgccaggtcagatggctggacaaatggctggtcagatgcctggccagatgccaggtcaaatgcccggtcagatgtccggtcagatgcctggccagatgatgggaccacgaggaccgctcaatcagcagcaacagcagcagcagcagatgcagcagggccagatgatgcccggccagcaggcaggacagcagcaggcccagcccggtcaaccgggacaaccgggtcagatgcccggagcacagaagaagccccgctattttgtggccatgttcgactacgacccatccacgatgagtccaaatcccgatggctgcgacgaagagctgcccttccaggagggcgacacgatcaaggtatttggtgataaggatgcggatggcttctactggggcgagttacgtggccgccgaggctatgtgccgcacaacatggtctccgagatgggccagggccagggagtcggcgtgggcggcaccgcccaggtgatgcccggccaaggtgctccgcagcagagcatgcgcaacgtgagccgcgaccgctggggtgacatctatgccaacatgcccgtgaagcgaatgatcgcgctctacgactacgatccccaggagttgagtcccaatgtggatgccgagcaggtggaattgtgtttcaagacgggcgaaatcatactcgtctacggtgatatggatgaagacggtttctacatgggcgaactggacggcgtgcgcggcctggtgccgtctaacttcctggcggacgcgcccgaccagtacaacaaccagatgggtccgggcggagtggccggccgcggcggtctgagccaacggggcaggggtcaggggccaggagcgagggggccgccgcccccgccacgtgacaacatgatgcccggaatgggcgggcgcggccagccgggcaaaagtaagtag

SEQ ID NO: 10554 - protein, 1251 aa, DROSOPHILA
MPAELEEELNRYKRAVLGGSGGGGGGVGGGGGGVSALSSGYSSLPQSLASTLPNGGASTSLSGTSLGSHSAAAAAAAHSVSAGSGGVVGGGGQGGLSSISALVPNSISGISSSLSSHAIQSMQYGTGQTSVEKLLSGTSGITGIPPLPRGTIQLYNLQSTTMPLLSLNSHNLPPAGSTSYSALGAGGGTSLTHPTMANLGLLDTGTLLGSTGLSGLGVGPSVGGITGATSLYGLSGGGGGAGGLGSSYGPPFLDVASSASYPFTAAALRQASKMKMLDEIDIPLTRYNRSSPCSPIPPNNWGLDEFTDGLSVSMMHNRGGLALGALDLDTRNHGLNGASEPQVDMLDIPGKGRCCVFIARFPYDPPEEAEGELSLCAGDYLLVWTSGEPQGGYLDAELLDGRRGLVPASFVQRLVGDDLLEFHQAVLSTLRDAEDGSMQCDTTSLPSLPPHNPLLTHTHEDLARLSETHTDLEHDQDDISDNVPAPKHLTLERQLNKSVLIGWSPPEPVGYNLIDSYHVYVDGVLKVTVKANERTRALIEGVDSTRPHRISVRSVTQNRQTSRDAACTMIIGRDTAHLGPSAVRASHITCSSAVISWLPANSNHQHVVCVNNVEVRTVKPGMYRHTITGLAPSTQYRVTVRAKHLRAVGQHAANVGQTGGAGRPGQEEAPGAYADFRTLTKGLPDPPQEIQLEAGPQDGTILVTWQPVNRPTSTGPVTGYAVYADGKKVTDINSPTGDHALIDIGKLGVFNPRAVTIRTKSRDSQSADSAPILIPNTVRNAVARRGPNQMGMGPQLPQGPHGMTVQQQMGGMPGQPGQQGQHMMGGQQDHGQYDPNQMQQQQQQQGQPGQPGHQGYQPGQPGAQRGMVPIPGRPQGPQQQQQQPYGPQGPMGGPRFRGPVPGQLNMQGQQMQGQMQGQMQGQMQGQMSGQMPGQMPGQMPGQMPGQMAGQMAGQMPGQMPGQMPGQMSGQMPGQMMGPRGPLNQQQQQQQQMQQGQMMPGQQAGQQQAQPGQPGQPGQMPGAQKKPRYFVAMFDYDPSTMSPNPDGCDEELPFQEGDTIKVFGDKDADGFYWGELRGRRGYVPHNMVSEMGQGQGVGVGGTAQVMPGQGAPQQSMRNVSRDRWGDIYANMPVKRMIALYDYDPQELSPNVDAEQVELCFKTGEIILVYGDMDEDGFYMGELDGVRGLVPSNFLADAPDQYNNQMGPGGVAGRGGLSQRGRGQGPGARGPPPPPRDNMMPGMGGRGQPGKSK

SEQ ID NO: 10555 - DNA, 3291 bp, DROSOPHILA
agggaaatcgatagaagtcgatttgtatatgccgcactgttttgttgtacttcagtgctttttttaaaataattttttttatcgaaaccccacactcacacaactccactcgcggtgtgctttttgcgtgtgtgtgcgtgcgtttcaccttttctcttttccgtttgaatgcgaacgtgtgtgtgtgtgtgtggaatggtatcgctgcgggttttctcctctcttcactcaccgcgctaaattagtaaattaaacagcgcttaatggccaattaaccgtgggcttttaacggcaaataattctgcactatatttatatatgcctgtaagtcacacacacacaccagcgcactgccgtacgcacacataggcgcgtataaaacagttggcagcagaaactgaaaacgcagcgcaggaagttgtttcaattaactcgaaaagaaacagccgaaatgacatcacacaatttcccctttcctttcgttcgctggcaaagtgggagtttttcccattttccctgcactttccccgttcgcacgactgctcttcgcgtattctcgttatccgttgcacaattgcggcgtagacggctaaatgcggtatatatcaggcccaatcgctgcggtcgtcgatggagtcgaaattttcaagcaagtgcaaaaacaaaattttgtccgcaatcacgtcgattcttggcaatgtttgtgacggaatttcagtgcgaccgcaggcaaaactttcgataatgcggagaggtgtggagaaaagcgttaagaatgcgcttagctcggacccaaacctcgcgttggtaataataatcgcgtttccactactaagggtatgattttatttaaaatgcttgaagcaacagatttatttttatataaaaatatataatataaatataatttaagctgaaaccaaagtttgtaaacagcgtcagcatttcccatactatcagaatgttcgatatatgtctcaaaagttatcgggccatgtagcacatcgatactcgattttatattcacatttcgcctaatcacatttacttttcaacttgtctgtcgatcgaaattaagcgaacagaaatctaaagcataaccaaaatgccggacgcagtgcagcagagtttcgtgcgtagcttcattgactacctgaagaagcagggggacgtgatgtcgccggaccagaccgaaagcatcgaggtggcgatccagtgcctgcaggcggcctttgacttgggcgatgatgtggaggcagcgccggctgcggctggtgaggagcaggccaccacacagagcagcagcactgcgagcgcaccggacgatgatgcggtggccagcggaagtgctggtatcggcgccgccgccgccgccgttcccaataacattgacatgttcgagctcttccagtcgctgtatacagaacgcaatccggaatccctggccctggccgaatccatcaagaacgagggcaaccggctgatgaaggagaacaagtacaatgaagcactgctgcagtacaatcgtgccatcgccttcgatcccaagaatccgatcttctactgcaatcgggctgcggcccacatccggctgggtgagaacgaacgcgccgtaaccgattgcaagtccgccctggtgtacaacaacaactacagcaaggcgtactgccgcctgggcgtggcgtactccaacatgggcaatttcgagaaggcggaacaggcctacgccaaggccatcgagctggaaccggacaacgaggtgtacaagagcaacctggaagcggccagaaacgccaggaaccagccgccccaaacggggcgattaagggaagacctaatcaacatgctgtcccagccaatggttaggaatttgttcaacaacgccgagatcgacgtggagcagctgctgtcgatgcttcagaatccaatgatcatgaacaccattcgccagcagttcggcggcggcaatgccccgaccctgcccaatgacatggtgcaaatgatctataacatgaccagccaattgactggctttcccaattcgaacgcaaatcctggcaatgaacagcagccgggcaatcagccaccaccgagcacctagaagtggatagaatcccgatccccgatccctgcctggatcggcggcacacagattaagttgttaagctgaaactataaatgtatttataatgtttaaatggcttctattacgcatacatacatacatacatatacatttttatccaatggaaataaataaatgaccgtgcaaattgccgctgttccaatcgaattttcaatgaatattaaatatatatattataatgcctcatatatttttctagttgcccgtcgttaacaaaattaaacaagtatatcacacagtgcatgtaatttaatgttgcttttattgaattcaagaaatgtatgctaggggttttttttttgctgatttgcatctctaaatggtacaattgttaatttgatattacatgtcaaataaaaactaatgggtttaaaacaaatgccgatctgtcgcaaacagtttgtcgcttgaaaatcattatcttcaaagcggtcaacttgaaagtaggttttatattgatattcgttcacttggttattggtataatcttatatttatgcgtttgacagaattgaaggtaaaaacaggagtgatataaatttcaaacaatgccagcgcctttcttttgggaaatgtatgaaaagaaggcgtggcgtgttttggaaaattgcacaagtactttagcgaaaacaaatgttataacgaaaataataaaagcaatgcgtgagtgtatgagtaaaatggatgtaaaaatgttgcatttaatttccatgaaaatatgttgcgctgaaaggagacaaaggggagaaagttaaatgaaaattgcacggaatactcaccactttcgttttgtttcctttaaaattgcttggctgcagcatcgcaacagttgtgtttattctgctcgcatccaatatcttgtttttgttttttttttttttgtatgtctacggactagggacaaaccattcaagtgaagtgttctttgctgctcttctgcctcacgattgattctttacttagtacttgttgaatcgcctgtttctgtagcctccaccgctgccgccaccgccgccgccgccacgttgtctcgtgcgattgttgtttccgtagctctggttgaccttgttggagtattttccagatggcggcgagtaaaacttctgatcgttggatggccgcgatttcttctctggctcctgatc

SEQ ID NO: 10556 - DNA, 1291 bp, DROSOPHILA
cacatcgatactcgattttatattcacatttcgcctaatcacatttacttttcaacttgtctgtcgatcgaaattaagcgaacagaaatctaaagcataaccaaaatgccggacgcagtgcagcagagtttcgtgcgtagcttcattgactacctgaagaagcagggggacgtgatgtcgccggaccagaccgaaagcatcgaggtggcgatccagtgcctgcaggcggcctttgacttgggcgatgatgtggaggcagcgccggctgcggctggtgaggagcaggccaccacacagagcagcagcactgcgagcgcaccggacgatgatgcggtggccagcggaagtgctggtatcggcgccgccgccgccgccgttcccaataacattgacatgttcgagctcttccagtcgctgtatacagaacgcaatccggaatccctggccctggccgaatccatcaagaacgagggcaaccggctgatgaaggagaacaagtacaatgaagcactgctgcagtacaatcgtgccatcgccttcgatcccaagaatccgatcttctactgcaatcgggctgcggcccacatccggctgggtgagaacgaacgcgccgtaaccgattgcaagtccgccctggtgtacaacaacaactacagcaaggcgtactgccgcctgggcgtggcgtactccaacatgggcaatttcgagaaggcggaacaggcctacgccaaggccatcgagctggaaccggacaacgaggtgtacaagagcaacctggaagcggccagaaacgccaggaaccagccgccccaaacggggcgattaagggaagacctaatcaacatgctgtcccagccaatggttaggaatttgttcaacaacgccgagatcgacgtggagcagctgctgtcgatgcttcagaatccaatgatcatgaacaccattcgccagcagttcggcggcggcaatgccccgaccctgcccaatgacatggtgcaaatgatctataacatgaccagccaattgactggctttcccaattcgaacgcaaatcctggcaatgaacagcagccgggcaatcagccaccaccgagcacctagaagtggatagaatcccgatccccgatccctgcctggatcggcggcacacagattaagttgttaagctgaaactataaatgtatttataatgtttaaatggcttctattacgcatacatacatacatacatatacatttttatccaatggaaataaataaatgaccgtgcaaattgccgctgttccaatcg

SEQ ID NO: 10557 - protein, 331 aa, DROSOPHILA
MPDAVQQSFVRSFIDYLKKQGDVMSPDQTESIEVAIQCLQAAFDLGDDVEAAPAAAGEEQATTQSSSTASAPDDDAVASGSAGIGAAAAAVPNNIDMFELFQSLYTERNPESLALAESIKNEGNRLMKENKYNEALLQYNRAIAFDPKNPIFYCNRAAAHIRLGENERAVTDCKSALVYNNNYSKAYCRLGVAYSNMGNFEKAEQAYAKAIELEPDNEVYKSNLEAARNARNQPPQTGRLREDLINMLSQPMVRNLFNNAEIDVEQLLSMLQNPMIMNTIRQQFGGGNAPTLPNDMVQMIYNMTSQLTGFPNSNANPGNEQQPGNQPPPST

SEQ ID NO: 10558 - DNA, 2191 bp, DROSOPHILA
aaacgaaaaaccaaaaataaaaaacggcggaagccaaatttgccggctgcggcaaacggaagtcgcagagtcgggctacagtcgaaagtccgaagcggtacggatgcatattaaattaataatttgacccatcctgtgactccgagtgccacaagctagcaaattcggccaaaaaggagactgggctaatttctgcatccgccgacgagatttttgtttgctgattgcgacaaggacaacacggtggcggaggggccatgttgcgctaatgtttcacccgagaccgggtacccaggattcagaactgggttccccagcacccagaaaccgagagataaacaattaaaaactttcgcaatttgcggtaattccactcttaacccctttggacgccaagtgcgcataacaagtagttgtagcatgggattgtggtactttcaccgagtttacagagaacaaattcgggccaagaagaaaaatgtgttcataaacttatgcgacaggtattaaaatgtaattgtaagtaatgcgtatcacacagacttaccgaagaaagcttaattttggtcgtaattaaatctataaataatattaaataaattaaattaaattcttaagagcacttgtaataaaacattacaataataataacaattattattataacaatatatttagcttattattattattatttaatttctaatgcttatatttttatcaacttgcaggcgacaagttttctctgagtgcacctgataagacgccccatttgatatcttatcttttgtagctgccagactgataatgcatgagatcttaacccgttttcagttgggtgcaacatgtaattttgtttgttttgcgcacgttttaacttatcaatcagaatggtgtgcaaaaatattcactactatatatacaaaaggcacgatcaaactggcaaacacagtattcagatacttttccaagaccaatcaaaacacaataaacgatcaaaatggtttgcaaaggctgcggaacaagtaagtgaaatattggttttaaaatataggaaacttattaagttagtcccaattttcagactgcaagtgccaggacaccaagtgcggcgacaattgcgcctgtaatcaggactgcaagtgcgtgtgcaagaatggccccaaagatcagtgttgcaagagcaagtagtttaagccgatcgattcgatgaaaaccaataaatgatagcccctgtgtaagcctcaaagcataccaacatatcagtgggccgccgagtattctgtcagaaatgatattcgcttaattactatttggtgctccgcatgtcgaggacaaatatttaccatggcattatgccgtgtgtggcccagaggctaagtcctcttctggccaagtgtcacacatttggccagggtcgcattgcaaaatgcgcaattattgcatttgtggcgcgtggcaggcggcattgcatggttgcaaaatttatgcggtctcatttgcagcgacaaggacacagctcgaaattgtgacacttgtaagtgagcgtaaaataatttcgcgcattaagtatacgcaacggggcgccgacaataatgcggctgccattaggagtgcaattgtttaagcaattaattagccctgctcacagcgaaagtaaccgaaacgggaataggaacaggaacaggaagaataaaaatatgaggcgtcggccacttaaggactctttccagccagattgccttcataataagcgcggtaagtgagtttggcgccaaggaaaactcatgtttcactcccaacacaatgaacttcggcggcgggctgggatgggaaaaattctaaccgcaaattgcggaaatgcctgtctgggccgtctgcctctctaattgtctgtacataatttaggcaaacatttttaattaagtgcaatcctcgacgcacacacaagtacacggcttggtttttaattccatcattaatcttgcggggccattgcgagatgtgctcgagcaattagggtgagttttagactttcgacttgagcacaataaacagttgccacttcttgctgctcctttcacaacattgtttaccccgcgtggtttggtgttttgcggtcctaatggttttaccctttttaaatggttctatcaactggatcatccttttcgtactgatgcaggatgaa

SEQ ID NO: 10559 - DNA, 132 bp, DROSOPHILA
atggtttgcaaaggctgcggaacaaactgcaagtgccaggacaccaagtgcggcgacaattgcgcctgtaatcaggactgcaagtgcgtgtgcaagaatggccccaaagatcagtgttgcaagagcaagtag

SEQ ID NO: 10560 - protein, 43 aa, DROSOPHILA
MVCKGCGTNCKCQDTKCGDNCACNQDCKCVCKNGPKDQCCKSK

SEQ ID NO: 10561 - DNA, 3791 bp, DROSOPHILA
gtaagccctttatcgagtcttgttttattttgtgccaattatgtttaatttaagcagttaattcaaggtgaaataaggtatttgggtataaatggcttagtcacttccaatactcttatagcccttttcccgtatcttatcatggatttaatcagcgtatagtgtctacactatgcacaaagggtactagtgtggatataaaccaaaataattcagaattaatattgtaaaaagattcacttgcttaaaatatgtgaattttggttttaatcttattgaatttaattttaacgcatttcgaaagtcgaatgacccacaaaagcgactattttgttggatagtgtatcaatgcttttgaagagataagataagataactcgtgaaatattaggtgaataatatgtggggttttgttcattgtgctcttgttagttatgtacagttaatcgatcggtgaacacgcctatagttcaattttagttggcaaaagaattttgagaactatgaatttaacaaaatcagctacgttagctgctgcgattttttgtatcgttttgagccaagtttctgggcagacgaaagatgaaaccaccacaaccgagacgccaaaggtaccacataaagtgtttaatttttaattttctgaaattggtgtgggtgtgcgtattacgaatgcaattgtaaactgaataataaagccgattacattaccaatggaattgatacatatagttagatttcaaatatcatttgtgcaacttaactaaaaagatatgtgcatactgctgtaaattagtgaacagattatgttaaattgtgttaaatatttgtgaaagtaatagaatgactaaattatatgtatcactatcaaattcgtgataagaaaaagtcttgcaaagctaaatcgataaagatgactcaaagaaagaccgaaaaattcaccacacaaaaaatttaaaaaaaaatgagaacagtgtgtaatataaataagttgtttaaaaatcgcaataaaatttaatttaatttctatgtttgtcgaaggtaaaattaaccatctaaaaattaacgaaaccgacatattaagacatggcaaagctatgtccaagaaacatttaactatatggtaatcattagttatttagttcgctatataatacacactacttgcaggaaaaaatcaaagtaattgatagcaaattgtgtaagaagtgcaattgctatatcgacaccaatttgctggattgctccgaaaaactgcaggattggttgtccgccgaggactgggaggatctgaccaacggcaatgttgtgttcaaaacaatcaatctggagcacaacaatctgaccagcgtgccaattctgccgaaatacgatgtggagaacttgtacttggctaacaaccaaatcgattcaatttccgtgggagcttttcagaatttaaccgaactagtcacactcgatttgtcgcataaccgattgacttcgaaagttctggtaccggatgtttttaaaggacccttcactgtccaagattttgagtcattggaaaatctaaagactcttaacttgggatacaacgatctgcatagcttggatgcggatctgtttgaacacattccccacattgaggaactcgttctctgctcaaatagttttcatgtcatcgatcaactttcagaaacagccatttccggcttacaatcgttgaaggtatgcgaaattcatatgtttttataattctacgaactcaaaagctcgtttatgttgttcgttttagatcttggatgtctcttatatggaaatcgatgacttgccggatacaattctacatggtccccgagatcttgagatctttatagcagctggcaatctgtttaatcaattgccaaaggccctgaaatatgcgacgaacttgaccagcctggtcttaaacgaaaatcccatcgaaaatttgattggcgacaagtaagagtcattctaggattcgtttaagtgtatgcgcaaaacaatatatttattaattttttcagtgtatttccacctttgaccaaattgacccacctcagcatgacttttatgtccaagttgtacaaaattgggccaggagcatttagtgaactgcaaagtaagttgtgaacctgcgcgcactaatggctaatggcttaatcgaacaaccatctttctttaggtttaactgaactgatattgtccgacaacaaactgctaaatgaaattgatgaggaggctctatccaagaacgtaactggtggccagtacttggactacccgccattggaaaaggtaattcaagtgcaaaagcatgtagagctttaatcaactaaataacataaacttttaggtttacttgaataattgcaacgtgtcgactttgccgaaagaactactagtgcgctgggataaacttaaggctctggatcttagattcaacccgtggaattgcgacgaatccaatgacttcttgatcaacgtcttgatagatcgaatcaacaagaccacgcccgttctggccaaagatgtcaaatgtggcggtccgaacaagttaaacgatgttacgctgctcagagtggcgaatgaacatatgatagaaagttcgacgggcagtcttatatgggttggactcttggttgtcctgctcatcgcggtgccgaccatcattggtgcttacgtgatgaagaggcgcggctgctttggcgtctttagacgtcatgacagcggtgctagcagtgctctctataataggactagtttcaacgaggatttccatatttaactttctttttgtataataattaaagccttgaagccttattattctgttagagcgctggtaatttggcgtaaatctgtaaatacacttacataaattaagtaaacgttgattgttttacacccttagttttatttacggctattttgctttagattagataccaagatctcttgttttaaaattcttagttaaagtcaaacgagaataccgaacgttaatttcgaactaagcccgattgaaaaccattgaaatagggatgctccaaaatgtccttggcggaaatgcgatgaactggatcgtagattaacatcttttgtatgagatcaataccattcgcatcgagattctttaactgattggtcaattggttcgtggaccagcaggggaacgtgttcttatagtcgggtagcgaagtaacgcccggccaaatgtcttcggtaggtgttttcagaattctgcaatcaatgagtgtgagtatcacagggaatagaaagtaaattacctgtggttacctaaacattctaaacaactggtcaatttccgagtcaccctggaatagcggctttctcgttgccatctccgcgaatatgcatccaatggaccagatatcgacgggacaggaataccggggtgaacccagtagcacctccggcgctctgtaccacaaggtaacaatctcgtgcgtataaatgcgcaccggaatgccaaaggatcggccaagtccaaagtcggcgacttttatgaggccactcttgtcgattagtaagttctgcggcttaagatcacggtgaagtactcgccgacgatggcagaaaagaatggcgctagttatttggtacaaatagctacggaccaattcactctccatgtgcttatcaactggcagcgaatccatgtatttcttgaggtccatcgataggaattcaaagatcaagtatatgcggttctcctccatcaaaacatcctccaaacagacaatgttttcatgtttcaactcctt

SEQ ID NO: 10562 - DNA, 1468 bp, DROSOPHILA
aatcgcaataaaatttaatttaatttctatgtttgtcgaaggtaaaattaaccatctaaaaattaacgaaaccgacatattaagacatggcaaagctatggaaaaaatcaaagtaattgatagcaaattgtgtaagaagtgcaattgctatatcgacaccaatttgctggattgctccgaaaaactgcaggattggttgtccgccgaggactgggaggatctgaccaacggcaatgttgtgttcaaaacaatcaatctggagcacaacaatctgaccagcgtgccaattctgccgaaatacgatgtggagaacttgtacttggctaacaaccaaatcgattcaatttccgtgggagcttttcagaatttaaccgaactagtcacactcgatttgtcgcataaccgattgacttcgaaagttctggtaccggatgtttttaaaggacccttcactgtccaagattttgagtcattggaaaatctaaagactcttaacttgggatacaacgatctgcatagcttggatgcggatctgtttgaacacattccccacattgaggaactcgttctctgctcaaatagttttcatgtcatcgatcaactttcagaaacagccatttccggcttacaatcgttgaagatcttggatgtctcttatatggaaatcgatgacttgccggatacaattctacatggtccccgagatcttgagatctttatagcagctggcaatctgtttaatcaattgccaaaggccctgaaatatgcgacgaacttgaccagcctggtcttaaacgaaaatcccatcgaaaatttgattggcgacaatgtatttccacctttgaccaaattgacccacctcagcatgacttttatgtccaagttgtacaaaattgggccaggagcatttagtgaactgcaaagtttaactgaactgatattgtccgacaacaaactgctaaatgaaattgatgaggaggctctatccaagaacgtaactggtggccagtacttggactacccgccattggaaaaggtttacttgaataattgcaacgtgtcgactttgccgaaagaactactagtgcgctgggataaacttaaggctctggatcttagattcaacccgtggaattgcgacgaatccaatgacttcttgatcaacgtcttgatagatcgaatcaacaagaccacgcccgttctggccaaagatgtcaaatgtggcggtccgaacaagttaaacgatgttacgctgctcagagtggcgaatgaacatatgatagaaagttcgacgggcagtcttatatgggttggactcttggttgtcctgctcatcgcggtgccgaccatcattggtgcttacgtgatgaagaggcgcggctgctttggcgtctttagacgtcatgacagcggtgctagcagtgctctctataataggactagtttcaacgaggatttccatatttaa

SEQ ID NO: 10563 - protein, 456 aa, DROSOPHILA
MEKIKVIDSKLCKKCNCYIDTNLLDCSEKLQDWLSAEDWEDLTNGNVVFKTINLEHNNLTSVPILPKYDVENLYLANNQIDSISVGAFQNLTELVTLDLSHNRLTSKVLVPDVFKGPFTVQDFESLENLKTLNLGYNDLHSLDADLFEHIPHIEELVLCSNSFHVIDQLSETAISGLQSLKILDVSYMEIDDLPDTILHGPRDLEIFIAAGNLFNQLPKALKYATNLTSLVLNENPIENLIGDNVFPPLTKLTHLSMTFMSKLYKIGPGAFSELQSLTELILSDNKLLNEIDEEALSKNVTGGQYLDYPPLEKVYLNNCNVSTLPKELLVRWDKLKALDLRFNPWNCDESNDFLINVLIDRINKTTPVLAKDVKCGGPNKLNDVTLLRVANEHMIESSTGSLIWVGLLVVLLIAVPTIIGAYVMKRRGCFGVFRRHDSGASSALYNRTSFNEDFHI

SEQ ID NO: 10564 - DNA, 3658 bp, DROSOPHILA
ctctctttggggccaacacttgcgactggcggactggtccatcaaaggagccgcctcgtttccgctcgataacatggagatgtgtgatgggacacccggacaattgcatgtatgtatgtatgtaaatggccacagtttcgctaacaactacaatgtgaaaacatcaattacacggctgcagtgggtagtgggtcctggggattggagattgtggattgggtatttgaattggactgctcgccaggtttgccggtgatcgtggcgctcaatcagcgcatttaacttggcgccggcgccagcgtttaagatgcggctcgctctgatctgctgataagcccatgaccatgttgttgctgccgatgttgctgcttgccggtgggttgttctgctcttagaaaccttctttctttcacaagaagttggagcaggagagggagggcgggtgcggggcctggaggaactggtttttatgcctcgcatgcgggagatatgtatgaaaccgaaaccaaaggcaaaaccacgccgaattatgtattcggcgaggacaggcaaatggaaggcatacagcatgcacaaattgctcgaggaacaggattcgaagcgcagtcatgggaagttattggggaatttattcagatcttcgagctggaagctcttcgcatctgtcccatctaattgcttcacattccccgcattgtttcatcccagaaatagctccatcgaattcattggatacgtacatatgtacgtacaattttatttatgccgcattaaaatgccaaagacaataaatccattacgaaatcatgtgaacaattaaaattgcataataaatacgataaatactgatggcaaatacctggaaatcctaattaactgcaaaatatcacaattcagcttagacactacgcagacgatggcaactaaacgctaattaaatgtacaaggcaccgattccaagccaaacgggagcacatgcacccgtctgcacttgatagttttaaatggacgagctggttcctaatatgtccgagatgctgaagctgctgcgcttcggcttggccatcgtcggatcgctggatgacgaagcaggggcagtagcagtggctggcacaggcggagatggaggcggaggagcagccggtgcggttccaaccacatctacaaaggtgtcggcatcggcatctgcctctcggtcggcagcagattcgccgctcgtcgagcccgccgaggaggacgagacagaggaggccggcgatggcggtgtgtaagcccaacttggataagcaccaccgatgtgcctggcatactcgatggccggcggcggtggcgctggcacatagaaattggcctccagagcatccagcagatagtgacgctgcataggaacactgtgatgactctggtgatgatggtgctggggaaattcctccacgagtcgcaaccgtttggctaacggcgatgtcaccgggcttcgatccacctggtttgcctcgggctgcgttggcggtggcgagtcattgatcttccgtttgcatctcgactgacccgactcacggaatcccttggcaaagggattgttgtcgatcttcagcttggttatgcggtcattctgcaaatgcaaacaagaggattagctatcacgtgccatatttagactgcgatatagcaccacgcacctgataagctgttacggctataaactccgtctccggaaagataaaggcctgttggggggcccagggaatctggccgagatcagaggttcgtatgacgtgcagacgcggctgatacttgtgcatgctggccaagacgatctggagagacagaaaaatacacggttagtttgaggatatacaaagatacatatatttctactcaagaacaaaagatcaaatttgtttatgtaatattcttgacaaagtttacttacatgaccattgttatccagcgtattattcgtcaatttcactttgctgaagagcagagcctgggattgccagtgttttcccgtggctggactctccggatgcagatacatgcgctgcgggctctggggctcggctcctccggccggcacccactgggatccagagaacttatagcgacaatcgccaatgggcaccatctcgaggagcacgcaatagctggcctcctcctccagtccactgagggaaacccgcatcgaagggaacatgcgtctgaaagggatggaggcgttggttaatggatgttagtgacacgtttgcgccgtaagatttaagagtaagcagaaggcttatcaatgggagataagctgatgggggcgagcaaatagttgactttaaaatggtaccaacctgccgcacttggtgatgatcatctcggtgccgatgctgtggaactgctgccagagttcgttattctccagcttggcctccacatcgccgggcaaagtgggttgcggcggtggcggcggtggcataaagtgtccggcaaagttgggtagcaggccgcataggggatctgtggtagacactttgggttagccgacggcaaatcacaagcgcagggagtgctccacttaccgggtaaacgttgcataatctgctggcggtatatctcctgggcgatctgctgctgcaatcgcagatcggcgatgttgggcaaggtcaacatatttggggtcttcgtggagctatgtgcgtaatctattatttttgtgatacgttgatattattccgtgggcaatcgacgtctggaacacgaactgatcgctttgctgtccagattgagactgtctctcggaatctcagagcgggcactacttcagttctgccagaatccggtcggttgggttcctcccgctcacttcgctcttcactctgccgatccgatccgatccgatccctatcctcaggtagttgcctaacctgttctcatgctcaagtggcttgccactcacccgctctctcgcttccacttccagtgcgtcaggccatgtgtgtatgtttatctctttgccattggtcgcttatcagcgagcgttacgccgtcccgcttgcactcgctgcgccagatggaacgccattttcgtaacgccgcgtggagcggttctggtgacctcctctcacggaactggggggcacggcacccatcttgctgctgatagcgttacgtggaaagggaacggcaatggggaatggggcttttcttcgtggaatcgggggagcgctctttgaagtcgcctaatcgtttgtaatatttatggaactggaaaacgttttggatatgggccaaccaataatgttcggcgagattacattgtcccagaaatgggaagctgtaatttcggaggcacgagaaaaacattaggcgtatagaattagaggaggaatttccaaaatactttgtagaaataaatttattcatcgttcttttcaattttgttaatgttaaaaacaataaacagattggaaaatcttcgttaactctctgttaactatcagtgtttacagtctgagttgaattgccacaattcaatagataaaaaacaaaaatattatcaaacaaagtacttttataacattgcattatcattataacaaaaatataaaaaaaaatatacgagcattttgttttatgtcggcattttactattcatcaatgtgataatgaa

SEQ ID NO: 10565 - DNA, 1275 bp, DROSOPHILA
atgttgaccttgcccaacatcgccgatctgcgattgcagcagcagatcgcccaggagatataccgccagcagattatgcaacgtttacccgatcccctatgcggcctgctacccaactttgccggacactttatgccaccgccgccaccgccgcaacccactttgcccggcgatgtggaggccaagctggagaataacgaactctggcagcagttccacagcatcggcaccgagatgatcatcaccaagtgcggcagacgcatgttcccttcgatgcgggtttccctcagtggactggaggaggaggccagctattgcgtgctcctcgagatggtgcccattggcgattgtcgctataagttctctggatcccagtgggtgccggccggaggagccgagccccagagcccgcagcgcatgtatctgcatccggagagtccagccacgggaaaacactggcaatcccaggctctgctcttcagcaaagtgaaattgacgaataatacgctggataacaatggtcatatcgtcttggccagcatgcacaagtatcagccgcgtctgcacgtcatacgaacctctgatctcggccagattccctgggccccccaacaggcctttatctttccggagacggagtttatagccgtaacagcttatcagaatgaccgcataaccaagctgaagatcgacaacaatccctttgccaagggattccgtgagtcgggtcagtcgagatgcaaacggaagatcaatgactcgccaccgccaacgcagcccgaggcaaaccaggtggatcgaagcccggtgacatcgccgttagccaaacggttgcgactcgtggaggaatttccccagcaccatcatcaccagagtcatcacagtgttcctatgcagcgtcactatctgctggatgctctggaggccaatttctatgtgccagcgccaccgccgccggccatcgagtatgccaggcacatcggtggtgcttatccaagttgggcttacacaccgccatcgccggcctcctctgtctcgtcctcctcggcgggctcgacgagcggcgaatctgctgccgaccgagaggcagatgccgatgccgacacctttgtagatgtggttggaaccgcaccggctgctcctccgcctccatctccgcctgtgccagccactgctactgcccctgcttcgtcatccagcgatccgacgatggccaagccgaagcgcagcagcttcagcatctcggacatattaggaaccagctcgtccatttaa

SEQ ID NO: 10566 - protein, 424 aa, DROSOPHILA
MLTLPNIADLRLQQQIAQEIYRQQIMQRLPDPLCGLLPNFAGHFMPPPPPPQPTLPGDVEAKLENNELWQQFHSIGTEMIITKCGRRMFPSMRVSLSGLEEEASYCVLLEMVPIGDCRYKFSGSQWVPAGGAEPQSPQRMYLHPESPATGKHWQSQALLFSKVKLTNNTLDNNGHIVLASMHKYQPRLHVIRTSDLGQIPWAPQQAFIFPETEFIAVTAYQNDRITKLKIDNNPFAKGFRESGQSRCKRKINDSPPPTQPEANQVDRSPVTSPLAKRLRLVEEFPQHHHHQSHHSVPMQRHYLLDALEANFYVPAPPPPAIEYARHIGGAYPSWAYTPPSPASSVSSSSAGSTSGESAADREADADADTFVDVVGTAPAAPPPPSPPVPATATAPASSSSDPTMAKPKRSSFSISDILGTSSSI

SEQ ID NO: 10567 - DNA, 7191 bp, DROSOPHILA
tatagctaaattagtaaactatttatgcctaagctaagactacaattgtaccatatatagatcacttttttaaaaatcatactctactcgtatgtatgtgtgtgtatatttttgcatatttattgataaataaaacgaaaaaatttacaaaaacccgaacaagttcgccctcctgttgcatgtgagattaagtttttattgtttatacgttttagagttttaaaattatcagcaatacgtacagaccttaccgaattacgaatacaatacaaggtttcattttgctggctttaactgttcacttaaataaacattactaatattcttatatgcatattatattgttttacaatattccatttttaattgggcttcgaatgttctcgcttacttggtgtcaaacattttctatttataagttgttttactgcaacttcacatcgcatatacatatcaattggaatcgcccatagctacttcagttaccttgattactcagttgaatatcggtatggcatggagtatttgttgatacaaacagactgaattcaactaaaccgaattatcaagaggcgtatgtgtgatgcagatgggtgggcataggacatgggctggtggttttaaaattagttagaactaaaaggtactaatgtaaagttctggactatgcgaaaaaataatttaggacgtatcttaaacataaacaactaaaggtttggggaagggaacctaactataacgtggcaaacgctttgatatcgtctatgctgtgcgtcaagccttaaaatgtacagcgaatttatacaaaatcacttcttggattacgaaatgccctcctggcgacgacggcggtcggaaacttatgtacaaagcttaagtaaatgatgcagcgagctgcggattcggtagggttttggattcgcagtcgggggtctggggatcgtgcctttaacgctcaacgcttggcgaccaggcggcatttctggacgcgcacgcgtactcagggaagcgaatggatattgaacgcgggtggcggtgcgggtgctggcggtgtagcaactgaaacctccaccggcgctatactctccgttttaatgggttccacgacaccaggctcatgcctatgcaagtggcagtataccttgcgatcctcctcgctcaggctccaatttgccgatcgtccgcatggtacatgagctgcagccttgcaacaccgttgaaaacaacatatactagctcccgtctgctgacagagtacgcactggtatctcgtactgtcccacaccgccgcatctaatccgttgacgtgggctccgatcagatggatgtcattgctccaaacagcacagtcctcgtgcaaccaaacttcaaagccgttctccgaggtttttcccatgccgcggaacgtctccacaaacttggattcggtactgcagtccagtaggtccacagatgagcattgtgagcgggactcatttggatcgtcgctgtaggatatcgagctatcgtgcgtctgtttgcgcttacgtttatgctacaagaaattgatacattaaatggtttagtgctcatttaacatatctgagttttgtgtaagtcttaccatgcttatcttcggtgcttgcataatattggctagcgtggcaggcacagcgggcagattccgctcctgacccttcaccatgtcctcgcgtcgccgtttgttaacaaacataccatcgatgtcctgtgctccgggtgtctgcacagcggcacgatactcgtcgcagtcgctagtcactaggtacggaccgaagagatcacctaggccgagcttatgcggaccccgcttgcagaatacacatatccacgtggagtcagtggtgtccgcatcatagcgattgctcagcgtagagctgtgcattcccctcaagttttttcgttcgtgcggcgcctttttaaccttggtctgcttctcgttcacgtcctcggcactgtgtgtgttcttgatactcacacttccatccggtttgattagtataaagggagatttgaacctcagctcgggaacggatcctcctccatttgtaggcgccggagtgctatcctcgtcggtggtaaaggctggctttcgagccgactttttcccattctgttttgcattctttgcattaccctttcccgccgatcccttcttccccttgacccctgcattcttttttttcgctcctgcggcaggtttgcttttcgtagcagaagccgcttcgcttagctggcgagctgcaagagccgcagcagctgccgccgaggtgctaggcttgtcatcatcttcaaagtctggctctttagtcaccttttttttacgacctggctttttggcaggtggatcgtcgatcataaaacgcaatagtgaggcatccatgcccatggaaagcctacgaggtggcggtctcctgggcgcaggtgctttagctggcacaggggtgttcgatttactgtcatctcctgcaaccaagggcgtcgatgtggatcgtgattggggtatgggactgtgcacggggctgggcatcgtagacttcatcgccgctttggtggctactggccgaatttcaggcgtaggtgtttgattgggtgccaggactgcaagcactgaggtctgattttccgctggcgtatcgagcgtctttgaagggtccagagccagctgggcggtcaaattgtgtgcaaccatcgctgccgattcctcagctggcttttctgggctggatatcctttccgtctcctcctcaatgccagcaaacatttgctctagcttatcctccacttccccaaagggacaagactcagagttggcagcgggtgatgatttcttgggggattcggttgcaggaggcgcagcaactgcagcagtggtaggtggatcagggtgcgcaggcgataccttgtttacagctggttcctcttcctcatcacattcgtgcacactgaccgccggcttagcatcgatgtcgccctgttctactagggcaggagatgcaggggtgtcagtagtggccttattattaatctcaggcttcggaatattattgacggcgtggctactttggctgctatgcgtgtttgcactagagctgctggagctactgctgctgctattgctctgcggactaggtggcggcatcgcaggagatgtatgatttttgggaggctcatcgtcctgctgcattcggtgctgttctgtaaggttccgctgcagcagggcctgccgctgctttttcgtcttggggttttcattgtcattatagagtgtggaactattgctgttgctattgttttccgcaggagccggtgatcctccacgaccgttctcttgcgtcgttttctcattctcggtttgcgattgcttctgcgtactgaaaggctgaaactcaccgcctccattcttgggcgacttcttgggactgcagctgttgttaagattggctgcctgttgtggatgctgcggcttgctgttttctccctctggtgcattttcatttggggtaactctcatcaccatactggcttttcgtttgcgtcgctttcgactgttactgctgttactgtttgattccaaagactcctcattggatgtggtcaggtagggagactcaggagcttctggtaccgggttcgctgcagttttatctgtctcagagtttcggtatgacagatcagttataacaggctgttcctctgactctggtttgtgcttaaccgcctgatcgagattcgtcaattgcgcggtgcgggaatgatgtgtctgatgttgacttgaggatgctgtttgctgttggctcgcatcctgtggttgagcgtgaaattgtccgcttgtcaggagaggtggtaggagcggtggtggagctgtttggctggtggcatgctgattgtggtagtgcaagtgttgggggtgtgattgtgattgcgtctgatcctgctgcatgtgctggtagctacctccacttgagctattaagctgatggtgcaaatgcagttgattgtaatccattgtgggtgataacatctggtgcggatttgcagccagcggtgactgaggcgtaggcggcgtctgtggtccattatatttgggggttaagttgtaaggcggctgctgttgctggtgatagtttcgtaggggtgaggctacaaaaagatttaaaatgaatatgtttaaaattctatttaacccaccatgggtcttacgttttttgttggcatgttgctgctgtacattgtgcgttggcagtttgctagctgaactcgctgaagggtatccaaaatccttctccttctgtgggttcttccccgaaagatcgggttcgaagctgcgttttaattgcgtcagcttgaaattctcatcgcgagattgcatgtagtgcgggctggctatgtggttgttacttccactgttactgctgctgttgctcccagtgtgattggtgttcccagaaacagatgttggcggtggtggcggaagcaaagactcgcagtcgcctccattgctgaggttacctgatggggctccctgattttggcggctggactgcagcaaactgacatgggcagctgccatggcagccagatgttcctgttgctgctgctgttgcagctgcgtgctggtgggcgtggcattggttgtgagattttgactgtttcgtaaagaaattcctcggattaactaaattaaagcatataatggctaatacacttacattgaaggataattgggggcatgtatgagggattgttgttgctgttgggtctgatgcggttgttgattcggaggttgcttggccaggggctgggccgcacttcgtgcggactgtaaggacaagtccatggagttgaatggcaaagttcctgagtagggcggtgccagcaatggattcatctgatggtggtggtccagctgagaatgcaaattcaaacttagttaaaacggattggccagtatttaataaaggaaaaacacgaaatagcataaaagcaaactaagatatcaacaactaaacgatactaaagaaagcttttacggcccaaatggcgaaggaatcgagcatgcttttggggactaataggatctggataactggcagcttgatctcgacggtttctcgctttgtcctaattacgtttttgtgattggccgacatgaaattgtaaatggcatcgggtggaggtggaggctgggcggaaacggttccggaaacgtgccaggccaacggagatcgcaccattccaggccgttcgttggacatgtgcgccaactgcggctggcggggtatgtacgaaggaatctgaagattaaatggatgtcaggtttctgttgtgatcaaagacgttagtttcacttacttgtaatggattccaggaggcgttctgggccgcctgactgaggtgcccaggatggggatggttgttgttggccatctctttcagcggcagctaactgagggtattcgtatatgtcacccaactcatggactatcggctctaggcaatccttcggactaatgcggaatgttaatgaaaaaccgacagctgggaattggggaacggtgcggctggagggaaaggcgacctaatctttctgggaaggatcctgcacacgaatttgctaactccggccggacagccgctgctctttttcgcccataaacaagaccgcacgcacttttttcacacaccacccacacaccaacccactcggaaaggcaaaaaaaatttctttcgccgctcttgtggtccttgcgcgaacagtcgataacacaacctatcggacagatgacagcgcgttgttttgcacgctacgccaaacgcacgcggtctttcgcactgccgaacgtcctgacaacattgtttattagccactgttccatgagcagtcttgtcaaagaggtgttaatttattatggcgaagacacagttttcttaactatctctaggggcggggatgctagattgtacctcttaattttcagctgtagcgcattgcgaattcgttgcgactgcgtgcaaatttttcttgttttgggtcgaccagcgcatgcaaacgaaaacgggctctaaaaagcatgagccggtgccgttattgcggcaaacacatcgcgccgaacatggagacctaactaaatataattatgcaagtgccgcaactttgtttttgtgtttttttcgtgaattttaaattgttaaaaacaaaatgtaatttattagagctggaactgaaatcgatatctattcgatactatcgatttttaggcttgttaagaaacatcgatgttatattgcaactatcgactatttccttggtcacattttccaaggaatgacatttaagtaaatagtccttagaattccaattttaaaatattttgcagtaaatgaacatattaacgaagtgagatgacttaaacggaatatttgtaagatctatcgtaataacgaaacagttactttggtgaaacagatttgttcagccctggtcatgtcgcaaacgccggtaagtgcaacattaagatcgtaatgagcgcgggaaaacgtggagcgttgataatatttgaaggatgtgatcgaagtggaaagaccactcaaagcaggctgttgggtaagttacggagacctttaaggcccagcttataatccgtatccatttttagttgaactcttgaaatcgaagggcattccgacattgcccatgaatttcccggaacgcagttccagcattggtcaggtgataaactcctatttaacgaacagcaaggatcttccggatgaggtgattcacttaatgttctccgccaaccgctgggagcacataaaccaggtgaaggagaagctgcttgagggcaccacattggttgtggatcgatattcgttctctggcgtggcatatagcgcagccaaaggattagactttgattggtgctatgctccggaaagggggctcataaaaccagatgctgtattttacctaagagcaccaccaaacgaccttacacatcgaggacaatacggcaaagagcggtcagtgcaacatctgcattaaaatgattatcaagattacaataccatatcttataccattgcagttatgagaaagtagaattccaaggtcgtgtggccgaagtattcaaccgcatttgctccaaggagggcagctattttcaccag

SEQ ID NO: 10568 - DNA, 3941 bp, DROSOPHILA
aaaaacacaaaaacaaagttgcggcacttgcataattatatttagttaggtctccatgttcggcgcgatgtgtttgccgcaataacggcaccggctcatgctttttagagcccgttttcgtttgcatgcgctggtcgacccaaaacaagaaaaatttgcacgcagtcgcaacgaattcgcaatgcgctacagctgaaaattaagagctggaccaccaccatcagatgaatccattgctggcaccgccctactcaggaactttgccattcaactccatggacttgtccttacagtccgcacgaagtgcggcccagcccctggccaagcaacctccgaatcaacaaccgcatcagacccaacagcaacaacaatccctcatacatgcccccaattatccttcaattcaaaatctcacaaccaatgccacgcccaccagcacgcagctgcaacagcagcagcaacaggaacatctggctgccatggcagctgcccatgtcagtttgctgcagtccagccgccaaaatcagggagccccatcaggtaacctcagcaatggaggcgactgcgagtctttgcttccgccaccaccgccaacatctgtttctgggaacaccaatcacactgggagcaacagcagcagtaacagtggaagtaacaaccacatagccagcccgcactacatgcaatctcgcgatgagaatttcaagctgacgcaattaaaacgcagcttcgaacccgatctttcggggaagaacccacagaaggagaaggattttggatacccttcagcgagttcagctagcaaactgccaacgcacaatgtacagcagcaacatgccaacaaaaaaccctcacccctacgaaactatcaccagcaacagcagccgccttacaacttaacccccaaatataatggaccacagacgccgcctacgcctcagtcaccgctggctgcaaatccgcaccagatgttatcacccacaatggattacaatcaactgcatttgcaccatcagcttaatagctcaagtggaggtagctaccagcacatgcagcaggatcagacgcaatcacaatcacacccccaacacttgcactaccacaatcagcatgccaccagccaaacagctccaccaccgctcctaccacctctcctgacaagcggacaatttcacgctcaaccacaggatgcgagccaacagcaaacagcatcctcaagtcaacatcagacacatcattcccgcaccgcgcaattgacgaatctcgatcaggcggttaagcacaaaccagagtcagaggaacagcctgttataactgatctgtcataccgaaactctgagacagataaaactgcagcgaacccggtaccagaagctcctgagtctccctacctgaccacatccaatgaggagtctttggaatcaaacagtaacagcagtaacagtcgaaagcgacgcaaacgaaaagccagtatggtgatgagagttaccccaaatgaaaatgcaccagagggagaaaacagcaagccgcagcatccacaacaggcagccaatcttaacaacagctgcagtcccaagaagtcgcccaagaatggaggcggtgagtttcagcctttcagtacgcagaagcaatcgcaaaccgagaatgagaaaacgacgcaagagaacggtcgtggaggatcaccggctcctgcggaaaacaatagcaacagcaatagttccacactctataatgacaatgaaaaccccaagacgaaaaagcagcggcaggccctgctgcagcggaaccttacagaacagcaccgaatgcagcaggacgatgagcctcccaaaaatcatacatctcctgcgatgccgccacctagtccgcagagcaatagcagcagcagtagctccagcagctctagtgcaaacacgcatagcagccaaagtagccacgccgtcaataatattccgaagcctgagattaataataaggccactactgacacccctgcatctcctgccctagtagaacagggcgacatcgatgctaagccggcggtcagtgtgcacgaatgtgatgaggaagaggaaccagctgtaaacaaggtatcgcctgcgcaccctgatccacctaccactgctgcagttgctgcgcctcctgcaaccgaatcccccaagaaatcatcacccgctgccaactctgagtcttgtccctttggggaagtggaggataagctagagcaaatgtttgctggcattgaggaggagacggaaaggatatccagcccagaaaagccagctgaggaatcggcagcgatggttgcacacaatttgaccgcccagctggctctggacccttcaaagacgctcgatacgccagcggaaaatcagacctcagtgcttgcagtcctggcacccaatcaaacacctacgcctgaaattcggccagtagccaccaaagcggcgatgaagtctacgatgcccagccccgtgcacagtcccataccccaatcacgatccacatcgacgcccttggttgcaggagatgacagtaaatcgaacacccctgtgccagctaaagcacctgcgcccaggagaccgccacctcgtaggctttccatgggcatggatgcctcactattgcgttttatgatcgacgatccacctgccaaaaagccaggtcgtaaaaaaaaggtgactaaagagccagactttgaagatgatgacaagcctagcacctcggcggcagctgctgcggctcttgcagctcgccagctaagcgaagcggcttctgctacgaaaagcaaacctgccgcaggagcgaaaaaaaagaatgcaggggtcaaggggaagaagggatcggcgggaaagggtaatgcaaagaatgcaaaacagaatgggaaaaagtcggctcgaaagccagcctttaccaccgacgaggatagcactccggcgcctacaaatggaggaggatccgttcccgagctgaggttcaaatctccctttatactaatcaaaccggatggaagtgtgagtatcaagaacacacacagtgccgaggacgtgaacgagaagcagaccaaggttaaaaaggcgccgcacgaacgaaaaaacttgaggggaatgcacagctctacgctgagcaatcgctatgatgcggacaccactgactccacgtggatatgtgtattctgcaagcggggtccgcataagctcggcctaggtgatctcttcggtccgtacctagtgactagcgactgcgacgagtatcgtgccgctgtgcagacacccggagcacaggacatcgatggtatgtttgttaacaaacggcgacgcgaggacatggtgaagggtcaggagcggaatctgcccgctgtgcctgccacgctagccaatattatgcaagcaccgaagataagcatgcataaacgtaagcgcaaacagacgcacgatagctcgatatcctacagcgacgatccaaatgagtcccgctcacaatgctcatctgtggacctactggactgcagtaccgaatccaagtttgtggagacgttccgcggcatgggaaaaacctcggagaacggctttgaagtttggttgcacgaggactgtgctgtttggagcaatgacatccatctgatcggagcccacgtcaacggattagatgcggcggtgtgggacagtacgagataccagtgcgtactctgtcagcagacgggagctagtatatgttgttttcaacggtgttgcaaggctgcagctcatgtaccatgcggacgatcggcaaattggagcctgagcgaggaggatcgcaaggtatactgccacttgcataggcatgagcctggtgtcgtggaacccattaaaacggagagtatagcgccggtggaggtttcagttgctacaccgccagcacccgcaccgccacccgcgttcaatatccattcgcttccctga

SEQ ID NO: 10569 - protein, 1238 aa, DROSOPHILA
MNPLLAPPYSGTLPFNSMDLSLQSARSAAQPLAKQPPNQQPHQTQQQQQSLIHAPNYPSIQNLTTNATPTSTQLQQQQQQEHLAAMAAAHVSLLQSSRQNQGAPSGNLSNGGDCESLLPPPPPTSVSGNTNHTGSNSSSNSGSNNHIASPHYMQSRDENFKLTQLKRSFEPDLSGKNPQKEKDFGYPSASSASKLPTHNVQQQHANKKPSPLRNYHQQQQPPYNLTPKYNGPQTPPTPQSPLAANPHQMLSPTMDYNQLHLHHQLNSSSGGSYQHMQQDQTQSQSHPQHLHYHNQHATSQTAPPPLLPPLLTSGQFHAQPQDASQQQTASSSQHQTHHSRTAQLTNLDQAVKHKPESEEQPVITDLSYRNSETDKTAANPVPEAPESPYLTTSNEESLESNSNSSNSRKRRKRKASMVMRVTPNENAPEGENSKPQHPQQAANLNNSCSPKKSPKNGGGEFQPFSTQKQSQTENEKTTQENGRGGSPAPAENNSNSNSSTLYNDNENPKTKKQRQALLQRNLTEQHRMQQDDEPPKNHTSPAMPPPSPQSNSSSSSSSSSSANTHSSQSSHAVNNIPKPEINNKATTDTPASPALVEQGDIDAKPAVSVHECDEEEEPAVNKVSPAHPDPPTTAAVAAPPATESPKKSSPAANSESCPFGEVEDKLEQMFAGIEEETERISSPEKPAEESAAMVAHNLTAQLALDPSKTLDTPAENQTSVLAVLAPNQTPTPEIRPVATKAAMKSTMPSPVHSPIPQSRSTSTPLVAGDDSKSNTPVPAKAPAPRRPPPRRLSMGMDASLLRFMIDDPPAKKPGRKKKVTKEPDFEDDDKPSTSAAAAAALAARQLSEAASATKSKPAAGAKKKNAGVKGKKGSAGKGNAKNAKQNGKKSARKPAFTTDEDSTPAPTNGGGSVPELRFKSPFILIKPDGSVSIKNTHSAEDVNEKQTKVKKAPHERKNLRGMHSSTLSNRYDADTTDSTWICVFCKRGPHKLGLGDLFGPYLVTSDCDEYRAAVQTPGAQDIDGMFVNKRRREDMVKGQERNLPAVPATLANIMQAPKISMHKRKRKQTHDSSISYSDDPNESRSQCSSVDLLDCSTESKFVETFRGMGKTSENGFEVWLHEDCAVWSNDIHLIGAHVNGLDAAVWDSTRYQCVLCQQTGASICCFQRCCKAAAHVPCGRSANWSLSEEDRKVYCHLHRHEPGVVEPIKTESIAPVEVSVATPPAPAPPPAFNIHSLP

SEQ ID NO: 10570 - DNA, 4703 bp, DROSOPHILA
acatatataaacttttgatctattgttgtttaaatagtaatcaggtaaatcgtgggaggaattattgttgcgcataagtttgttaatgatttagaatatacattttgacttcatctatatttcatttggtgcctaggcaatcgattagtttgcgaccacggttcgaacgaggtttgcttcacaaatcagcagagatcataagtaccagacacccgaagttacggaaactggattaaccaacttcggtggcccgaagcgagcgcctttggtagagcttttgaaacggcctaaaaaccagaaccattttataaagtttgattaccaaacgccttctgttcggtgacacctttaacccttaaccctaagagattgcgattaggatctacacagattcaacaccgagattgtcaaaaatatatgcgtatcgtacagatatcaatagagattgccgccagtgtttatgaggtttactttgttttggtaccagtaatgggagacgatggactaactaatcaaaaaatattatacgcatatatattatagaaattctgtttataatttagcacctggcatgtcatattgtattcatatacaactgtgataattactttagaaaatacatatatgcaattacaggtacttgatattgatttactatgattcttattcaggactattttatgcatattgaacattaaaataggtgatgttttatcgttaaagggcaattcggcattacatttacagcttttaatttaatgtacgatattctcgtacaaacgttgagtatttttgaaataacgtactaagacatcagtatgtaaagggcagttattgttgagtttgagaattaatttgatcagttaattaaattagatttatatgccatatatttcaagcacatttcattttaccaagtatattggcattgttttctatctaagtactagcccccccatcactggtttccactattaccattactatttccccttgtcccctagaagctctttcccgcatcatggatgcgcttccggcgactatcgcgcctcctgtaacgatctataatcctcgagcgatgcctttccgggcacaatgcctccggcgagctgtccaccttcttcattacgatgcggaatgtgaaggtgtgcttgggcgaggcgctggccgctcgtctcggtgacggtggctcgaattcactgccgctggagaagccgcaggaggagagcggggcgctgggatggggcaggggaaccggtccgaccggagcagcaccaggaattctgggcgtgccgtttgtatagcccgatggggtggacatggacccggtggacagctgctgggtgagcacggaactgggtcgcggctcgaagatggaggcacatctctgatcagtgcagaggaaggtgcgcacctctcgctcctcctcgcctttttgccggacagtcaggggaaagtgcttgcgactgggatcaccgtatggacttctctgaggttccggtggatagccatagccgtggggatatgacccactcgagtcgtagctatccctggagctatagttcgaggaagtctgctgggacaacggactgcgtgcccgggagaaggcactgaattgggagacgtgcagctggcggaaattctccgtgcgctgcttcttgctcatcgccggaaacggaaggctgggcgatcgaccaccgccctcggtgggtgtgtagtcaaagtgggtctccagggaggacttgcggcctccgcaggatgagccagatctttggaaggtctccgcatccactagctcaatggagctcttcctcagatcaacggctcgtctgccctggcctttttcatcggtatctacaatctcaaagctggaggtctgatcctcgtagctagtggactgataccgcgaaatggaaacgtcaaagctggtatccctggacgaataggggcaatcgaaactggactcccctcgactggacttgctccacttactctccaccagctcgaagctgtcgcccccggaatccagacgctgtaggtttatgagatcggtttccgtgtccaccccgggactgcggagctgctccaaaaacggagaacgcggcggatcgaaggaggagcggcgcgacggcggctcaaactcgatggtaggacactggagcggcttctttgcgggctcggctgccgccaaagctgcggcttcagcttgggcgatggccagatccgcatcttcggtctcccgccgcagtgcctgcagattcacataaactggttctgggggataggctttcaagatctctaccagctcggcgcgcatgtcatctggtatcattaggtcattggaatctgattcccgttcctcgctaattcgtggctctatgggttcccggctctccgatcgacgtgtgaagtgatgcactgcagctgttccgccttcgccgttgagagccaccacttttagggaattggtgacctcctccacgaattgggccatggcggcatcggtttgttccacctccacttccgcttccgcatccttttctgtgtcctcttcctttacgacctcgggttcttgcaattcacggagcctctcatgcttgatataggactcacctaccttctcgaagtggacattggccaactcgaagggcagttcgtccgacgatccacctacctgctgatccgcgttggtctgacttaagtcagcactgggtcttttggatccggaagctgaactctgcttctgcttctccttttcctcatcgtcgcgtttcgtcgacctcctcagcctcagggacatcttggcgtagtgggtgaatttctgcgatatcttcggctcaaagcccacctcggacatttgcttttggacagcgctcttggcggccgtagaggatgccgctggactggctgagaaggtgctctgccggatgagaggaccaccggaggatccggattccgctcgggtgaaggcatttgcaaagcggttggttcggctgctcagatgcttagagggcttcctcacaaaggccaggatctcgcgcatcacgctcttcttctcctgcggctgggctgcctccttttccttctccttttccttttcccgggcagctgcctccgccgcctcccgttctctttccgcactcttgtaagtctcggcgggattggagacggttatcggaggtatcgggcccatgggcgaacgcttctcactggcgaaatatatgggtgtgaagaggcttattgacggacgcttgagaccgacaaaacccgcttcttctggttcagtggccatgtcttggacgtggaccgtggatgtgggactccttcgggtacccggaactccgaattggcagccaaagtctgtgggagccactgctcccaaaggcgagcgacgttcctgtgtgtgcacgctgaatgtggggctacttcttcggggctccccagttggacttctaactgtgggactagtcatcggatcgttcggtgacctcaatccgctgctcgggaagagcggactccgtcgtccttggggactgcgatcgttgagacccacaggacttcgtctgccctgcgtgcccagcgatatggatagctgtccgctattctttcgtcgattagatgcccggagtgtgccctggcgcgaaagcgatgtgggcgtcttctgggaactgctgcctggacttttggactccggcactggcatgaccggactctttggcgtcagtgggctgcgcttcttctctccattgccggaggtcaacgaggtatttagagtcagattgggtgcattattgggacttcgtcgctccgagggactgcgtcgcgtgcggaaggactgcgacttggctttccggatcttgggcagcgactggtggtggtgacggtggcgatggtgttgctgctgggacgacgaggaggaggaggggccgttcaacttatgttagttgctgtggtgcggtccactcgtcgggtcgctgctgccgctggaactgagggtggtattcgatccgtacggatctagggagctctggaccgacatcgagcgaccttggttctgacgcgcacgcctcactcggctagagttgggagacagctttccggggtcgatgctttctgggtctgcctgtaatgtgtagaatcagacataaaggggacaacaggatggatggacggaatggagcgcatgggtggcggcggatggttggatggatggacggagagaaagataggcggacagatagatggacagatgatggcgtgagtgactgagttaaacaccaaggaagcagcgcaaagcaatctaaaagcacaatgcaacccacctggtaggccagcgcgttcatgatgatggcatacggaacgaggttcagcggatggatctcacgcatcagcacgttggccggtatcttatggaactgaatgtattcgcagaacgtgcccaggatctccttaatgtcgatgttctgcagggcaggcaaagaggtcaataaaaatatacttaaagttccttggtagaaaatccttaccggattgttatcataatacttcttgctccacattagtgccgcctggaacttggtaaattcgtcggcccgcagctcctccctggccagaatcaggcgaaccacgtgctgtggcagcagcgtgaagctgcccaggttaagcacctcggttccatgctcatccacgaactccagaacctt

SEQ ID NO: 10571 - DNA, 2703 bp, DROSOPHILA
atgccagtgccggagtccaaaagtccaggcagcagttcccagaagacgcccacatcgctttcgcgccagggcacactccgggcatctaatcgacgaaagaatagcggacagctatccatatcgctgggcacgcagggcagacgaagtcctgtgggtctcaacgatcgcagtccccaaggacgacggagtccgctcttcccgagcagcggattgaggtcaccgaacgatccgatgactagtcccacagttagaagtccaactggggagccccgaagaagtagccccacattcagcgtgcacacacaggaacgtcgctcgcctttgggagcagtggctcccacagactttggctgccaattcggagttccgggtacccgaaggagtcccacatccacggtccacgtccaagacatggccactgaaccagaagaagcgggttttgtcggtctcaagcgtccgtcaataagcctcttcacacccatatatttcgccagtgagaagcgttcgcccatgggcccgatacctccgataaccgtctccaatcccgccgagacttacaagagtgcggaaagagaacgggaggcggcggaggcagctgcccgggaaaaggaaaaggagaaggaaaaggaggcagcccagccgcaggagaagaagagcgtgatgcgcgagatcctggcctttgtgaggaagccctctaagcatctgagcagccgaaccaaccgctttgcaaatgccttcacccgagcggaatccggatcctccggtggtcctctcatccggcagagcaccttctcagccagtccagcggcatcctctacggccgccaagagcgctgtccaaaagcaaatgtccgaggtgggctttgagccgaagatatcgcagaaattcacccactacgccaagatgtccctgaggctgaggaggtcgacgaaacgcgacgatgaggaaaaggagaagcagaagcagagttcagcttccggatccaaaagacccagtgctgacttaagtcagaccaacgcggatcagcaggtaggtggatcgtcggacgaactgcccttcgagttggccaatgtccacttcgagaaggtaggtgagtcctatatcaagcatgagaggctccgtgaattgcaagaacccgaggtcgtaaaggaagaggacacagaaaaggatgcggaagcggaagtggaggtggaacaaaccgatgccgccatggcccaattcgtggaggaggtcaccaattccctaaaagtggtggctctcaacggcgaaggcggaacagctgcagtgcatcacttcacacgtcgatcggagagccgggaacccatagagccacgaattagcgaggaacgggaatcagattccaatgacctaatgataccagatgacatgcgcgccgagctggtagagatcttgaaagcctatcccccagaaccagtttatgtgaatctgcaggcactgcggcgggagaccgaagatgcggatctggccatcgcccaagctgaagccgcagctttggcggcagccgagcccgcaaagaagccgctccagtgtcctaccatcgagtttgagccgccgtcgcgccgctcctccttcgatccgccgcgttctccgtttttggagcagctccgcagtcccggggtggacacggaaaccgatctcataaacctacagcgtctggattccgggggcgacagcttcgagctggtggagagtaagtggagcaagtccagtcgaggggagtccagtttcgattgcccctattcgtccagggataccagctttgacgtttccatttcgcggtatcagtccactagctacgaggatcagacctccagctttgagattgtagataccgatgaaaaaggccagggcagacgagccgttgatctgaggaagagctccattgagctagtggatgcggagaccttccaaagatctggctcatcctgcggaggccgcaagtcctccctggagacccactttgactacacacccaccgagggcggtggtcgatcgcccagccttccgtttccggcgatgagcaagaagcagcgcacggagaatttccgccagctgcacgtctcccaattcagtgccttctcccgggcacgcagtccgttgtcccagcagacttcctcgaactatagctccagggatagctacgactcgagtgggtcatatccccacggctatggctatccaccggaacctcagagaagtccatacggtgatcccagtcgcaagcactttcccctgactgtccggcaaaaaggcgaggaggagcgagaggtgcgcaccttcctctgcactgatcagagatgtgcctccatcttcgagccgcgacccagttccgtgctcacccagcagctgtccaccgggtccatgtccaccccatcgggctatacaaacggcacgcccagaattcctggtgctgctccggtcggaccggttcccctgccccatcccagcgccccgctctcctcctgcggcttctccagcggcagtgaattcgagccaccgtcaccgagacgagcggccagcgcctcgcccaagcacaccttcacattccgcatcgtaatgaagaaggtggacagctcgccggaggcattgtgcccggaaaggcatcgctcgaggattatagatcgttacaggaggcgcgatagtcgccggaagcgcatccatgatgcgggaaagagcttctag

SEQ ID NO: 10572 - protein, 900 aa, DROSOPHILA
MPVPESKSPGSSSQKTPTSLSRQGTLRASNRRKNSGQLSISLGTQGRRSPVGLNDRSPQGRRSPLFPSSGLRSPNDPMTSPTVRSPTGEPRRSSPTFSVHTQERRSPLGAVAPTDFGCQFGVPGTRRSPTSTVHVQDMATEPEEAGFVGLKRPSISLFTPIYFASEKRSPMGPIPPITVSNPAETYKSAEREREAAEAAAREKEKEKEKEAAQPQEKKSVMREILAFVRKPSKHLSSRTNRFANAFTRAESGSSGGPLIRQSTFSASPAASSTAAKSAVQKQMSEVGFEPKISQKFTHYAKMSLRLRRSTKRDDEEKEKQKQSSASGSKRPSADLSQTNADQQVGGSSDELPFELANVHFEKVGESYIKHERLRELQEPEVVKEEDTEKDAEAEVEVEQTDAAMAQFVEEVTNSLKVVALNGEGGTAAVHHFTRRSESREPIEPRISEERESDSNDLMIPDDMRAELVEILKAYPPEPVYVNLQALRRETEDADLAIAQAEAAALAAAEPAKKPLQCPTIEFEPPSRRSSFDPPRSPFLEQLRSPGVDTETDLINLQRLDSGGDSFELVESKWSKSSRGESSFDCPYSSRDTSFDVSISRYQSTSYEDQTSSFEIVDTDEKGQGRRAVDLRKSSIELVDAETFQRSGSSCGGRKSSLETHFDYTPTEGGGRSPSLPFPAMSKKQRTENFRQLHVSQFSAFSRARSPLSQQTSSNYSSRDSYDSSGSYPHGYGYPPEPQRSPYGDPSRKHFPLTVRQKGEEEREVRTFLCTDQRCASIFEPRPSSVLTQQLSTGSMSTPSGYTNGTPRIPGAAPVGPVPLPHPSAPLSSCGFSSGSEFEPPSPRRAASASPKHTFTFRIVMKKVDSSPEALCPERHRSRIIDRYRRRDSRRKRIHDAGKSF

SEQ ID NO: 10573 - DNA, 3936 bp, DROSOPHILA
aaaattaatcaatgcacttaaaaattttgaaaaacacacataaggaagcaaactcaatgacgtggaaaagggaaagggtgtggtgtggagggaacccctttttttaagcaaccctccggctgactttaaagtgctcgaaagaaacttaactaatttataacttatgactgcacggccatggacaattttccatgccactacaaaggagagcaaaagccaaaatttgacatgagtagcggtcgcttagccgaaaccatgtgtaaacccctttttttttaaattcaaagtaaacccttcagtcgggacatgtgagtgtgcacatgtcagcaagcgaattaatcgaagagaaatgatttatttagcgctcggacagacggaacgcttcgatgatccggggaaagggttagaatccaatgcaaccctcgtgcaattccgattcgcacccaaatcaaatttaaactgttttcaaaactgcacctcttggctcattgatgggcatttatcggtccagagggttggtcctgcactctatgtttacttatgcgttttctcgctgtgagaactgcaatttttcaccgtaaattcacactgcatttttttatataaccttcactgaatgaaactttttactgttttgagtttctgccgtcaaaatatttacgacttttgatttgtaatgaccttacttggatgtttgagtgattcgtgtgggaatgctgttttgatgctttcaatttgctgaaaatgtacaattactaaaaaaaaacaaaatcaaatcaaaaagccatccatgcattttacacgtgggaattggaagaaaaaaggactaaacatttcaaaattcttctaccaatttgttaaaataaaacttataacttatataaatacattatataatttttacgccaatcgaagggaaatttgaaatgtggtaaaaattacagcacaacagtctgtctttgattagtttctcaaaattaatcaaaatttggttgtgaaaatgtcgaacgctaagctggacagtaaggtcgttcagaacctgaaggacgtggcccaaaagctgcggatccactcgatcacctcgacacaggcggccaagtcgggacatccgacgtcctgtgcctcgttggccgagataatgacggtgctgttctttcagcagatgcgcctaaatctgaagcatcctcgcgatccttccagcgatcgattggttctgtccaagggacacgctgcacccattctgtacgccgtttgggcggaggctggactcttcccggtggaggagctgcgaaatttgcgcaaggtggacagtgatctagagggtcatcccactccacggctgagtttcgtcgatgtgagcaccggatccctgggacagggcatctcagtggccgctggaatggcctatgtgggcaaacacctggacaaggccgactatcgtacatatgtgatcgtgggcgatggcgaggctaccgaaggagcagtctgggaatcgctccactttgccggccactactgcctggacaacctgtgcgtaatcttcgatatgaacaagatcttctgctcggacataggcactgaaatggaggtttatcgggagaggttggacgccttcgggttcaatgccctagtcttaaatggccacgatattgatgagctggccaaggccttcattaatgcggccagcaccaagggtaagcccacggctcttttagccaggacgactaagggaaaggactttctgggcatcgaaggaatcgaagaaatgcatgcacagccactgggtaagagggccgaatctgcaatcaagcatttgcaggtatgattgaaagaccaattaattgcattaacggtatggttaatggtatcatgtgtttcctcagatgaaaatcgcaaatcccaacgtccgcctgacacccaaaaaggtgggaaagtgcggccacgcccccgaggtgcatattaacaatataatgctgtgcagtccgcccaattatcggctgggagattcggtagccccacgcttagcctacggaaccgccttggccaaaatcgcggctgataatcctcgggtaattgcccttgatggcgatacaaagaactcgacgtatgcggacaagatgaggaatgcatttccagagcgtttcatcgagtgcttcaccgcacagcagaatctggtgggcgtggccgtgggagccacctgtcgacgtcgcactgtggccttcgtttcgacgtatgcgacctttttcacacgggcctttgatcagatccgcatgggcgcaatttcgcacacgaatgttaactttgcgggctcccactgtggctgcagcatcggcgaggatggtccctcccaaatgggactggaggacatggccatgttcaggagcattcccgggagcacggtcttctatcccacggacgcagttagcacggagagggcggtggaactggctgccaatactaagggcgtgtgctacatccgcacaacgtatccgagcacaacggtgatctacaacaatgacgaggtgtttgccgtgggactgggcaaagtggtgcgccagaagccctcggatgaagtgctcctgattggagccggcgtcacattgtacgagtgcctggccgcagcggagagattggaggaggattgcattacggcacgagtgatcgacccctttacagtgaagcccctcgatgtcggactaatcgtgaagcatggaaagctgtgtcgtggaagaatcgtcgtggtggaggatcattaccagcaaggcggattgggcgaggcggtcctcagtgctctggccgactatcgaaactttgtggtcaagcatctctatattaccactgtaccgagatcaggccctcctgctgttctgctggacatgtttggggtctcctccagaaatatatacaaagcaagcctggccatcatgaagaagtgagcagaatgttcgaaaaaatcgaaaaaattaagaagtgtaactttataatttcaagtactttccgtaatcaaaacttttaaatatctctctcaacacaaattataactgtaactatatttatattttggttatcatgcaaattgaataaaaaattagcaagaagttaataaaaaaaactattatcgcattgttggacattttagtcacctgtatttatttttttatgagaattaaatgatctttattgtattcaaagtactttgtttttggaccgaaatatgaaccactccacttcttaataaatcaaatattcccttaataagaaatcaacccttttttaaatgtgacctgtccctttttcattgatacgtgctcttcagctgcggtattatatatcgctctacctgaactaataaccgtgcaacgtgaaatgcactacatgctactgaagttcaaagaaaaattgcatttgccaaaaatcaattgggcggaattaatttcaggaacttaacacagaggatcatttactgcgttggcggtacttttcgattttgacatatttatttgcagtgaccttttcgcaggggcgcatccaatcgatagcctcctcttcctattgttgatttagttttcgatacggtttgactgtattatcaggcaaatagttgacactatttgaacagggaattacccctaaggaacaggagaaattttaaaattaattacaaaactataaaaaaatttatttaatatatgttcctctagttataagcttaactgacaactttttctgtttatatatgtataactaaaagataaatacaagtatatataataggagccttatattaataatgaaacaaaaatattttgtaaaaaaacaagggtatctcgtggtcgaatcactcccgtttcttttagttctatctcgcctgaccaaaggccactttaaattatccgtaatgacatccgttgccgtctaatgtggcattcatccatt

SEQ ID NO: 10574 - DNA, 1872 bp, DROSOPHILA
atgtcgaacgctaagctggacagtaaggtcgttcagaacctgaaggacgtggcccaaaagctgcggatccactcgatcacctcgacacaggcggccaagtcgggacatccgacgtcctgtgcctcgttggccgagataatgacggtgctgttctttcagcagatgcgcctaaatctgaagcatcctcgcgatccttccagcgatcgattggttctgtccaagggacacgctgcacccattctgtacgccgtttgggcggaggctggactcttcccggtggaggagctgcgaaatttgcgcaaggtggacagtgatctagagggtcatcccactccacggctgagtttcgtcgatgtgagcaccggatccctgggacagggcatctcagtggccgctggaatggcctatgtgggcaaacacctggacaaggccgactatcgtacatatgtgatcgtgggcgatggcgaggctaccgaaggagcagtctgggaatcgctccactttgccggccactactgcctggacaacctgtgcgtaatcttcgatatgaacaagatcttctgctcggacataggcactgaaatggaggtttatcgggagaggttggacgccttcgggttcaatgccctagtcttaaatggccacgatattgatgagctggccaaggccttcattaatgcggccagcaccaagggtaagcccacggctcttttagccaggacgactaagggaaaggactttctgggcatcgaaggaatcgaagaaatgcatgcacagccactgggtaagagggccgaatctgcaatcaagcatttgcagatgaaaatcgcaaatcccaacgtccgcctgacacccaaaaaggtgggaaagtgcggccacgcccccgaggtgcatattaacaatataatgctgtgcagtccgcccaattatcggctgggagattcggtagccccacgcttagcctacggaaccgccttggccaaaatcgcggctgataatcctcgggtaattgcccttgatggcgatacaaagaactcgacgtatgcggacaagatgaggaatgcatttccagagcgtttcatcgagtgcttcaccgcacagcagaatctggtgggcgtggccgtgggagccacctgtcgacgtcgcactgtggccttcgtttcgacgtatgcgacctttttcacacgggcctttgatcagatccgcatgggcgcaatttcgcacacgaatgttaactttgcgggctcccactgtggctgcagcatcggcgaggatggtccctcccaaatgggactggaggacatggccatgttcaggagcattcccgggagcacggtcttctatcccacggacgcagttagcacggagagggcggtggaactggctgccaatactaagggcgtgtgctacatccgcacaacgtatccgagcacaacggtgatctacaacaatgacgaggtgtttgccgtgggactgggcaaagtggtgcgccagaagccctcggatgaagtgctcctgattggagccggcgtcacattgtacgagtgcctggccgcagcggagagattggaggaggattgcattacggcacgagtgatcgacccctttacagtgaagcccctcgatgtcggactaatcgtgaagcatggaaagctgtgtcgtggaagaatcgtcgtggtggaggatcattaccagcaaggcggattgggcgaggcggtcctcagtgctctggccgactatcgaaactttgtggtcaagcatctctatattaccactgtaccgagatcaggccctcctgctgttctgctggacatgtttggggtctcctccagaaatatatacaaagcaagcctggccatcatgaagaagtga

SEQ ID NO: 10575 - protein, 623 aa, DROSOPHILA
MSNAKLDSKVVQNLKDVAQKLRIHSITSTQAAKSGHPTSCASLAEIMTVLFFQQMRLNLKHPRDPSSDRLVLSKGHAAPILYAVWAEAGLFPVEELRNLRKVDSDLEGHPTPRLSFVDVSTGSLGQGISVAAGMAYVGKHLDKADYRTYVIVGDGEATEGAVWESLHFAGHYCLDNLCVIFDMNKIFCSDIGTEMEVYRERLDAFGFNALVLNGHDIDELAKAFINAASTKGKPTALLARTTKGKDFLGIEGIEEMHAQPLGKRAESAIKHLQMKIANPNVRLTPKKVGKCGHAPEVHINNIMLCSPPNYRLGDSVAPRLAYGTALAKIAADNPRVIALDGDTKNSTYADKMRNAFPERFIECFTAQQNLVGVAVGATCRRRTVAFVSTYATFFTRAFDQIRMGAISHTNVNFAGSHCGCSIGEDGPSQMGLEDMAMFRSIPGSTVFYPTDAVSTERAVELAANTKGVCYIRTTYPSTTVIYNNDEVFAVGLGKVVRQKPSDEVLLIGAGVTLYECLAAAERLEEDCITARVIDPFTVKPLDVGLIVKHGKLCRGRIVVVEDHYQQGGLGEAVLSALADYRNFVVKHLYITTVPRSGPPAVLLDMFGVSSRNIYKASLAIMKK

SEQ ID NO: 10576 - DNA, 2858 bp, DROSOPHILA
tactacattatagaaaaaacatgtgattaaagtattttagttattggtctatcagttgaaccagaaagtattcgcaggcttccaattaataaacataaatagaaagtatgatgatgtacacatgagcataagtacgcatataggattgtacatacacacacatatgtatgatgaacataagccgtaacataattatgctagacttccacagtataaattaaaaacaatattgcaaaatcttcaaaccaacccataagatgtcaaggaacatactttcaattaagcatataagccatttgaatggaaaagtcgcgaaagaacatgaaacattttgaggcttgggcgtccaagccgcggcattttacctgatcgcggttgatggaacgccttcgtcgtcggactccaagcggattttcttcattgccacaatttggcccgtcaggcggttgcgacccttatacaccacgccatatgtgccctcgccaatcttctcaattttctcaaaatcctccataatttattaagctatttctttgcaagccaccgacttttaaattagcgcgtttttgacgtatatgctctagtattaccagacagtttaaacgatgctaagctagctacatttattcatttggaatgtgggaatgaaactcaatattcaggcaacttattgaattgctgtatcttaaaaatgttgttaatttttttaaagttaattttagtgtactgtaaaattccacgcttttttttatagtgatttcaattaattaagacatcactttgtttgagttcggagacaaacgtttctgctaatatactattaattaacttatgagtttttggtgcaattaatttctattttatatcttttgaaggtgagtaccagtagtacggtactaaagaaattaatttaaaaaatgtaattggaataccgcaactgttttacttcatttttgttgtttcaaaattactaagctctttgtcgatatcttgacacacctatatgcatgccgcaaatgtgcataacatatatataacatagtttttttattttttgccgacacagcagacgatgtaaacatgtcgcttttaggtaggattgcagagaaaacttcaaggctcaggtaagttaaacttctctaaagtgttacttatctctaaaaacacaaatgactgatcacccatttgtttattgtagctgccttcgattgatgtcggtgtatcccacacactatgtcgaaccaattgtacaaaaatataaacaactagagcaaaagaatgatctgtccaagctttaccatgtgcccatcaaggcggcggtcaacaaatcgtctgataccatctttcacgacgatacaaaacataaaatgatcaattatataacgaaaaaggggaacagtgccttggccagaacgcttttgtccaagacgctggagctaataaaacgaacccagacggagcacatgaatctggccaaaggggagaagacaaccataaacaccaatcccgaaacgcttctgaaacaagcggttgaaaactgccgaccgctccttcaagtgaccgccataaaacgtggtggtgtcacctatcaagtccctgttcccatcaccacgaagcggtcatattttctggccatgaagtggctcttggaagctgcccgcgagaaggagcgtaaggtgtccctgccggaaaagttggcctgggagattctcgacgcagcccatggccagggaagggtcatcaagcgaaaggacgatctgcacaggctgtgcgaaagcaaccgcgcctacgcacattaccgatggagctaaatgcacaacaaactgtttttccaatgcaataaacttttcatatacctgttaatatctatgattaggatttgtgtccggggaatgtcttaagagagcggaatatcgaaataattcctggatttatggggactaaaaacgaggaccttagtaaaattgtatgaagctatgataccattataaaaacacatttctaatattttttctttatttttccttatacgttgtttatagtagatttgaaaattggattttccaaatggtgttatagctattgaaacccaaagtttttcttattacacttatactaagtttttatataaatttcttcaacccatttacctggttcgtcgtgttttaagcttctgaatttaatttaaaattatagcacagcttaataacagagtctactctttttagaatttttctatttaatttcagtataaaatgcaattttatacaaataaattatcctgattgtctcaaaaacatattttttcaagtgcaaagttaaaaaatgtaacctgtttatcgcgcaacgacaacggtgtaaacagtgcgttaaggttgtcgaggtgtacgtctatcgaagggactatcgattcttatcgaatcgcaacgctacagatgacgcacgaagagaacaaagatggcgatcccgagcacacgaaaattaaaacgagctgaatgataaataaagaattttttacctatagttgaaattcgcataagcgcagtgaactaaaatagttaatagaagtgtcatgcatatttgcaatgtgtaaacgaagagtttatcgcaaaacggtttactttagctgtgcattttgatataatcccaaaacacataatcgtactactagttgaagtcgactggacgacattacaaaaaaaaaagttgggtaaacttatcaaactgttgttgaaaacacaaggattctcggtattaatacgaaagagatatgtatatgtaatacatacgctgctggtggctcaacgtcaacactcgctgcaacaaaaggaattgcatacatagaattaacagtggat

SEQ ID NO: 10577 - DNA, 784 bp, DROSOPHILA
tatatgcatgccgcaaatgtgcataacatatatataacatagtttttttattttttgccgacacagcagacgatgtaaacatgtcgcttttaggtaggattgcagagaaaacttcaaggctcagctgccttcgattgatgtcggtgtatcccacacactatgtcgaaccaattgtacaaaaatataaacaactagagcaaaagaatgatctgtccaagctttaccatgtgcccatcaaggcggcggtcaacaaatcgtctgataccatctttcacgacgatacaaaacataaaatgatcaattatataacgaaaaaggggaacagtgccttggccagaacgcttttgtccaagacgctggagctaataaaacgaacccagacggagcacatgaatctggccaaaggggagaagacaaccataaacaccaatcccgaaacgcttctgaaacaagcggttgaaaactgccgaccgctccttcaagtgaccgccataaaacgtggtggtgtcacctatcaagtccctgttcccatcaccacgaagcggtcatattttctggccatgaagtggctcttggaagctgcccgcgagaaggagcgtaaggtgtccctgccggaaaagttggcctgggagattctcgacgcagcccatggccagggaagggtcatcaagcgaaaggacgatctgcacaggctgtgcgaaagcaaccgcgcctacgcacattaccgatggagctaaatgcacaacaaactgtttttccaatgcaataaacttttcatatacct

SEQ ID NO: 10578 - protein, 218 aa, DROSOPHILA
MSLLGRIAEKTSRLSCLRLMSVYPTHYVEPIVQKYKQLEQKNDLSKLYHVPIKAAVNKSSDTIFHDDTKHKMINYITKKGNSALARTLLSKTLELIKRTQTEHMNLAKGEKTTINTNPETLLKQAVENCRPLLQVTAIKRGGVTYQVPVPITTKRSYFLAMKWLLEAAREKERKVSLPEKLAWEILDAAHGQGRVIKRKDDLHRLCESNRAYAHYRWS

SEQ ID NO: 10579 - DNA, 6654 bp, DROSOPHILA
ctggccaaaggggagaagacaaccataaacaccaatcccgaaacgcttctgaaacaagcggttgaaaactgccgaccgctccttcaagtgaccgccataaaacgtggtggtgtcacctatcaagtccctgttcccatcaccacgaagcggtcatattttctggccatgaagtggctcttggaagctgcccgcgagaaggagcgtaaggtgtccctgccggaaaagttggcctgggagattctcgacgcagcccatggccagggaagggtcatcaagcgaaaggacgatctgcacaggctgtgcgaaagcaaccgcgcctacgcacattaccgatggagctaaatgcacaacaaactgtttttccaatgcaataaacttttcatatacctgttaatatctatgattaggatttgtgtccggggaatgtcttaagagagcggaatatcgaaataattcctggatttatggggactaaaaacgaggaccttagtaaaattgtatgaagctatgataccattataaaaacacatttctaatattttttctttatttttccttatacgttgtttatagtagatttgaaaattggattttccaaatggtgttatagctattgaaacccaaagtttttcttattacacttatactaagtttttatataaatttcttcaacccatttacctggttcgtcgtgttttaagcttctgaatttaatttaaaattatagcacagcttaataacagagtctactctttttagaatttttctatttaatttcagtataaaatgcaattttatacaaataaattatcctgattgtctcaaaaacatattttttcaagtgcaaagttaaaaaatgtaacctgtttatcgcgcaacgacaacggtgtaaacagtgcgttaaggttgtcgaggtgtacgtctatcgaagggactatcgattcttatcgaatcgcaacgctacagatgacgcacgaagagaacaaagatggcgatcccgagcacacgaaaattaaaacgagctgaatgataaataaagaattttttacctatagttgaaattcgcataagcgcagtgaactaaaatagttaatagaagtgtcatgcatatttgcaatgtgtaaacgaagagtttatcgcaaaacggtttactttagctgtgcattttgatataatcccaaaacacataatcgtactactagttgaagtcgactggacgacattacaaaaaaaaaagttgggtaaacttatcaaactgttgttgaaaacacaaggattctcggtattaatacgaaagagatatgtatatgtaatacatacgctgctggtggctcaacgtcaacactcgctgcaacaaaaggaattgcatacatagaattaacagtggatattagggtgagtacttttcacgaaatgtattttatttcggtgcagggtatgttttctagccgttcgattacactttttatgctgcccatggatctgcatacgtttatttgttgaatgtgtgtatatacccgtgcgtatacagccttatgtacgaattaattcctcttaaatgtatgtggataccattttcatgattctgcatacatacacatgtatgtatgtatatgtatatacgaatgctcgtaaacaaagtaactacttatgtacaaacgagtaaatgggtgtaagagcgtatgaattaactttattctccaagtgcgtgtgcttgtgtgtgtgtgtgtgcgtgtgcatttgttcgtttgggaagttattttaagttttattttcgtgcaacaaactcacggttttcatataccatgtacgtgtatatttaatgtaagtatcatgtacatgtgttcatggaaaatgttgtgaatcaggtgtagaaacatttcaagaatcggtattgtgttagtttgttaaatagattaatatcattaatgattatagcattaaaaggctccgtgagttttaaacaatttgttaatttttaatgtttaatctttggaaaaaattaggcatttaaactaatgaattgaactaattattattgttatctgtaaggttagcataagaagttaagtatttgtttgactaggaattctgatataaaacaagaaaggtcaggtataacatgggttcccaaaaaaatatgtaaatacaaatatttgtatgaagcatatttttattaaaccaaccaaatataacagttttagttgtgctagcacacatttataaactattttacaggtaggaaaggttccaacacttgccacgcccacttttaggacgagttcaattttcctagtgcgcttgtttatagaaatataatcagttgtagttgcatactttatatcatttaagtattttttaaaaaataaaattaatcctaattcgataattgggtcaacagtaaaaaagacttctttgaagtttggatcattgtaaaatgcctattcattttcgctggcgctaaaagtagtcaagccactttttccgcattacttgtgcaggacttgtacttcgcctgataaaatggtcttaaaaccaaataaaaatccctgattaggtggttttaggatctattttagcagaatcattggcttaaaacatttttcatcttaattataatctcacaatgctaaggaaaaggatttcatttaacatactatgccgcttactattctttcagaaaattcatataaactataaaaagactttgcgtgcaggttgcaggtgataacctgttgcattaaataaatttaaagtaaattaattacacctagctcacggaattattattatttttgttcatatatcttcaaatatatgatctagtccttagctttcctttttaatcgaaccattcaagtatgcgaattacatgtgtagacagcattaacttatgtcccccccgttgttttgcagatctattgctgaaatggcgaccagtgacgatgagccgatgcacttgtatgaggtgttccagaactgcttcaacaagatagccaacaagcaaccgacggggacggttggagcggatcgcggcggtggcggtggctaccactcgccgtacggcagtctgggcgtggaaaatggcatgtaccccagtgacttcaactcgatgcacgataccgtcaatggcggcaacaaccgatatgccaacgcctcgaccgtcgatcagtatttcgattcagctgccgccggcagcggaggtgcatggtgtcagccgcagatgagcagcgccaatagctacatgggccaatcggcgtatcagaatagcggcccgctctctggccactcgatagaccagcagcagcagcaggttcaccaggcggacggactcggaatgggcggaggtggtggtggcggcgtcggtgccgatggtatgcactgcccggtgaccacgggtctgccgccgattagctcttttcgtcccacctccggtggaattggaggacctggtgccgggcagcaggcaccagtgaacgttaatgtgaatcccccagccgtgttcaattcgccgcaggcccacaaccataaccacacagtacaagcacagcacagtgcactgtccacggctggaccgcttggccatcactcgctcaaccacacgccgcacgcacattcccacacactcccgctcccgcacgccctgccccatggccatacccttccacacccccaccacagtcagcagaacagtcctgccgtgcagagttcggatgcgttcagtggtgccggggccagtgtgaaggtggccggagctggtaattcctcggcagcggcactgcggcaacagatgtacatgccggcggatcaaagtattagtagtttcggctcgaacccctccacgcccgtcaactcgcctccgccgctgacccagtcggtggttggtggcggcggcgagccgtccgtgtctggcggctctggatggggtcattcggtgctaaatggcggacccagctcgagctacgccagcgaaatggttcctgtgtccagcttgcacaccatggcctcggtgttccagggcgttcgcatggaggagcgactggacgacgctctgaatgtgctgcggaatcactgcgagcccgagatgctggccggtgtcaatcagtcgctggcctcgatcgacaacattgatgcgttgacctcgtttgtgcccaactcaccgtcgcatctgggtagcggtgggaactcgggctcggtcagcaacacgtccaatgcagcacttgtgcacgaggttctggccttgggcgccgctgctgctgccggcacatccggccaatcggtaggcggggcaggaagcctggccagtttgaaactcgatcgcagtgcgtccacgtccttgcctaagcaaacgaaaaagcggaaagagcacacagccattagcaattcggttccggcgggcgtgtccaccacctcgagtctgaccagccttgacatttcggacacgaagccgaccagctccattgaatcgtcgaattcgggactgcagcagcattcgcagggaaagggaacgaaaagaccgagacgctactgctcctcggcggacgaggatgatgacgccgagccggcagtgaaggccattcgcgaaaaggagcggcggcaggcaaataatgcgcgcgaacgtatccgcattcgggatattaacgaggcgctcaaggagctgggccgcatgtgcatgacgcacctgaagtccgacaagccgcagacgaagctgggcatcctgaatatggccgtcgaggtgatcatgacgctggagcagcaggtgcgcgagcgcaacctgaatccgaaggcggcgtgcctgaagcggcgcgaggaggagaaggccgaggatggtcccaagctaagtgcccagcatcacatgataccgcagccgcagcaggtgggcggcacgcccggcagcagctatcatagccagccagcgcaactggtgccgccatcatcgcagaccatcagcaccatgaccatatccctacccgtcaaccaggccaacaacggcctgccaccccacttgcagcagcagcagcagcaacaatcacagctcggacacgcccagcttccgcaatagcatgcaccacccaggaaccccttctggaaatcgtcgtcgtccctctcttccataaaaaccgaatgtattgaaggctccgcggccaagtactcagataacttggaactggagaatcaggttttaagcaatatgttctggcgttgtcgtcctcccaaattgcaaccacaacccctacaaaatgtacaacacttttaacacacaacaaaactaaatgagaagaaaacaacacacacaaacacaccacacaacaaacaaaacaaaaacaaaaaaagatgaaaaaaaaacgaaaacaaacgcccaaatgattgccaatccacacacagaattgctctttttaaaacgattgtatatagctgttccattacgtttaacctgggaagatctttttcgttttttagaatgtttgattttaataattatttgttttattttgtgcgatatcaccgtagccatattttttatatacaattacatgcatacataacgacataattaagtgaaaatagttttataataaaaaaaaacacaacacatagacttacttctatatattcccgagagctaaggaataaatatgtccatattaatattttatattgcgttacaatgttcttcttatgtgattacagagaatatttgcacattgctgcggtaaccacggaattaatcgttatctaagattagctggtaattgttgtagtatcttaaggcttcaaagagacacgttcacgtgttgtatcatttaattaattatatacataatttcgcgctagggtagggcaatcggaattaagcgagtgatgccattataatcttaactgaaattgcagagtgaagccaatttgatttccccgaatgtgtgttttatttaacagtgacaacgcagcagaatcgttaagccactgaattcttatataatgcataaaactttctcgatggttttcagtcgaacttttaccgatcatttcttagctttcgtatgtgttttacaccgcttacgtacttcattgaaacaatttacctgtacaatctttagacttcttgacttcattgatttcgttatgaataaatggtataatataatgtttatacctaataatacatggttaagctgtcgatttattggtttttgctgccagaggtttcaatctgatattaaggatctttagttcggggatccactgctgatttgagtagatagttgtcagttgtgggcttaaaaactataagtaatttgtataatttcagttttttaaatgtccgtctgtctttcgtagatctataaacgtttgagattataactcaaaaacggtcaaacaattgtgacttgcccaaattttacgttacccgaatagttatcaatgataagttatcagactgtcgcaatggcttacctcattaagatttgatttgaactctaattattaatcacagaccaccaaggaattttacatttgtgtatttgacatgtgtattatacacgtagccttccaaatatacatgtaaaaatactgatcaaactggtagataaaatatgaaatcacaacaactataaactcaacggtctattatttagtttatcagccattaag

SEQ ID NO: 10580 - DNA, 3133 bp, DROSOPHILA
agcacacgaaaattaaaacgagctgaatgataaataaagaattttttacctatagttgaaattcgcataagcgcagtgaactaaaatagttaatagaagtgtcatgcatatttgcaatgtgtaaacgaagagtttatcgcaaaacggtttactttagctgtgcattttgatataatcccaaaacacataatcgtactactagttgaagtcgactggacgacattacaaaaaaaaaagttgggtaaacttatcaaactgttgttgaaaacacaaggattctcggtattaatacgaaagagatatgtatatgtaatacatacgctgctggtggctcaacgtcaacactcgctgcaacaaaaggaattgcatacatagaattaacagtggatattaggatctattgctgaaatggcgaccagtgacgatgagccgatgcacttgtatgaggtgttccagaactgcttcaacaagatagccaacaagcaaccgacggggacggttggagcggatcgcggcggtggcggtggctaccactcgccgtacggcagtctgggcgtggaaaatggcatgtaccccagtgacttcaactcgatgcacgataccgtcaatggcggcaacaaccgatatgccaacgcctcgaccgtcgatcagtatttcgattcagctgccgccggcagcggaggtgcatggtgtcagccgcagatgagcagcgccaatagctacatgggccaatcggcgtatcagaatagcggcccgctctctggccactcgatagaccagcagcagcagcaggttcaccaggcggacggactcggaatgggcggaggtggtggtggcggcgtcggtgccgatggtatgcactgcccggtgaccacgggtctgccgccgattagctcttttcgtcccacctccggtggaattggaggacctggtgccgggcagcaggcaccagtgaacgttaatgtgaatcccccagccgtgttcaattcgccgcaggcccacaaccataaccacacagtacaagcacagcacagtgcactgtccacggctggaccgcttggccatcactcgctcaaccacacgccgcacgcacattcccacacactcccgctcccgcacgccctgccccatggccatacccttccacacccccaccacagtcagcagaacagtcctgccgtgcagagttcggatgcgttcagtggtgccggggccagtgtgaaggtggccggagctggtaattcctcggcagcggcactgcggcaacagatgtacatgccggcggatcaaagtattagtagtttcggctcgaacccctccacgcccgtcaactcgcctccgccgctgacccagtcggtggttggtggcggcggcgagccgtccgtgtctggcggctctggatggggtcattcggtgctaaatggcggacccagctcgagctacgccagcgaaatggttcctgtgtccagcttgcacaccatggcctcggtgttccagggcgttcgcatggaggagcgactggacgacgctctgaatgtgctgcggaatcactgcgagcccgagatgctggccggtgtcaatcagtcgctggcctcgatcgacaacattgatgcgttgacctcgtttgtgcccaactcaccgtcgcatctgggtagcggtgggaactcgggctcggtcagcaacacgtccaatgcagcacttgtgcacgaggttctggccttgggcgccgctgctgctgccggcacatccggccaatcggtaggcggggcaggaagcctggccagtttgaaactcgatcgcagtgcgtccacgtccttgcctaagcaaacgaaaaagcggaaagagcacacagccattagcaattcggttccggcgggcgtgtccaccacctcgagtctgaccagccttgacatttcggacacgaagccgaccagctccattgaatcgtcgaattcgggactgcagcagcattcgcagggaaagggaacgaaaagaccgagacgctactgctcctcggcggacgaggatgatgacgccgagccggcagtgaaggccattcgcgaaaaggagcggcggcaggcaaataatgcgcgcgaacgtatccgcattcgggatattaacgaggcgctcaaggagctgggccgcatgtgcatgacgcacctgaagtccgacaagccgcagacgaagctgggcatcctgaatatggccgtcgaggtgatcatgacgctggagcagcaggtgcgcgagcgcaacctgaatccgaaggcggcgtgcctgaagcggcgcgaggaggagaaggccgaggatggtcccaagctaagtgcccagcatcacatgataccgcagccgcagcaggtgggcggcacgcccggcagcagctatcatagccagccagcgcaactggtgccgccatcatcgcagaccatcagcaccatgaccatatccctacccgtcaaccaggccaacaacggcctgccaccccacttgcagcagcagcagcagcaacaatcacagctcggacacgcccagcttccgcaatagcatgcaccacccaggaaccccttctggaaatcgtcgtcgtccctctcttccataaaaaccgaatgtattgaaggctccgcggccaagtactcagataacttggaactggagaatcaggttttaagcaatatgttctggcgttgtcgtcctcccaaattgcaaccacaacccctacaaaatgtacaacacttttaacacacaacaaaactaaatgagaagaaaacaacacacacaaacacaccacacaacaaacaaaacaaaaacaaaaaaagatgaaaaaaaaacgaaaacaaacgcccaaatgattgccaatccacacacagaattgctctttttaaaacgattgtatatagctgttccattacgtttaacctgggaagatctttttcgttttttagaatgtttgattttaataattatttgttttattttgtgcgatatcaccgtagccatattttttatatacaattacatgcatacataacgacataattaagtgaaaatagttttataataaaaaaaaacacaacacatagacttacttctatatattcccgagagctaaggaataaatatgtccatattaatattt

SEQ ID NO: 10581 - protein, 702 aa, DROSOPHILA
MHLYEVFQNCFNKIANKQPTGTVGADRGGGGGYHSPYGSLGVENGMYPSDFNSMHDTVNGGNNRYANASTVDQYFDSAAAGSGGAWCQPQMSSANSYMGQSAYQNSGPLSGHSIDQQQQQVHQADGLGMGGGGGGGVGADGMHCPVTTGLPPISSFRPTSGGIGGPGAGQQAPVNVNVNPPAVFNSPQAHNHNHTVQAQHSALSTAGPLGHHSLNHTPHAHSHTLPLPHALPHGHTLPHPHHSQQNSPAVQSSDAFSGAGASVKVAGAGNSSAAALRQQMYMPADQSISSFGSNPSTPVNSPPPLTQSVVGGGGEPSVSGGSGWGHSVLNGGPSSSYASEMVPVSSLHTMASVFQGVRMEERLDDALNVLRNHCEPEMLAGVNQSLASIDNIDALTSFVPNSPSHLGSGGNSGSVSNTSNAALVHEVLALGAAAAAGTSGQSVGGAGSLASLKLDRSASTSLPKQTKKRKEHTAISNSVPAGVSTTSSLTSLDISDTKPTSSIESSNSGLQQHSQGKGTKRPRRYCSSADEDDDAEPAVKAIREKERRQANNARERIRIRDINEALKELGRMCMTHLKSDKPQTKLGILNMAVEVIMTLEQQVRERNLNPKAACLKRREEEKAEDGPKLSAQHHMIPQPQQVGGTPGSSYHSQPAQLVPPSSQTISTMTISLPVNQANNGLPPHLQQQQQQQSQLGHAQLPQ

SEQ ID NO: 10582 - DNA, 2706 bp, DROSOPHILA
aaccattttccaaatgaatcatctgcggatttaagatgcttacttcaacaaacgcattttccgagcaaataagccattccggaaaaacaaattaaggatgcgcaatcgacacgaaataaagaccctaaagaactcagtcagctactttattacccggagagatattgccatcccatcccgggaaaattggaaagaccccagctaacctaatgacagaccacccgaacacccttacaaacgatattactacagacttttacgacacttttcattagcagccacacttgctgttgtcgcgggtagccggaaactttcttttgtatgttggaaatgtcttggacctggtggcagtgtcttattttccacacacccctagtgggagttattaacccttaaccacacgttaccatttataacccgaacaaagtgaaccgagcgcgttaagctgacaatggcaacaaatttttttccttttgccgtctattgtgcccggaaaatctggtggcagccaccattcaattgtggttcttttcctctttgtctgcggtttatggcttttaattcgttctgagcctcgattcttaagggtgcccaagtgaatttcgcactgacatcaacggatattgtgtgataattgccacaagaaaaatattcgacatttttagagcgtacatttcgtttgcatttaaatgggaaaattaattaatcatttcagatttgtattcatttaaaacacttcaattgagcaatatgaaaattaaccgatcgaaaatgtatattttaagtatcttaagtggctgataagtgctgatagatagatacatataagtacttttgaggtaggtagattgattacacatttctagatgatagccgtataaaaaaaaggtattagatagttggagtgggcaattcgattaatttctgataagacgtagttttcagcgggtatataaactgatcttcactactggccgagaaaatattattaattggacagtaaaatgaaagccatcaccgtttgccttttggttctggtttcggccacctgtctgctgaccacgcgggtaagatttgccaattaaaaaaaaattaacttaaatataataaatatttctttgtttcaggccaatgcaatagaattgctggagaacgagaacttcgactatgatttcgactttgaatcggaattggagcagttgctggatgaactggacaatgacactgactacatggatgtggaggcacagggctttattagaacatgccttaaaatccttcgcaaggcattgaaaacggttcgaggcaccaactgtattatcaaggaggtgacaaacatccttagttcatgcaccagctatgtggatgctattgatgcctgtggcactgccattcccaaggatgtggccaagattgtggactccgttaaggagattatcaaaatctgcgacgatattttgcatctgcattcgaaactttgtgccacggataagtccgtgggctcgtccatcaaaaactcggccaaatgcttctggaaattgttcaaggcatccatgaggctgacccgaaagatcaataaaaccctaaaactgattgccaaattgccagccgataccagttcctgcttcgtaaatgccaccaataaagttacagcgtcctttaactcttttctgcccaacattgatgtctgcatcgagtctatgtaaatatattattattaaaaaataaaaaactcttaagcttacagcagattagatttcaattctcgagcctttgttcccaacaacctatgaacaataatatagtgatttgattgaaaataaattttgtttcattatgataagataacttcaatttccaactatgagccgaactgaagcgattcgattaagattcgttaataaatacaatcggtatctagagagggttcttgaacagctttatactgatatggaaaattaattgtaattaattataaattgcaattaaagggatttaacttacgtctctgaatttataataatttagcattttttagcatttagcaaaaacagatgttaaggtaacactgaaagagcactgtcagagttgaaaatgttcgtcataaatttagaaattatttagttcgattcgggcacgacagcacgaaacatgtcccagataaacaatatattcattaagctgcgagctcgtctgcgggagcgtgatatcaagttgtgggaggagccgtactacttcgaggaggtgggcagcatcgagtcggagatggaccgcctggccagggacatcagtggcgaactgggcatcagtgtgtcggactgcagaattgccttgggcgaattgcaagatggtgccttgcggaagctggcggctcgccgagagttcaatgacaccggattggccacgttcaatgtgcggtgtgtggacagcaagggtggcaccgtgcaaatgctggagatcaagtgttcgctgggtggactgggctcggatctgcaagctgaggtggccaagaagttggatatcgttgattccagtcatgtgaaatgcatctccggaggacgcatcatcaatgggcagaagacactggcctcgcaggggctcaaaaccaatcagcacctcatggtggttgtgggtggaactaatgaaggtcaggagttgcacgaacgtatccaaaggattcgtgcggacttggagttagttgcggat

SEQ ID NO: 10583 - DNA, 646 bp, DROSOPHILA
taaaatgaaagccatcaccgtttgccttttggttctggtttcggccacctgtctgctgaccacgcgggccaatgcaatagaattgctggagaacgagaacttcgactatgatttcgactttgaatcggaattggagcagttgctggatgaactggacaatgacactgactacatggatgtggaggcacagggctttattagaacatgccttaaaatccttcgcaaggcattgaaaacggttcgaggcaccaactgtattatcaaggaggtgacaaacatccttagttcatgcaccagctatgtggatgctattgatgcctgtggcactgccattcccaaggatgtggccaagattgtggactccgttaaggagattatcaaaatctgcgacgatattttgcatctgcattcgaaactttgtgccacggataagtccgtgggctcgtccatcaaaaactcggccaaatgcttctggaaattgttcaaggcatccatgaggctgacccgaaagatcaataaaaccctaaaactgattgccaaattgccagccgataccagttcctgcttcgtaaatgccaccaataaagttacagcgtcctttaactcttttctgcccaacattgatgtctgcatcgagtctatgtaa

SEQ ID NO: 10584 - protein, 213 aa, DROSOPHILA
MKAITVCLLVLVSATCLLTTRANAIELLENENFDYDFDFESELEQLLDELDNDTDYMDVEAQGFIRTCLKILRKALKTVRGTNCIIKEVTNILSSCTSYVDAIDACGTAIPKDVAKIVDSVKEIIKICDDILHLHSKLCATDKSVGSSIKNSAKCFWKLFKASMRLTRKINKTLKLIAKLPADTSSCFVNATNKVTASFNSFLPNIDVCIESM

SEQ ID NO: 10585 - DNA, 6005 bp, DROSOPHILA
taaaaatgagcgtagacttttagaaaatgattttttggcactgcacagatattagcgtatgctccgaaaaccgaatcccatctttgtaattccccactgtgcgaacttacctaaatcagagaataaagcgatgaggctgcaagtcgacactccgagaagtgcttgagtacttcttttcgttctcgatggaaatcggcactacagagattgaagaattttttaagttttttttttgtgtttttgtttttacgaaatagaccacattcaaggatggctgaggataattttttttttctttttcccgttttgaacgtctggtgcatgtgccctatctggcgatcgagtacctaatgaagcggtgtgaggcgtcggtgcctgacaagcttcaaagcgaagtgtcactttgggcgcctactggcgtgtcctgagtaaaatcttaaaagatttgacatttcggaaacatttatttgggcattatatacttcattaaacatatttcgatctggtttggccaaacatttacttggcttgagaattagtttgctttcaactcaattttgatttttcgtagcatttaatagttaaacataaaacgtactggcttaattcattattgtgtagttttgcctagactatgggtgaaaattattgaactagtcctacattttattaaatttgtgtgtatgtatgtatatcaattgttttttttttgtatgcatgacatgatttgtgagttttcccatttgaaggtatatttttcaaaaacatacatgggcgtggcgtatcgctaaagtacagtactgaacttaactgaattgttctcattatttaatacgttttcattcatcagcgaattttacataggcttccagattaatcttgtaatacttttaccaattttgtgaaaacttatttatgttctgctgcaacacttaactgccattgcacaattataacctgtattcagttgctttttgcttttttttcgttttttttttttacaatttaacattttatcgctttaatgctgaaccaatattttgaacaatctttttctattttggcagtgggttggtaataaacttttaaacattaacaaataaagaggcccgtagttggcagcgttcattaatacataataacgaaaagaaatgataatggaaatgaagaatataaaattcataatgagtcggtatgccaaagggttcaatttccaagcaatccaatcgccgttgtcgctgtatctccgccccactccaccaggtactggacctgtccatttcccatgcgccgcttggcccgaatggcaaagggctcaccagcatctatgcgattcatagcgccaccaaagtacttgttcaccgactgcttcaagtccagcatggaatgtcctggggctccaatgccgttgctgctgctgctggttgccgtcgagctggtggagttccggcggctttggctgggtgactgcttctgtggtcgctggcgcaacaggcgcccatgtgtcggctttcccattggcggcgcgggtggctgcagatctttggcatagataggaaggtagtggctgggtatgggattgatggtggtggtgctgatgacctattaagtggaaacgaaaaaaacatctcaaacattatagttacattgttgttagttaaactcttacctcaatggccgtggtcaggcggcgagtgcgtcgtctgcgcacttcctgattgggccctatcgtaatgtctttggcactcagtcttcgcttgatggtgcgcaccatgcgcggctgctccttggaggtgcccttaagcttgaaaatgctgtttatgatgccatttactccgactccagttcccacagaaatacttcgtccctgcgacgcctttttgggagtggccataaggaatggattgttgcgtcccaaaaagttgaccggcggtggtatgatgaggtccaacgaactggttccccgactgctgcttgaattctcgtcggatgatagatcacagtgattgcggctgttgtcatagcgtttggacaatcggaaagccttgcgcttccgactgctgtttgcgtccagcagaggtggaatgggagctggtagtttgccgggatcgccatcgttggcattgtcgtcggcgaggtccggcttcagtggcaactcatcatgcttatcggccttctgagcggcctgctttttggccttctcaataatctgtttgatgggtatttcgtcctcgctggtctcgactgggtcatcttcatctgtattaaactcatacacatctttgggaactcttttcggaagctcgttggcaccttcatcaggctcctcgggcatgagcattagtttaaatcttttttcgagcagctcatcggacagctcctcgtggggctcaaggaataccttgggaatgtgtggcgggccactgtgtctcagtgcatagaaggccggagcccttttaaactccctgccgcaaacaaatctgtcagagtaatccttaagggtttgcttgagacgctccatcagtgccgtttcgggcagtgtgcgccacttctcgcagataggcagctggtggcgctgctcgagtatgaagggccaaatgtcatttagcaggtgatggtacttctggtgctgatgctttcgcagattgtatagtgcaatgtggagcacatccacccattcgatttgcatacgacgaacgaattctatgccattgttgcagaccgtgcagcagaaaacaaagaacctagacaatgagattcatttcagtttagatcacagtaaagcaattgaatacgtacatatcgccgcgcagcagcttcttcttgaagttctgcatgcattgggtgtggaaccagttccgacatttgcagcactgcagcatattgtgatcgaattttcccggtttgccgcagtagcagtagatctgctcttcgttgacccgatgcttctcatcccagctgagcttatccgcctgtgggtaaaaccggattaagaatctaatccgctggcttgggttcgtagaatactcacatggtagggcaactggcgacaaattcccgctggttttgtgatcttatggctgacaggctgttgcattttcatgggtttagcgcagcgtttgcaactccaaattccactgccagtaacaatttcaacggtgcaaccacgatggtagccacgtccgcagcgctcgcaaatttcgaccacatcttcgatatccgatcgcttgcaggccacgcacatgggtccactgggggaggtattcgtggattccgtggtagaggcaccgcctccgccagcggtaatcgagctaccgccacctagcttgcgcagcttatccggttcacaccattgctccgactggtcatcaaagcggataagatattgatcgcttgtctggtcaataatggtgcccaggtaaaatctgccatcgttgcatttgatgaagacgtcctcctgaagcgcatacgtgaccgctggcgagggagcggcaactggtggtgccggcggcggtggtggtggtgatggaggtgttggcggcgttggcggtgctgcttcgacggtcttgaagcttggcttcattgagttgacgcctttgagcagcgattgcgtggctagtagcggaggcgagggcgaacttttaccgggtgaactcatggcctccggcgtagttggcggtgtctgtggcgttgtggtcgtagaatccggctcatccacaatcacaactgctgctgaggtggtcgcggtaccactataactgctgctggatacagaactgctgctgcagctgctgctatccgccgtgctgctgtcgatgaggggcaggatggccttgtgctggatggccggtatgatgggcgaaggttgttgggccgtggtaagcgatgaacttagcgaagtgggcgtctccgtatagtggttattgatgcaaatgtttatgcggtctaacacgacggtggagggcggtgaggtggaattggtcacaggcaccagcggcggcggctgcagttgcttgccagttccgctggccgccagtagattgatttgtcccgcagtttggccaccgccactgggcaagtagtacgactgaacgggagcatatgtggagtgcgcttcctgtggcggcttattcagactgtatacacttggcgccgtcgagatgattcgtatgttgttggccttgaatgggctgcagcttgttgccgcctgttgcttcggtggcgttgattgctgagcgaaactgttcgtgatctggatggtgctgggatgtgtgggatgcgtggtctgcggcccagtggtggcatagtatcgcttggccaccgtggcaggtcctacgctgggcggcaggatctggtaggtggtcgtcatccactgcggctgctggccagctggctgtgctaagtagccgtaggtggccggaggagctgatgggacagcggtactcggctgttgcatgaacggatgtgccacgttctgcggtggatgatcgtgttgcaagtgaaaatggttgttcatcattgcggctgtgtgtgcgtgctagatgcgttgatttttccagtgcgcagtcttttgtgaaaaatatggatcttcagttcgatttgccggcttttcgcggcccgttttttcattgattttgcgattgtttcccgctgattaacacgagctcattaatctggcgcctttttcgtcgaatttgttgttgcccgccgacacatacatgcacacttttgctacacatacggactggagagcgggcccttttgtattctctgtgtcttcctcattcgtacttttccacacgcaccacaggcacttctagtttcggttgccgatttacccacctttaagtgtgtttcgaatcgtgcattaaattagcattttgctcttattgattcggctatcggctttgaacgtcgttgtcccaagttcatctttaacaccagcgaaaatgcacaaaacaaatcacttgaaaattaatttgtgtcagccatttttcaacatatgcccaccagtgtgaccgcatccaacaattgttcttttcgttacattttcatatataaatctaccacaacttatgtatgttatggtaataaaattaacttgattaaaataaataaagaaatattggaaatttgtcaccacaattttacatttttatatttttaaatatatcgaaacgtataaaatataccataaatttacttaattatccccactgtgccggcaaagactcagcggtctcgtcctggaaaatactagaaaatacatttaaatatttcctaaagattcaaaaacgttaatatcatacataatttacattttaaatgtagagtgacaattattaaatcaaattaaaaaaaataaaactaacatttatattaaggtaaaactttttgattgtcaaagtaaatcctatagaaatttcaaaatgaatgttaatttttttagtaagtatgccctttgtatgcttttatgtacaacttatctaaaatcaaaccaactaattttaattttaactcataattatcttaaagatatcaaatagaaaataccaaatactaaaatccctatcctttggtctgccgtattaaaatcgacagttgcctatcaattaatgttatgggtacacatatcaatactagctttaaaaacaaataacagaatttgataagtttttagtataatgatcatctagtaattggggtcaattatatgaatacgaagttgcgcgccagaaaatactagataaaaaccagaggaccaagcagacagctagcaatggtatatatagcagcgaactttagttcgataggtttttaccaaattggtcacgctgcgaacagaagcaattttacttgacggaggtttcattaaattttcacttgtgaataaaacgcgaaaaagcacttaaaaaccgaagaactgtgtaaaacaaaagcggtacgccaagaaagtgaagtgtaataactaaactaaacaagtaaaacgcgagtttttcacttcg

SEQ ID NO: 10586 - DNA, 3824 bp, DROSOPHILA
catatgttgaaaaatggctgacacaaattaattttcaagtgatttgttttgtgcattttcgctggtgttaaagatgaacttgggacaacgacgttcaaagccgatagccgaatcaataagagcaaaatgctaatttaatgcacgattcgaaacacacttaaaggtgggtaaatcggcaaccgaaactagaagtgcctgtggtgcgtgtggaaaagtacgaatgaggaagacacagagaatacaaaagggcccgctctccagtccgtatgtgtagcaaaagtgtgcatgtatgtgtcggcgggcaacaacaaattcgacgaaaaaggcgccagattaatgagctcgtgttaatcagcgggaaacaatcgcaaaatcaatgaaaaaacgggccgcgaaaagccggcaaatcgaactgaagatccatatttttcacaaaagactgcgcactggaaaaatcaacgcatctagcacgcacacacagccgcaatgatgaacaaccattttcacttgcaacacgatcatccaccgcagaacgtggcacatccgttcatgcaacagccgagtaccgctgtcccatcagctcctccggccacctacggctacttagcacagccagctggccagcagccgcagtggatgacgaccacctaccagatcctgccgcccagcgtaggacctgccacggtggccaagcgatactatgccaccactgggccgcagaccacgcatcccacacatcccagcaccatccagatcacgaacagtttcgctcagcaatcaacgccaccgaagcaacaggcggcaacaagctgcagcccattcaaggccaacaacatacgaatcatctcgacggcgccaagtgtatacagtctgaataagccgccacaggaagcgcactccacatatgctcccgttcagtcgtactacttgcccagtggcggtggccaaactgcgggacaaatcaatctactggcggccagcggaactggcaagcaactgcagccgccgccgctggtgcctgtgaccaattccacctcaccgccctccaccgtcgtgttagaccgcataaacatttgcatcaataaccactatacggagacgcccacttcgctaagttcatcgcttaccacggcccaacaaccttcgcccatcataccggccatccagcacaaggccatcctgcccctcatcgacagcagcacggcggatagcagcagctgcagcagcagttctgtatccagcagcagttatagtggtaccgcgaccacctcagcagcagttgtgattgtggatgagccggattctacgaccacaacgccacagacaccgccaactacgccggaggccatgagttcacccggtaaaagttcgccctcgcctccgctactagccacgcaatcgctgctcaaaggcgtcaactcaatgaagccaagcttcaagaccgtcgaagcagcaccgccaacgccgccaacacctccatcaccaccaccaccgccgccggcaccaccagttgccgctccctcgccagcggtcacgtatgcgcttcaggaggacgtcttcatcaaatgcaacgatggcagattttacctgggcaccattattgaccagacaagcgatcaatatcttatccgctttgatgaccagtcggagcaatggtgtgaaccggataagctgcgcaagctaggtggcggtagctcgattaccgctggcggaggcggtgcctctaccacggaatccacgaatacctcccccagtggacccatgtgcgtggcctgcaagcgatcggatatcgaagatgtggtcgaaatttgcgagcgctgcggacgtggctaccatcgtggttgcaccgttgaaattgttactggcagtggaatttggagttgcaaacgctgcgctaaacccatgaaaatgcaacagcctgtcagccataagatcacaaaaccagcgggaatttgtcgccagttgccctaccatgcggataagctcagctgggatgagaagcatcgggtcaacgaagagcagatctactgctactgcggcaaaccgggaaaattcgatcacaatatgctgcagtgctgcaaatgtcggaactggttccacacccaatgcatgcagaacttcaagaagaagctgctgcgcggcgatatgttctttgttttctgctgcacggtctgcaacaatggcatagaattcgttcgtcgtatgcaaatcgaatgggtggatgtgctccacattgcactatacaatctgcgaaagcatcagcaccagaagtaccatcacctgctaaatgacatttggcccttcatactcgagcagcgccaccagctgcctatctgcgagaagtggcgcacactgcccgaaacggcactgatggagcgtctcaagcaaacccttaaggattactctgacagatttgtttgcggcagggagtttaaaagggctccggccttctatgcactgagacacagtggcccgccacacattcccaaggtattccttgagccccacgaggagctgtccgatgagctgctcgaaaaaagatttaaactaatgctcatgcccgaggagcctgatgaaggtgccaacgagcttccgaaaagagttcccaaagatgtgtatgagtttaatacagatgaagatgacccagtcgagaccagcgaggacgaaatacccatcaaacagattattgagaaggccaaaaagcaggccgctcagaaggccgataagcatgatgagttgccactgaagccggacctcgccgacgacaatgccaacgatggcgatcccggcaaactaccagctcccattccacctctgctggacgcaaacagcagtcggaagcgcaaggctttccgattgtccaaacgctatgacaacagccgcaatcactgtgatctatcatccgacgagaattcaagcagcagtcggggaaccagttcgttggacctcatcataccaccgccggtcaactttttgggacgcaacaatccattccttatggccactcccaaaaaggcgtcgcagggacgaagtatttctgtgggaactggagtcggagtaaatggcatcataaacagcattttcaagcttaagggcacctccaaggagcagccgcgcatggtgcgcaccatcaagcgaagactgagtgccaaagacattacgatagggcccaatcaggaagtgcgcagacgacgcactcgccgcctgaccacggccattgaggtcatcagcaccaccaccatcaatcccatacccagccactaccttcctatctatgccaaagatctgcagccacccgcgccgccaatgggaaagccgacacatgggcgcctgttgcgccagcgaccacagaagcagtcacccagccaaagccgccggaactccaccagctcgacggcaaccagcagcagcagcaacggcattggagccccaggacattccatgctggacttgaagcagtcggtgaacaagtactttggtggcgctatgaatcgcatagatgctggtgagccctttgccattcgggccaagcggcgcatgggaaatggacaggtccagtacctggtggagtggggcggagatacagcgacaacggcgattggattgcttggaaattgaaccctttggcataccgactcattatgaattttatattcttcatttccattatcatttcttttcgttattatgtattaatgaacgctgccaactacgggcctctttatttgttaatgtttaaaagtttattaccaacccactgccaaaatagaaaaagattgttcaaaatattggttcagcattaaagcgataaaatgttaaattgt

SEQ ID NO: 10587 - protein, 1042 aa, DROSOPHILA
MNNHFHLQHDHPPQNVAHPFMQQPSTAVPSAPPATYGYLAQPAGQQPQWMTTTYQILPPSVGPATVAKRYYATTGPQTTHPTHPSTIQITNSFAQQSTPPKQQAATSCSPFKANNIRIISTAPSVYSLNKPPQEAHSTYAPVQSYYLPSGGGQTAGQINLLAASGTGKQLQPPPLVPVTNSTSPPSTVVLDRINICINNHYTETPTSLSSSLTTAQQPSPIIPAIQHKAILPLIDSSTADSSSCSSSSVSSSSYSGTATTSAAVVIVDEPDSTTTTPQTPPTTPEAMSSPGKSSPSPPLLATQSLLKGVNSMKPSFKTVEAAPPTPPTPPSPPPPPPAPPVAAPSPAVTYALQEDVFIKCNDGRFYLGTIIDQTSDQYLIRFDDQSEQWCEPDKLRKLGGGSSITAGGGGASTTESTNTSPSGPMCVACKRSDIEDVVEICERCGRGYHRGCTVEIVTGSGIWSCKRCAKPMKMQQPVSHKITKPAGICRQLPYHADKLSWDEKHRVNEEQIYCYCGKPGKFDHNMLQCCKCRNWFHTQCMQNFKKKLLRGDMFFVFCCTVCNNGIEFVRRMQIEWVDVLHIALYNLRKHQHQKYHHLLNDIWPFILEQRHQLPICEKWRTLPETALMERLKQTLKDYSDRFVCGREFKRAPAFYALRHSGPPHIPKVFLEPHEELSDELLEKRFKLMLMPEEPDEGANELPKRVPKDVYEFNTDEDDPVETSEDEIPIKQIIEKAKKQAAQKADKHDELPLKPDLADDNANDGDPGKLPAPIPPLLDANSSRKRKAFRLSKRYDNSRNHCDLSSDENSSSSRGTSSLDLIIPPPVNFLGRNNPFLMATPKKASQGRSISVGTGVGVNGIINSIFKLKGTSKEQPRMVRTIKRRLSAKDITIGPNQEVRRRRTRRLTTAIEVISTTTINPIPSHYLPIYAKDLQPPAPPMGKPTHGRLLRQRPQKQSPSQSRRNSTSSTATSSSSNGIGAPGHSMLDLKQSVNKYFGGAMNRIDAGEPFAIRAKRRMGNGQVQYLVEWGGDTATTAIGLLGN

SEQ ID NO: 10588 - DNA, 2453 bp, DROSOPHILA
ggagcccagtgaccaactgcatctgcgtgaggttccttatcttctgagcagagctgatcacataagctcgctcctgctggataaaatcaatgtcctttagctccttatcttcgatgagttggcccaactcaaagtggatttcggccaggcgtaggacatccttggtcgcttttagtttggccgtgaggctcagcaatgttccagccgagcggagtaggtgactgacatcgtgcagacgccctagcacttgcgtttggttctccacctgctggtactgcgtgtccacctggttcttcagccggtgcccagtttccctgacccgctgcacatcctcggcgagcgcgtttaaagccgcatcgaagcgcccagcgtgggtggcctgctgcagtagagctccgtgcttgtcgcgcacctgctggtgcagctcctccttcgtgttctgcagttgcttggacagctcctggatttgctggccaatggtcaggtgcgacatggatgcggtaaagtcattatcatccgaatccgctgcgtttggggtctttgtcgctaccgggtctccagtcaccatgatgcagaaggttttaatctatggtaatacgaattataagctggtattacacttttatttccattacttgcagcaattttacgtattgcaaacaaactgtttttccacgcaaccaaaaacaggctgtaatcgataaatttccagttgagcggggattgaattttttgaaggggtttctaaaaaactatataaagtattgcgtgatagcttaataatataatatttaaataataatgttaaaaactagccgcatcctttttccgcttgctgaaaatattttacttcgaccgccgactacgcccctgccacatgaacttatcgataacttgaggcagctgttgctcactttgttttgtgtaaataattggatgcggagaaaaacgtattattattgccataccttctctagtctttcgctttaacaaattttccatgtcggacgacatcaagaagtatttagacggcctgctgcaaaagtaaatattccacaggaaaggctgttcccaatatgattaacttataatttttcccccattccccgatttacacaaaagggtcagcgggctgtacgttattcagattacggatcgcgacggagtgcccctcctgcgggttagccaggagaagaacgtggacttcgccctgatgccctcgttcatacccacattcaccaccgcctgcgatcaggccagcaaactgggattgggcagaaacaagaccatcatctccatgtactccaattaccaggtggtccagatgaacaagctgccgctcatcctgacctttgtgggcgcggagaactgtaacacgggacacattctcgcactggagcaccaggtcgatggctatttggaggacattaaacaggctgtcaccgaggcctaaagttagtctaccttgtaatatgcatatttttaatatttactaaatgtttatacatacatactttattgagaacagaatgagtttttaaaaatctcaactcaccattgtactattccgggaatttatttcatatcctgcgaagggtgatctcaaagatgaacaaagttccgagtcctccgttttggcaacaatatcaaatatgcaaactattgacactttatttaaaatgaaaaattcttgctgcctaaaatgtgtacattcaattaaatttcttcatatagtttctcaattataatatacttttccctataccttgaaatcgtctgtgctcaagtatcacgaaagtaaaatatttgtatgtttgagctcaaggaaaccgactttaaatcaacattttcattcagtgatgttatctgttttaaaaatactaggtgtttacactttattcagaatgaaacttgatgtactttttgcttaaatgcatatactgagttaattagctacaattcttgatggttttcctgctgcagtttgggaatgatctcgacaaaattgatattctcctttaaaactaaaatacaatccccaaatctctggtctacgcatgccaagcattcacatttctctgcggctcatcctcatcgtcgattgttgaacatttcagagttcgtcgtgcagattctccgattcggactggaaagcttcgctgtcgcaggcggcgggagtttcgaattcaaagtagtattcacagcgattgggctcgctgacggcagtgattttgggttccagggcacaactaatgttgatgatggccgaacggtttggaccattccagcaggcagcaccattggtgtacttttgttgggaatattgctttggctctccactccatttgtcccagcgacccagcgtggtttcaggcccaccgctcctcgacttctgggaggcccgatcgaagggacaaagggtgtacacatactcccgatcttcgaaattgtag

SEQ ID NO: 10589 - DNA, 375 bp, DROSOPHILA
atgtcggacgacatcaagaagtatttagacggcctgctgcaaaaggtcagcgggctgtacgttattcagattacggatcgcgacggagtgcccctcctgcgggttagccaggagaagaacgtggacttcgccctgatgccctcgttcatacccacattcaccaccgcctgcgatcaggccagcaaactgggattgggcagaaacaagaccatcatctccatgtactccaattaccaggtggtccagatgaacaagctgccgctcatcctgacctttgtgggcgcggagaactgtaacacgggacacattctcgcactggagcaccaggtcgatggctatttggaggacattaaacaggctgtcaccgaggcctaa

SEQ ID NO: 10590 - protein, 124 aa, DROSOPHILA
MSDDIKKYLDGLLQKVSGLYVIQITDRDGVPLLRVSQEKNVDFALMPSFIPTFTTACDQASKLGLGRNKTIISMYSNYQVVQMNKLPLILTFVGAENCNTGHILALEHQVDGYLEDIKQAVTEA

SEQ ID NO: 10591 - DNA, 2884 bp, DROSOPHILA
atttcgccaaagaacgttttcataagggggaaaactcgtcgcagagccaattctgtcatattcgcggtgggagccacatcatcgataaagacaatgccataacgcaccagagattcaaccagggatctgacttcgttatcactggaaaccagctggggcaatgggaatcgtaagtgccgttcgttttgcaagataatgctacgattccatggtgtcagattagtggactttgatcgccgacctatcaacctctccagctgtgagtcgaagataaagtccaggtcatagttcgacttgtgagcatcactccctaaaatggcaggccaataaaatcgaagctaggtgcattttacatcaattttttcttacactgcacttgtagattcatcccgtcgtatttgacatctagtggcattatatcagctggtagatctaagacatcgtatcgcctctgatttgtttcgaaatttagacactccacacatcgacaatgatcacggagccaaaactcattgatttctattgattggctggttttcgggtgcttcaaaagcaacatgttaatgccaatagaacaaccgacggactagagcagtgaaagtgaactaacagctcaaagtttgattaagtttcagctcggttttaattgtactgttatcagtaggagagcgattactttcatgctcaagtcagagataagaacttatttgtttacggaataactataagattaataaatttattgaatttaaagacaatatgtaattattaagaacaactcatgaaagtaaaaaaatttataatttaatcaagattgattgaatggtatgtttttgttgcaaagttatcttagtgaattgctactcaagttgttgtattttttattaaaaaatcattactttaaagaaaatataaatattaatttcaaatatcttttattgaaagggattttttcccatctcaacaggccaagtaaaattcaaatggaaaaactctctctaaaactagagatctctaagtttttaattcattttgtaccggttgtgtgggaaatcataaaaaatgaagactttcgttacttcctgggccgatgaggtggatgcggactatgtggatggactgccgccttctaatgagtacattaagggcgacttcaagtacgtgacggagtataagttcaacgatgatggcaagaaggtgaaagtggtgcgaaccttcaagatcgagaagcagattgttccgaaggctgtggctcgtcgtcgcaactgggttaagtttggggattcgcgatcggacaagcccggacccaattcccagacgacaatggcctccgaggagatctttatgcaattcatcggctccaaagatttcgaccagacccacgaaacccaacttgatcccggcaagaacatcgccaagtgccgcatttgcaatggcgaacactggagtgtcaattgtccctacaagggcacctcgatggatagcaaaaccgtgatggaaaccaaggccaatgccgctgcagctgccgctataagtgatcccagcaagaccggaaaatatgtaccacccttcatgaaggacggcggaggcatatctggcagcaaaaattggggacggggtcgggatcgggacgattcgtcggcagttcgcatctcaaacctatccgaatccatgaccgagactgatctcgaggagctggtaaagaaaatcggaccacacaccaagatgtatttggcgcgcgaaaaaaacagcggcctctgcaagggattcgcctacgtgcacttcaagttccgccaggatgcagctgccgccattgaggttcttaatggccacggctacgaccacttgatcctctgcgtcgagtggtccaagcctcagccgtaatggctatagccttgtgtattcgcttctctgcttattcgagaacggaaatgagctgcggtggcagtgaaatcaaaataaaattctggtacaccctgcaaaatatgcgaccacttttatttttaatttgcacacattcgataattacagagaatatattaataataatataaaatctatttattaatgtttcgtagtagattttttcatctttcagttgagcaaaggatatgaattgagatagatatgaaaattgttaaaaacagtctggttcatttgggaccactcaattttcgagttgatatacccttggacatccaaggtggatgctttttttaagtgcataaaagagaaagctcgccttgagcgaactaaagccgataatgctccgttttaaatgcgattttttcgccgtgctccgcagccgtacaaaggtgaaagccacttaaatggaagccaacgtggtgccggatgatgatggcacggcgttcccggcaagagctgagaaatgccacaagacgctggccggaccgaatgaacattaataattaaatataagagcggacttatgcgcacgatacttggagcggagcccctcagaacgggacgccaactacgcgaccatgacgttgaaccgggaatgagtggtcggtggatagtgttcgcgggaaagtcccggcttagatacacattttgaatgaggggcggatcaaagccaggcacaaaagaaatttatttccattgttgttgctgttgcggtggtatgggatgggtagcagctaaagcagagtctaaaacaaattactgaataatttataaattaactttttctgcggcgcgctcattcgttcgtccccggcctttgtttgagcggcagaatgaataggtggaaggcgaatgaatgggtggccaggtgggcggcttgacaggttagttagcattgtgggggggggggggggtagttgggggtatgaggcgccctggtaaggagaacgccctcggc

SEQ ID NO: 10592 - DNA, 884 bp, DROSOPHILA
aaaactagagatctctaagtttttaattcattttgtaccggttgtgtgggaaatcataaaaaatgaagactttcgttacttcctgggccgatgaggtggatgcggactatgtggatggactgccgccttctaatgagtacattaagggcgacttcaagtacgtgacggagtataagttcaacgatgatggcaagaaggtgaaagtggtgcgaaccttcaagatcgagaagcagattgttccgaaggctgtggctcgtcgtcgcaactgggttaagtttggggattcgcgatcggacaagcccggacccaattcccagacgacaatggcctccgaggagatctttatgcaattcatcggctccaaagatttcgaccagacccacgaaacccaacttgatcccggcaagaacatcgccaagtgccgcatttgcaatggcgaacactggagtgtcaattgtccctacaagggcacctcgatggatagcaaaaccgtgatggaaaccaaggccaatgccgctgcagctgccgctataagtgatcccagcaagaccggaaaatatgtaccacccttcatgaaggacggcggaggcatatctggcagcaaaaattggggacggggtcgggatcgggacgattcgtcggcagttcgcatctcaaacctatccgaatccatgaccgagactgatctcgaggagctggtaaagaaaatcggaccacacaccaagatgtatttggcgcgcgaaaaaaacagcggcctctgcaagggattcgcctacgtgcacttcaagttccgccaggatgcagctgccgccattgaggttcttaatggccacggctacgaccacttgatcctctgcgtcgagtggtccaagcctcagccgtaa

SEQ ID NO: 10593 - protein, 273 aa, DROSOPHILA
MKTFVTSWADEVDADYVDGLPPSNEYIKGDFKYVTEYKFNDDGKKVKVVRTFKIEKQIVPKAVARRRNWVKFGDSRSDKPGPNSQTTMASEEIFMQFIGSKDFDQTHETQLDPGKNIAKCRICNGEHWSVNCPYKGTSMDSKTVMETKANAAAAAAISDPSKTGKYVPPFMKDGGGISGSKNWGRGRDRDDSSAVRISNLSESMTETDLEELVKKIGPHTKMYLAREKNSGLCKGFAYVHFKFRQDAAAAIEVLNGHGYDHLILCVEWSKPQP

SEQ ID NO: 10594 - DNA, 3845 bp, DROSOPHILA
aacgagaacttcgactatgatttcgactttgaatcggaattggagcagttgctggatgaactggacaatgacactgactacatggatgtggaggcacagggctttattagaacatgccttaaaatccttcgcaaggcattgaaaacggttcgaggcaccaactgtattatcaaggaggtgacaaacatccttagttcatgcaccagctatgtggatgctattgatgcctgtggcactgccattcccaaggatgtggccaagattgtggactccgttaaggagattatcaaaatctgcgacgatattttgcatctgcattcgaaactttgtgccacggataagtccgtgggctcgtccatcaaaaactcggccaaatgcttctggaaattgttcaaggcatccatgaggctgacccgaaagatcaataaaaccctaaaactgattgccaaattgccagccgataccagttcctgcttcgtaaatgccaccaataaagttacagcgtcctttaactcttttctgcccaacattgatgtctgcatcgagtctatgtaaatatattattattaaaaaataaaaaactcttaagcttacagcagattagatttcaattctcgagcctttgttcccaacaacctatgaacaataatatagtgatttgattgaaaataaattttgtttcattatgataagataacttcaatttccaactatgagccgaactgaagcgattcgattaagattcgttaataaatacaatcggtatctagagagggttcttgaacagctttatactgatatggaaaattaattgtaattaattataaattgcaattaaagggatttaacttacgtctctgaatttataataatttagcattttttagcatttagcaaaaacagatgttaaggtaacactgaaagagcactgtcagagttgaaaatgttcgtcataaatttagaaattatttagttcgattcgggcacgacagcacgaaacatgtcccagataaacaatatattcattaagctgcgagctcgtctgcgggagcgtgatatcaagttgtgggaggagccgtactacttcgaggaggtgggcagcatcgagtcggagatggaccgcctggccagggacatcagtggcgaactgggcatcagtgtgtcggactgcagaattgccttgggcgaattgcaagatggtgccttgcggaagctggcggctcgccgagagttcaatgacaccggattggccacgttcaatgtgcggtgtgtggacagcaagggtggcaccgtgcaaatgctggagatcaagtgttcgctgggtggactgggctcggatctgcaagctgaggtggccaagaagttggatatcgttgattccagtcatgtgaaatgcatctccggaggacgcatcatcaatgggcagaagacactggcctcgcaggggctcaaaaccaatcagcacctcatggtggttgtgggtggaactaatgaaggtcaggagttgcacgaacgtatccaaaggattcgtgcggacttggagttagttgcggatgcagatcgctttatggaaatggaggatcaggatggacgtccaattttcttgccacgcgaggaaaatcgatccctattgatggccatgagcatgtacgaagtggccagagttgccatgcataaggagaacttcgatgaggctctactcatcctactcgaggccgatgaactcttctcccaatgtgactcaaagctcctggaaggagtggataactatgccttaatcaatctagatattgtttggtgctatctgcgcctgaagaacatcacccaactgccagatgcacagcgacgtttggatatttgcgagaggggctttgtcaagagctatggcgagcagttcattcgattgttctcgattaagggtccaagtagcccggaaagagctttgatcatgagactgcacctgctccaaggtgtgctcctctttcaccaaaatcgccgggatgaggcctacgaaaaactggaggtggcgacaaaggacttgtatgaggtcaagatgaatgacactgagctaagcactctcgttgaaatgggctatgaggaatcggatgccaggttggccttgagatcctgtgcgggccaagtggatagggccattcaatatatccaggaacgcagcgagagaatcagtgaggagcgaaagaactcggctgccgagaggcaagtcaaccaagagatgattttcgccggtcaaggaggagaatgggtcaatccacgcagcattattaggctcatggaaatgggctacgaaaggcgtttggttgtggaggctctgaagaggaccaaaaataatctcgatcgcagtttggatctactgcagcgtcattcagatgaacttagggccaatctgccgcccattcctcctgtcgatgaatcgttacttactactctacagcaccttggattttcggagatttccgctcgagatgctttggaaactacgggcaacagtttccataaatctctgaaatttctattgaaaagtttccccaacgaatcggaattacttcatgttattgaaaccatgacaaaagttttggaggttcaagaacctacgagctcaactaatgcgactgcaaatagcaccaccccactcgtaaacttatccaacagcaaggtgaacttgctccagactgtccttagcgaggccaagtcggagattgagtcttacaatgccttcaagagattcaacgagaacctcgccgagaacaacaaccactacttaaacttgcccttggatcaggaggagcaaattctgatcgagtataaacgtttgctcgagggctaataagaaaaaaataagattttttttaaatatttgtaaatcaaaaaacaggcaataaataagtacgtacaaatatttattgttgctttgttatatttttaacatcttttctcaccatgttaccatttcatttcacagccattccactatagtctgaatggtacctttttgtggccaaaattaataacataacagctagtcaattaaataaaaaaaaaataaaaaaaatccagcttatagtgcgtcccttcaaaaactcaaatacttattgcccagcaaagtatgctatgcattttggttgctgatgtggctgctgctatttgctcactcatgtgcataacgtcacagtttttcacaattttgtgtatgtgtgtgtgtgcgcgtgctctttgcgtgtggctgactttgtgaaaattaataagttttcagaccctctcgccaatctgccaatgccatgcgaaagttctgcagatgatggccaaataatttgtcgtcctgttttgtggcgttatttccaaatcgttaaacctaaaataaactccgctcagcttatttcactcttccatttctttcttcatttcggtgttttttttttttcggtttacgttgatttattatatatgcgaaatggcgcacacattttgagtggctgacattttcacttgactgcgatttccttcgcttcttcacggctaaatcgagcatttcacaaaaaatacaaccacaccgaaaagccattttgcagattgttttctacttttataggtgagcagctgtctggaaggattaatctttcgaacgaactttttatattatttatttaatttatgtaatgaatttttttaataatacagaatgatatttatgtaggagggcaagtacttgggtggactctctctttaaaataatacgtttctttaacgagttcgccctctttcttgtttcaataagtccttgcgttgtggcacgaaaatgcaaaagaaattgttaagcaaaaatcgcg

SEQ ID NO: 10595 - DNA, 1845 bp, DROSOPHILA
atgtcccagataaacaatatattcattaagctgcgagctcgtctgcgggagcgtgatatcaagttgtgggaggagccgtactacttcgaggaggtgggcagcatcgagtcggagatggaccgcctggccagggacatcagtggcgaactgggcatcagtgtgtcggactgcagaattgccttgggcgaattgcaagatggtgccttgcggaagctggcggctcgccgagagttcaatgacaccggattggccacgttcaatgtgcggtgtgtggacagcaagggtggcaccgtgcaaatgctggagatcaagtgttcgctgggtggactgggctcggatctgcaagctgaggtggccaagaagttggatatcgttgattccagtcatgtgaaatgcatctccggaggacgcatcatcaatgggcagaagacactggcctcgcaggggctcaaaaccaatcagcacctcatggtggttgtgggtggaactaatgaaggtcaggagttgcacgaacgtatccaaaggattcgtgcggacttggagttagttgcggatgcagatcgctttatggaaatggaggatcaggatggacgtccaattttcttgccacgcgaggaaaatcgatccctattgatggccatgagcatgtacgaagtggccagagttgccatgcataaggagaacttcgatgaggctctactcatcctactcgaggccgatgaactcttctcccaatgtgactcaaagctcctggaaggagtggataactatgccttaatcaatctagatattgtttggtgctatctgcgcctgaagaacatcacccaactgccagatgcacagcgacgtttggatatttgcgagaggggctttgtcaagagctatggcgagcagttcattcgattgttctcgattaagggtccaagtagcccggaaagagctttgatcatgagactgcacctgctccaaggtgtgctcctctttcaccaaaatcgccgggatgaggcctacgaaaaactggaggtggcgacaaaggacttgtatgaggtcaagatgaatgacactgagctaagcactctcgttgaaatgggctatgaggaatcggatgccaggttggccttgagatcctgtgcgggccaagtggatagggccattcaatatatccaggaacgcagcgagagaatcagtgaggagcgaaagaactcggctgccgagaggcaagtcaaccaagagatgattttcgccggtcaaggaggagaatgggtcaatccacgcagcattattaggctcatggaaatgggctacgaaaggcgtttggttgtggaggctctgaagaggaccaaaaataatctcgatcgcagtttggatctactgcagcgtcattcagatgaacttagggccaatctgccgcccattcctcctgtcgatgaatcgttacttactactctacagcaccttggattttcggagatttccgctcgagatgctttggaaactacgggcaacagtttccataaatctctgaaatttctattgaaaagtttccccaacgaatcggaattacttcatgttattgaaaccatgacaaaagttttggaggttcaagaacctacgagctcaactaatgcgactgcaaatagcaccaccccactcgtaaacttatccaacagcaaggtgaacttgctccagactgtccttagcgaggccaagtcggagattgagtcttacaatgccttcaagagattcaacgagaacctcgccgagaacaacaaccactacttaaacttgcccttggatcaggaggagcaaattctgatcgagtataaacgtttgctcgagggctaa

SEQ ID NO: 10596 - protein, 614 aa, DROSOPHILA
MSQINNIFIKLRARLRERDIKLWEEPYYFEEVGSIESEMDRLARDISGELGISVSDCRIALGELQDGALRKLAARREFNDTGLATFNVRCVDSKGGTVQMLEIKCSLGGLGSDLQAEVAKKLDIVDSSHVKCISGGRIINGQKTLASQGLKTNQHLMVVVGGTNEGQELHERIQRIRADLELVADADRFMEMEDQDGRPIFLPREENRSLLMAMSMYEVARVAMHKENFDEALLILLEADELFSQCDSKLLEGVDNYALINLDIVWCYLRLKNITQLPDAQRRLDICERGFVKSYGEQFIRLFSIKGPSSPERALIMRLHLLQGVLLFHQNRRDEAYEKLEVATKDLYEVKMNDTELSTLVEMGYEESDARLALRSCAGQVDRAIQYIQERSERISEERKNSAAERQVNQEMIFAGQGGEWVNPRSIIRLMEMGYERRLVVEALKRTKNNLDRSLDLLQRHSDELRANLPPIPPVDESLLTTLQHLGFSEISARDALETTGNSFHKSLKFLLKSFPNESELLHVIETMTKVLEVQEPTSSTNATANSTTPLVNLSNSKVNLLQTVLSEAKSEIESYNAFKRFNENLAENNNHYLNLPLDQEEQILIEYKRLLEG

SEQ ID NO: 10597 - DNA, 3937 bp, DROSOPHILA
tatcccgttcaagcagctgcggtcaagaaatgttactttgtttgccggctgtcagcgattttgccattcggtgcgaaaaaatcgcacactcagatagtggtggaccgatccgatgggtttgaggtcaatagacgatagtttctgaatattctaacggccaaatttataaatttaaaaataaaaaaattctgggtattcggaatatgtaatgtccttaaaaattgtatatctaatttttaaataggtcgaatacagacaattattgtacgataataatttgttttcaaaatgttcgatatcaaaaaggttcatgaaggtggtagtgttggtaaagttatcgatgctccggaaaactatcgagaacggcttgataacatttgccatctctacgcttaaaagtattgtattattttgtttacatttaaatgggtggcaaaagttattattgcgactactgctgttgctttctgaaaaacgatctgaatgtgaggaaattgcacaatggtggtattgcacacgcaattgcaaagagcaactatttgaagcgttacgagggtaaagcttttgttgcacgatattcccgaaaaagctgaattttcaatatttgtagatcccaaaaagattttgactgaagagcggcagaaaactccttgcaagcgatactttggcagttactgcaagtttgaaacatattgcaagtttacccactatagtggcgataatctacgggaactggagaagttgggtgcgtgataaaacgcagatttaaaacgaaaaataacttcttcttgaaaactttcagttctcgctagaaagaagagaaaatcccgaaagaaaaccaacaaatgcaagagatggccctggaaaactcatctgcgaaagggattacccccttccttgcaacccattaacccggaaaaactcaagcaaaccgactttgaactcagttggggctaaatatatttacagaatgcacactttatgtcaagtattcagtatgctaattactttctccatgacgcgcgccactttcaggttgatgcgcaacgtgcgagcgtattcgtagtgatacgatttcggggaatgcccgcttaagttctcctcgtcgggatcggccaagtgcgcaagcaggaagtagcacaagtgttctgtacaaataggaaactttaaagcttaatcggacttcttcaactactaatatactaatagacagcaacctaccctgctccccttccacggcgtagaaaagcggtgggtttccgcccctcgcctcggatgcattgatgacatcccgcttatgtgcacggttctttagcaacgtcttgttcagctccagccgttcgcaggcacgatcgtagtacttggcgaagcccttctcgtcccactcattcggattcgctgcctccagggttctcctgtacaccgtttcccccagctcgcgctcgtctatactatcaaggattgcctcgacaacaaggaactggttattgcgcactgccaggtgcaaaactgtataaccatcatcgttggttagcagaagactgttcaaatcgattctgcgcaacagcagcctaatggactctatatttatatggtttatcaccgccagatgaagagctgtgtttgagttctcgtagaggtggtcggtcatcatgcgagcgtccaggatgagcgatacaatctcggtgtccgtgtcgttcgtcagcgcaagttccaggcagtcctcgccgtccctggtgagtagttcgttgatgtccattttcgcgtggcagcacacaaatatctgacgcttaacgccgtaaacatcgccgtgcagtatttcctcgtgaatgggtctgaagtgccatgtgaaaagatgatatcattacgatgatgatggtcttattcggctaaatgaatacttacagcaatccttcttcggacattatgtgcgactttctgaattcgttggccatgatgcgtataatgcggtcctcggtgtttccgcttataaagttttccacccgggtcaactcatcggagttgaacgatatatccgacaaggtagagtttcggcgtacaggggttttattcgtgatctgatatgattcgaagttttgcgcttgctgtaagaaagatatttataataaaatcgtatatatatttccattcgagatttatgaacttagtactttccaggaggaactactacatcataataatacttgtacttacggtgacatcccttttcttccgtttagtgatcacgggcgtcagttgcttctcctcgcgctccttaagcgccatctcagccgctgatcgcttgaccacctgtggcacgcaggtgtttcgctttctaccgcgctttttaggaactttggtcggatctactggcggttttataggttcggaacttgaactggtcatgtggctatgcctattccctttggcttcgcatgaattatttgtaatgccaggcatatgcgtttcctcggtgtcccaatccgtttgtgtagatgaatcgactttttggactccgcacgaacattgtttaccgtgattggagatagcgaccttatcgttattattgctctcgtttatcgcgtcgatcaccctttgggtaagggctttgtctgggattttcatgagtaatttgaagatgtcctcgtagacgggctggaaggacttgcgctggatgtaggtagaggcactatgtggcgctgagatggatatcactcgcagggaaccgactggtttgatcaccaaaacatccgaactactagcgacgactggttggatgtgctgggctttggtcaatagaaccttcttcatcgtggccgttttacaatgcactgctcgatctcgcaatatctaccagcgataaggccgtcagctagtgattgaattcgtgggacttccaagtttaggacgatcaaaaaaaaactaattggtttttccccacgacacgctgcacggaatggcaagtagcggcactcggacgctgctcaacactgctcctaaggatggttggtgagcagtcagacaagagcactgttattgctgatagctaatgtaatgtttgttttttaagaaaagagtagttttcgttaaaaaaaactttataattatgttatggtctagaacctagagtttttaatgcttaaaaatatatagccatctttcgttgcaaaatacataaatataaaagggccatctctagctttagagaattatcggcgtttcgctgcgaatggcacatcgagtattcttgagaaaaaagatacggtggtcctccataaggaaccgggataaaaatattaaggctaagttaccaaacagatcgtgaaggattccgcatcgaagctctattgccactggtgcctgcccagcgtctatgccaaagcaagtcggcaatggactcgagtagtcggcgcagtttttctggtggaagtgaaaacgagggtggacggggcagcgactactatagatccaggccggggtctcgatacagtcgatccaggtcgcgttcccggtaattctaccctaccagcgtaatgcgatcgtgtttattagtactgtgtacccttttcagtgagcgcaaccgcagccatggaggaatcaggcaccggaactctcgctctcgaagtcgggatcgggatcggtcgcccgtgttcagaaacgatcagcatcgcggtggtcgaggaggagctggtaacggggaccccgacctttaccacagcctgatcaacgacgactacagggatcaggatgagcgcaactacaactccaggagcaactttgagaatcgtcagttccggcgacatgatagcttcgaccgtcggcatcgggaccgagatggcgagagcgatcgggagctaaacgactacgagtacgaacagcgctcccgcgacttggactcacgtgatcgtagctccacggacagggactggtatcacaa

SEQ ID NO: 10598 - DNA, 1758 bp, DROSOPHILA
ggaaaaaccaattagtttttttttgatcgtcctaaacttggaagtcccacgaattcaatcactagctgacggccttatcgctggtagatattgcgagatcgagcagtgcattgtaaaacggccacgatgaagaaggttctattgaccaaagcccagcacatccaaccagtcgtcgctagtagttcggatgttttggtgatcaaaccagtcggttccctgcgagtgatatccatctcagcgccacatagtgcctctacctacatccagcgcaagtccttccagcccgtctacgaggacatcttcaaattactcatgaaaatcccagacaaagcccttacccaaagggtgatcgacgcgataaacgagagcaataataacgataaggtcgctatctccaatcacggtaaacaatgttcgtgcggagtccaaaaagtcgattcatctacacaaacggattgggacaccgaggaaacgcatatgcctggcattacaaataattcatgcgaagccaaagggaataggcatagccacatgaccagttcaagttccgaacctataaaaccgccagtagatccgaccaaagttcctaaaaagcgcggtagaaagcgaaacacctgcgtgccacaggtggtcaagcgatcagcggctgagatggcgcttaaggagcgcgaggagaagcaactgacgcccgtgatcactaaacggaagaaaagggatgtcacccaagcgcaaaacttcgaatcatatcagatcacgaataaaacccctgtacgccgaaactctaccttgtcggatatatcgttcaactccgatgagttgacccgggtggaaaactttataagcggaaacaccgaggaccgcattatacgcatcatggccaacgaattcagaaagtcgcacataatgtccgaagaaggattgctacccattcacgaggaaatactgcacggcgatgtttacggcgttaagcgtcagatatttgtgtgctgccacgcgaaaatggacatcaacgaactactcaccagggacggcgaggactgcctggaacttgcgctgacgaacgacacggacaccgagattgtatcgctcatcctggacgctcgcatgatgaccgaccacctctacgagaactcaaacacagctcttcatctggcggtgataaaccatataaatatagagtccattaggctgctgttgcgcagaatcgatttgaacagtcttctgctaaccaacgatgatggttatacagttttgcacctggcagtgcgcaataaccagttccttgttgtcgaggcaatccttgatagtatagacgagcgcgagctgggggaaacggtgtacaggagaaccctggaggcagcgaatccgaatgagtgggacgagaagggcttcgccaagtactacgatcgtgcctgcgaacggctggagctgaacaagacgttgctaaagaaccgtgcacataagcgggatgtcatcaatgcatccgaggcgaggggcggaaacccaccgcttttctacgccgtggaaggggagcagggtaggttgctgtctattagtatattagtagttgaagaagtccgattaagctttaaagtttcctatttgtacagaacacttgtgctacttcctgcttgcgcacttggccgatcccgacgaggagaacttaagcgggcattccccgaaatcgtatcactacgaatacgctcgcacgttgcgcatcaacctgaaagtggcgcgcgtcatggagaaagtaattag

SEQ ID NO: 10599 - protein, 543 aa, DROSOPHILA
MKKVLLTKAQHIQPVVASSSDVLVIKPVGSLRVISISAPHSASTYIQRKSFQPVYEDIFKLLMKIPDKALTQRVIDAINESNNNDKVAISNHGKQCSCGVQKVDSSTQTDWDTEETHMPGITNNSCEAKGNRHSHMTSSSSEPIKPPVDPTKVPKKRGRKRNTCVPQVVKRSAAEMALKEREEKQLTPVITKRKKRDVTQAQNFESYQITNKTPVRRNSTLSDISFNSDELTRVENFISGNTEDRIIRIMANEFRKSHIMSEEGLLPIHEEILHGDVYGVKRQIFVCCHAKMDINELLTRDGEDCLELALTNDTDTEIVSLILDARMMTDHLYENSNTALHLAVINHINIESIRLLLRRIDLNSLLLTNDDGYTVLHLAVRNNQFLVVEAILDSIDERELGETVYRRTLEAANPNEWDEKGFAKYYDRACERLELNKTLLKNRAHKRDVINASEARGGNPPLFYAVEGEQGRLLSISILVVEEVRLSFKVSYLYRTLVLLPACALGRSRRGELKRAFPEIVSLRIRSHVAHQPESGARHGESN

SEQ ID NO: 10600 - DNA, 3214 bp, DROSOPHILA
cgagagacaagataaacaactacaacaaacggaaacggaggcaaattacacactgggagaaaaggtttgaacggaagcaagttaaacaaaaaaaaaaataaacaaacattacattttacacattgatttagacttaagatcacgttataagatcatcacgagcgcaacagagatagcaaattgtctatatggtggacatataggataagtatgtgttctgtatatataagcaatatatatgtataaatattagggtggctcgacatgtttgcgttgcaaaatagttaaatagaacaatgtggaagagtcttctatgaataattctaaataatttcgctttggaaactttggatacaatttatcaattttttttatcttaatcaaaaaaaaaaaaaaaccacccaaactttttctttcctttgggaaggtccaaaatgtcagcttagaactataatttggagatttacaaaaaaaaaaaattacattcttttccttcgaataccagatattttaaaaccagctgataaatcactcacaactaattttcctaagaatctatgtttttaaagcgcattgcaaaaacctgttacataattacaatttcgtttgcccccataaagttttaatattttcctgatgcctttgcattatactgtctagtatagtgtccctgtggcttttacacgtataaatcattacgagcagctctaaaacgcaattagccctaaagtttttacagcgaaattagttagaattgttcataaatggatttttgcatcctacgcaaatcgattcaccctcttggatgtgttttgtgttgtgtgaatacggggataacgtatatatatatatacgtggtacagctatgaatctggattaaccgaatgctcagctccacatggctgcatcgtggacgcgacgcaggacattgcgttgctgatcctgttccagttcctcctgcacatttcgctcctcctcctcctcctgctgctgctgctgctgctgttgctggtgatgctccacttcctcctcctcctcatcctgatgacgcggatgcctcctccgtttccaatgacaatgaccatgacgatgatgatccaccacaacggcagcggctgctgcctgcactcaattgtaaatgaaattggccgcatcgcacagggcatcgctgtcatcatcaaatttgccgttcatggcataggaactagcgcccgtgccgtatacccattccttcttgatgaagtccccatcggtggtcgacgacgacgttgtgttgtgcagtccacctagtgaactatgatccagccgaaagtcatcgtcatcatccggatatagctgcacaggtatgctatccggtatggaatgcggttcaaacaaattaccatacggcggcagcgagtgattcagatcaacatgatgatcaactagatcactatcaaaattggagatacggaatttcgagcttggcggcgattgcggcgaatgcagggcagccgaatcctcaaacatgacctcctccttgatgaacatatcgttggagttgtcgccagagcccgaggaatacagatttggttccactttgataatggccgctgtggccagggacggtgacgatttctcatcgtcatcatcgtcatcgaaatgatgattgtgatgattatgatgatgactgtgatgatggtgatgctgttgcgtttgctgcgtatgcgtctgctgctgcggctgatcctcgtcgtcatcttcatcgtcatccatgtccgccaaatggcgacgtcggtggtgatttcggtggttgttgcgctgcgttacccgctgctgctgctgctgttgttgggctggttgctgctgctgctgctgctgttggtgattccttgtgctgcgtatgatagtggagcctccaagtgcagccgccgccgaggaagctatcgatagtggcacaccggtggctttggaaaccagcaccgtggatgaggagcaagaggtcgaggatgatgatggcgattgagctggcgaaataactgaaagagaaaaagggtttatattttgatacaatctgctagctagatttcaacaaatatcaacttagggtttaaacccaaaactactaaccacctgtttgctgcaccacactggtcagcgctgagccgccgctgccattgctgcttccggtcgaatgatgaatgatcggcgtctttcgtatcaactgcgagccattgctgagattgccgccggcgttggtggtgacaatgttggtactactgttgctgctgctattggtggaggaggtgttgccgctgccgttgctggtgcctgcaccgctctggatgacctgtgcatgcagcacgggcgttggatcggaggtatgttgctgctgctgctgctgctgctgctgctgctgggatccctgctgcatgtagttcttaatgacgatcgttcgtgttggtgccgaaacgagatattgctgctgcgactgctgctgctgctgctgttgctgatgcacatgctgctggtgcgacgacacttggtgctgcgaggctggcgaggatgaggtggaggagtgctggttcaggtgtagcgaggcattcgaggactccgatgagtcctcgccggtggtcaagcgattggtggttgcgttcacaatatgcgaggaggagttcataccgccgccgctgccatcctcctcgtccccgctcagtcccgactgatcgtctagttccatttggtggtgttgcgactgctgcaactgctgattgctactggtgcctggcctctcaatctcgtgcggcggctccagtttgacaattgttgtagtcgttgtggctgccgatacagctgccgatacgccgttgctgctggaattgctgctgctggaattgctactgttgctcgaattgctgctattgctggccttcgaggaggctgctccggcagcagtggcggctgcagcagctgctcccggctgatcccgcagatggacctgcatgtgcgtctgcagcgatgactgtgtgtgcagcttcttcttgcagatcttgcactcgaatgggaagtcacccgtgtgcgttctggcatgaattttcaggttgtagcgctgtccgaaacccttgccgcacacgtcgcatttgtgcagcttaacacccgaatgcagcttggaatggccgcgcaacgatgccagggcactgaacaccttgccacagatctcgcaggtcaggttcac

SEQ ID NO: 10601 - DNA, 1028 bp, DROSOPHILA
atggctcgcattatttcgccagctcaatcgccatcatcatcctcgacctcttgctcctcatccacggtgctggtttccaaagccaccggtgtgccactatcgatagcttcctcggcggcggctgcacttggaggctccactatcatacgcagcacaaggaatcaccaacagcagcagcagcagcagcaaccagcccaacaacagcagcagcagcagcgggtaacgcagcgcaacaaccaccgaaatcaccaccgacgtcgccatttggcggacatggatgacgatgaagatgacgacgaggatcagccgcagcagcagacgcatacgcagcaaacgcaacagcatcaccatcatcacagtcatcatcataatcatcacaatcatcatttcgatgacgatgatgacgatgagaaatcgtcaccgtccctggccacagcggccattatcaaagtggaaccaaatctgtattcctcgggctctggcgacaactccaacgatatgttcatcaaggaggaggtcatgtttgaggattcggctgccctgcattcgccgcaatcgccgccaagctcgaaattccgtatctccaattttgatagtgatctagttgatcatcatgttgatctgaatcactcgctgccgccgtatggtaatttgtttgaaccgcattccataccggatagcatacctgtgcagctatatccggatgatgacgatgactttcggctggatcatagttcactaggtggactgcacaacacaacgtcgtcgtcgaccaccgatggggacttcatcaagaaggaatgggtatacggcacgggcgctagttcctatgccatgaacggcaaatttgatgatgacagcgatgccctgtgcgatgcggccaatttcatttacaattgagtgcaggcagcagccgctgccgttgtggtggatcatcatcgtcatggtcattgtcattggaaacggaggaggcatccgcgtcatcaggatgaggaggaggaggaagtggagcatcaccagcaacagca

SEQ ID NO: 10602 - protein, 299 aa, DROSOPHILA
MARIISPAQSPSSSSTSCSSSTVLVSKATGVPLSIASSAAAALGGSTIIRSTRNHQQQQQQQQPAQQQQQQQRVTQRNNHRNHHRRRHLADMDDDEDDDEDQPQQQTHTQQTQQHHHHHSHHHNHHNHHFDDDDDDEKSSPSLATAAIIKVEPNLYSSGSGDNSNDMFIKEEVMFEDSAALHSPQSPPSSKFRISNFDSDLVDHHVDLNHSLPPYGNLFEPHSIPDSIPVQLYPDDDDDFRLDHSSLGGLHNTTSSSTTDGDFIKKEWVYGTGASSYAMNGKFDDDSDALCDAANFIYN

SEQ ID NO: 10603 - DNA, 5411 bp, DROSOPHILA
tcagtgccgaccagttgcggtcccactaaagtggaaatttgatttaatttttggggatttcatggaaaatctctacttatttctatttccacgttacttaggccaatagccagcggaaaatggtctacgtgaatctaataataggcttgggcctggtgtccgttgccgctttcgcctatttcaattggcataacgaccgcagttcgccttactccaggtgggtgctattaaatgagcgtcgaatcgtgggcaggttggtgccttgcgattcaaagctaaaatgttggcttaaatcccttgtttcattgcaggtcgccgaatggcaggtgcaccttttgccagtatgaactgagtgatgacgaccggcgccgcatgaggtgtggacatgccatgcacaatctctgctacttggtgtttcgctattcccatagaaagtgcctcgagtgcgataaggtggttaatgtcaatatagccggtgacttgtgcacgatttgtttagatcccctaagtgtttacaccatggtgtatctgcgctgcagccacgccttgcatgagaagtgcctccaccagtaccaggctaatggtggccgccactgtccggtctgcagaatgggaattaaggagtaggtatcacctagtgatcatgcagccaggcaaagccatatatcagcataagcgtgcacttaatgcaaggctcaacgaattttatatataacattaagtcgagagcaaagaagtctgattaagattttagttctgaaacgaataaaagttagatttcttaaaagatgccgatttcaaccaaattgttgtttaaaatgaaagaaaagtattggatgcgtctatgctttttcaaaaaaaaaaaaaataatacaattttatatttttgttttgaattgttcaaatatcgtttagccagtgtgtacacaccacgcacatgcacttagtaaacagacaacagctgatgtgcatcttcattatctcgcttgccattcacttgaatgtaatgcatcacaataatgttgagttttaaaaaacctttttaaatatcgtttggtttgctcaaaatgtctgagttgcgatcgatttgccgaacttgtggcaaaaatgtgaccaatttgcagggtcgggctaccaaactgttcaacaaaagcaactatcactttattagtatactggaaaatatcaccgatatgtatgtatgtaagtgaataaaactaaagtatgctgtctatttaattgatttaaatgattgtttagctcgaatttgacaccactctgccacatctaatttgccaatgttgcaaagtgcagctggacaggatcttaacatttcgcaataagtgcttggaggtccacaagtcttttatggccgctaacaggaaacttttgcgaaaaaaggcgatagttgatgaggaactcgataaaccggatgttgagaagctacagcaggatttgtgggaccacacggatcaggaaatgtgtgtagcaatggcagatacagctgggcttctgcgggaagatcacaatgataatgagaaggcgaaggacgcagaagatgcgactcagaatgagaagaatcaggaggaacaagtacaagtacaaacagaggaggtggagcactgtcaagagcagctccataacatgtccatcatctcgaagggagtaagtgcccgtgtccccaagcgtacgaagcgcaactccaagtcctggttctgtgaccagtgcggcggcgtcttcaagtcctctacctacctcaaactgcacctgcagcgacacagcggtcacaaaccgttcgcgtgcgacatctgccaggccaagtactacacggataacgagatgcggcgccacagaatccttcacacggacgccagaccgtacgcttgtcggttctgtagcaagacctaccgaggatgcagcagtaaagtggtccacgagcggacccacaccaacgagcgtccctttcagtgccagcattgcgacaaggccttcacctccacgtcgacgcgtcaaaaacatgagatgctgcacactaatcagcggaagtaccagtaagtaggagcactagctgtcctccgtaaaatatgtgcaaactgactgtattttccagctgcgagatctgtgaccagtggttcctgcgctcatcccatttgaccctacatcaaagcactaaattacaccagcgaagagctgaaagtgctaggattgtctagaattcatgtggactgctgaaagtacaagtttattataagattcctaaattgaacaaattgattctatttttgatttgatggttctaaaagaagaaataatcaaaatgtacacctgtgacatcaaaggttttcgacttttcgctctgcagatacaatggtttatttcttgaaaaaaacttgtaacaacaaattgagattttgaaaatcggcggaatggccgcgttgctgggcgaatgtcaattcgaaatcgactatgcgtggggctgagaaatgcgaatgccgcttttcttgttcttccgtccaaacaaaccgaaaaagatacacttccaatcgatcggggtgctgcgttatctcattacacaagccatgaggtacatttgcaggacctgttctcgtatggctgatcctgcggtagccaagaatctcttcgatccatcgagttcttccgttttgcgtcaaatagagactctaactaacttgcaggtgagtgcgttagcgttttgcgaaaataaaaaccgaataaatgccgcgatctgtaatcactttgcagctaaaagaggacggcaagttgcccaggttcatgtgccaggactgccagcacgacctgcagattgccatcgatttccgccgcgtttgcatcgaggcccaggagctccttgaacttcagctaaggcaggtggaaaaggaggaggaggcgttcgagagcctggcggagcaatggctggatgattgtccggatgagttgtccaacttgtcgccagtgctacagctgaatgatcgcatggattttatcttcgatcccgagccacaggataagaatacggatgagttggcttccataaagaccacgacaacaacagagtatatgaatgcataccagtcagtggccagtccgcaatcttctccagaactttcaacagatagccagttgtcgaatgagcactttgacatgggcctctctcccgaatcagaacccgaaagtgaagctatcgataatcgggacacttcctccagccacacgtgcagcaagtgtggcctcgaattcgaaaacgtggacgaactgaagctgcacaaataccatctgcacgacatcccgccagataccaagtaaataatcatattttagaggcatgcttgcatgattttcccatattattcgttcgaaacttgtagaaatcctaaaagatctgaagacgttccgtcagggcacaaaatatgtttagtttacattgctaaattggctattagctagctctcacattcattccgtattaattgtcttttgttttaatttttatttaattttagaacgattttccattttatacgtgctgctctgattggaattaaggaatcctttaaaccctatcactgaatgactagaacaacttattcacagtatgagagaacctaccaatcaattgccacaattaacactttaattatccttgtagattcgtctgtgaccactgtgacgagggcttccgatcagcagccgcacttacgcggcactgcaacatgattaatcttccattgacggtaatgattccatctaaaatgttcaatacctttcataaaggattgtattttgaaacattttttttgcagcactcctgcaccaagtgcaagagccaattccacaatcacattctgctggagactcacaaacagcggtgtctcaggccgccggcgtcccagcatgtgtgccacatatgtggcaagcatctgaccacggcctttaatctgaagaatcacctggttcgccacgcgggcacacgacgccacaaatgcgaccagtgcagcgcatccttttatacagccgccgaactctgttcccatcagaaaacccacacaaccgagcgtccctacatctgtcgctacaactgtggcaaaacctttcgcttttgcagcgcccgcagcatgcatgaaaggtagaatttcagacgaatctccaccgtcacttagcccaccatccccacttacgtgacccttccaatatattccgcagggttcacatggacgccagcaagcgtatctaccagtgcgagtactgccccaagtcgtatgtaacacccagcgagtgcaggacacatcaaaagtatcacaacttgactcgcgatcacgggtacgacttcctcccagttcttaagtatttgcagagaatgcaaattagaaggatttccattattcgcaactaaataacgaatctatcttgcatgtcaaacgtattttttgttttatatgcaaaaaacgattgtgtgcctatatattcctataaaatatcagcagtactctgttgaatatgatatgctgcagttcaatgtaatcaaattacttttttgaagcctcatgctaatgagtaaaacatttttttcacccccaatctcttccagctgcgaaatctgccgcataagcttcaagacagccaaacactacagatcccatctgaagtccaatgcccacaaaactctggaggcgcgtgctaaagctgctgcatcccccaattcccgtggaagaaattgttcaacgaattgaattcattattgccagttgcatgttaattatatataccgaattgatattaataaagcttccgttccgcgttcatgtttaagatcccagcatctactatcacctacatcgtctgtgtgttctcgatgaccttctcgttgtcgtagatctccttggcgtagcacagattggggtagtcgtaggcagctccatatcggttcttgcagccggtggttgccttctctcccggagtgtagacaggctgacccacaatgttcgatgtggcgaagttgcaggtgagtacgaagtggttgtaaaagtcccgggagaagcgcacggccgcacatcccacatgggtgttcttctcggccaccgcgatggtgaacttggtcaccgccttgttgggaagctcctccgggaagctggcgaggatctcgggagatgcattcgagcgctcagcaaaccagttctcgatctgctcctttattatttccgcatcggtgtactctgtctcggctccgctgtactggaacaaggcgttgttctggccggcgtaggcgaatctctcggtgctgcgacatttatctggcagggactcacaggtctttacgttcagcaaggccagatgggagagctcctcgcaccaggacatcttggccatgcgaacagccttgggtagtccttcta

SEQ ID NO: 10604 - DNA, 1588 bp, DROSOPHILA
aatgtaatgcatcacaataatgttgagttttaaaaaacctttttaaatatcgtttggtttgctcaaaatgtctgagttgcgatcgatttgccgaacttgtggcaaaaatgtgaccaatttgcagggtcgggctaccaaactgttcaacaaaagcaactatcactttattagtatactggaaaatatcaccgatatgtatctcgaatttgacaccactctgccacatctaatttgccaatgttgcaaagtgcagctggacaggatcttaacatttcgcaataagtgcttggaggtccacaagtcttttatggccgctaacaggaaacttttgcgaaaaaaggcgatagttgatgaggaactcgataaaccggatgttgagaagctacagcaggatttgtgggaccacacggatcaggaaatgtgtgtagcaatggcagatacagctgggcttctgcgggaagatcacaatgataatgagaaggcgaaggacgcagaagatgcgactcagaatgagaagaatcaggaggaacaagtacaagtacaaacagaggaggtggagcactgtcaagagcagctccataacatgtccatcatctcgaagggagtaagtgcccgtgtccccaagcgtacgaagcgcaactccaagtcctggttctgtgaccagtgcggcggcgtcttcaagtcctctacctacctcaaactgcacctgcagcgacacagcggtcacaaaccgttcgcgtgcgacatctgccaggccaagtactacacggataacgagatgcggcgccacagaatccttcacacggacgccagaccgtacgcttgtcggttctgtagcaagacctaccgaggatgcagcagtaaagtggtccacgagcggacccacaccaacgagcgtccctttcagtgccagcattgcgacaaggccttcacctccacgtcgacgcgtcaaaaacatgagatgctgcacactaatcagcggaagtaccaattcgtctgtgaccactgtgacgagggcttccgatcagcagccgcacttacgcggcactgcaacatgattaatcttccattgacgcactcctgcaccaagtgcaagagccaattccacaatcacattctgctggagactcacaaacagcggtgtctcaggccgccggcgtcccagcatgtgtgccacatatgtggcaagcatctgaccacggcctttaatctgaagaatcacctggttcgccacgcgggcacacgacgccacaaatgcgaccagtgcagcgcatccttttatacagccgccgaactctgttcccatcagaaaacccacacaaccgagcgtccctacatctgtcgctacaactgtggcaaaacctttcgcttttgcagcgcccgcagcatgcatgaaagggttcacatggacgccagcaagcgtatctaccagtgcgagtactgccccaagtcgtatgtaacacccagcgagtgcaggacacatcaaaagtatcacaacttgactcgcgatcacgggtacgacttcctcccagttcttaagtatttgcagagaatgcaaattagaaggatttccattattcgcaactaa

SEQ ID NO: 10605 - protein, 506 aa, DROSOPHILA
MSELRSICRTCGKNVTNLQGRATKLFNKSNYHFISILENITDMYLEFDTTLPHLICQCCKVQLDRILTFRNKCLEVHKSFMAANRKLLRKKAIVDEELDKPDVEKLQQDLWDHTDQEMCVAMADTAGLLREDHNDNEKAKDAEDATQNEKNQEEQVQVQTEEVEHCQEQLHNMSIISKGVSARVPKRTKRNSKSWFCDQCGGVFKSSTYLKLHLQRHSGHKPFACDICQAKYYTDNEMRRHRILHTDARPYACRFCSKTYRGCSSKVVHERTHTNERPFQCQHCDKAFTSTSTRQKHEMLHTNQRKYQFVCDHCDEGFRSAAALTRHCNMINLPLTHSCTKCKSQFHNHILLETHKQRCLRPPASQHVCHICGKHLTTAFNLKNHLVRHAGTRRHKCDQCSASFYTAAELCSHQKTHTTERPYICRYNCGKTFRFCSARSMHERVHMDASKRIYQCEYCPKSYVTPSECRTHQKYHNLTRDHGYDFLPVLKYLQRMQIRRISIIRN

SEQ ID NO: 10606 - DNA, 7422 bp, DROSOPHILA
atctcatctcatatgaaagcaatatcatatatgtatgttaatattaaatagatattaaacataaaaatccatcccacccacattccgctgaaaaatgaaaacactcgcttttgccgaagtggaattttattgtaattaaatttgttgggtgtacaaaggtatgttttaaggactttctctctgcatttattacaatttcttcaaatggttttaattgctgggcttttgcttcgaagacgggcaatcaagtttcaagaatcctattttctttaatcatacaaattatgttttatttcgctttaatatataaggatacatatatatatctgctatatatagaagtgtgttgacttgcgtatatttcgtgaaaagtaaaagttttcttcttcgcaatttcccttgaactaacattccaattcgggttttggttatgttttttttttctgttttactctcattattttgtttgtttgttttttttaaataattttgcattttctgcatacatgtggttttgtgttttgcaattttttcaatgatttttccttgggtttttatttgtttttagttttcgatttgtttaataaaaaaatatgtatttcactgcccagagcgaaagccatttcttacttccgcttgcgttaatatatcattttatgtatgtatggtgtaaaaacatcatttactggtaaaactctcgatatcctttgtaacagaaatcggaacgcaaatgaaatcgaggcgacttaccagctccttctcattaaatacatatatgttcttgcaaatgtttataaatgtatgcatgtttttccttctctcggataatagtgtaatcataaaaatcctgtctgcttttttgttgtttattaatatgcttcataagttgtttacgctttagcgcttttcatgtgtttcttgtatttctcatatatgttgtggttgtttaatatgtgtgttgctgtgtgtgtgtttttgtgtttatatatattattttttttttgctgtttttacataggttttgccatttttttgtagttttttcgatttatgttttgttttcatttgtcaacatattttttcagctgttggtattctgtattttctctcttttttcaaagtagcaaaaacttgactctcatattcttgcggttttctttttctttctttctttctattcttctgttctctgcacagtttgctttccattttttcgtttttattttaactcttttgcaatttttttgttttttctttgcttttttaaaagtgtatggttgtcgcgtttctttttctaaacaaagctttcttaaagtttgaatttgagaaaaaagaattgaaaaaaattacatatcgctttcgtgtttgttgttgtttgaaagtgtggatggaaaaagtgtacgaaaaactcaatatgtatgtaacactagaaacttctttaaaatttttaaaacacaatttcaatacttgcaagaagcggtttacatgtatgctttgctttaatctgtttattttgcaatggttttttggtgttttcattatacgcatacaaaataatatcgatccagttaaagcaataacgaaatttttttcatttcacatttttccgtttttttttttaattaacatgtttatgtaaaaaaaaagaatttataagtggactgcagaatttgattgcgtgactttcttcttttgcttcgtgtacttgcgtaaatgcgttcgaaattaaatgattgaaattgcttttgttgatgtttctgggattagaaaagaaaaagccgtagatttttcgctttgtttttctgtgttaattgtgtgtccttggcaatcctcccctgcgcaaagcatcagtgaatgcgaatttttgttgttcatgtattgaaagattagtggaaaactgcaaggacaaaagagaggcgagtttagacagcttgaacttttcggaaaatttgtagactacttactttttgggtgtaaagtgttcttgtaaaatgttcatacgcttgagctgttcgagcttagttggcgggctcggtgacgcggtgcacctgaagcacggccacagcctcctccaccttggccttaagggcctcctgatcctcgatcatgtgcaagagctcagagttttcgatctccaacaacatgccggtgatcttaccagccaaattggcgtgcatatgctcaatcatcggatacagacgctcgcccaggatctgtttctgctcctgcggcttggcgttggccagcaacgaggcaatgagcttctcagaatctgcaagaaaaatagcaatggtgccattagtgacaaattgtgcatattttcagtcgacctaaaacttactctttccttgcaattgctgtggaattggctgggtctgatgcaactgtggcactggaggattgcgcatgtttgaggtgtacttatagttggaagtacgctgctgggcaccgccagcgatttgggctccggggatctgcatgttgggtgctgcagtttgctggccagtaatagcgcgtgctccagtgttgcgcatgttgttagccgcagcagcggcggcatgtgtgccctgcacctgaggctgtgccccgcgagcgccagcagcagccgaacggaactgagtgggcaccgcaccggctgtgccctggaagccaccagcagcggcagctccggcctggacaccctgtatggctgctgggggacgcacctggggcacccagcggggtgtgtttctcatctgagtggccacctgggaaccgaagaaacgctgatttgacggaagggtcggcacaaagaagccgctagccgcgttgggctggtagatctgtcccagctgctgcatacgcatgccggtcatgtgacgcatgtactgcgaggcgagatgagccttgcgctcctccttcctttgggccaaagcaacgtacaacggcttactgccgacgacgcgaccgttcagctcggtgacggcgcaggtagcctcgcttgcggcattgaagcacacgaagccgaatcccttggagcgaccctcctcatcggtcatgaccttggccgatgtgatgttgccgtatggagagaacgcgatgcgcagacgatcgtcatcgattgtgtcgtccaggttcttaacgtacaagttaacgccgaacacagactcgtgacgcttctgcttcagttcctcgaacttgcgcttcagctcctgctggcgttcggccttcttctgggcacgagccacgtacagggacttgccctctcccatgtccttgccattgagagcctgaacggccgcctcagcagcctctgttgtctcgaatgcaacgaatccgaagcccttgctcttgccatcctccttggacatgaccttgtagctggttatcttgccgtagggctcaaagaattccttcagtttttcatcgtcgaaatcctcagtgaagttcttcacatatacattggtgaagagcttagccttctcgcccagctccttctcgcgctccttgcgcgggatgaacttacccacgtagaccttcttgccgttgagcaacatgccattgactttgtcgatggacgtgtttgcggcctcctcggtctcgaagtggacgaatccatagccctttgagttgcccttttcatcggtggctaccttgcagcttaaaatgttgccgaaggcggagaaagtgtcgtagattgccttgttgtcgatggccctatctaagttcttgatgaacacgttgcccacacctgagcgacgaagagaaggatcacgctgagaccacataatgcgaatgggcttgttgcgaaccaggtcaaagttcatggtgtccaaagcacgctcagctgttgatgaaaatcgggaaaacatttggttactaccgacacgatttgggtatatcaagatcattataagttgaaggggcttaaataacaatgtgactcttcaacttctgcactggccatgagcaaaagcagcgcagtgcatggtaagtcaagtctgatcttttatctggcaactatgaatcttagtcgtgtcaaaaagggttgaatctgaccaaccaatgggtaggagttgctagatgtctaaatacaaggacaatcttatcagtctaatcatgtgatacattgagtgtttgttatgcagatggtatgcaaaacccatcagcatggtaagtcgcattgctttctctggcaactatgaatcttagtcgtgtcaaaatgggttaaatctgaccaaccaatgggtagaagttgctagaagcttagataagaaagggcataatccttcgagtctaatcatatgatgtattatttagtgtttgttatgcttctacttctgtggatggcatagatcagccatctacatggtaagttgcattgctttctctggcaacattgaatcttagtcgtgtcaaaaagagataaatctgaccaaccaatgggtaggagttgcgagatatgaatcgaaaaaagaaaaacatttagggtgttactagtctagaacgagatggtatcatttttgaaaggtctgtttttccaacctaaccttaacagctagagttcaagaaacttgctggaatgcgacagactttcacacgcagcgtaatcatcaccaaccgccagctttgtgccattgtgcgcttaattgaataaacaaatgtaagcgaacaacgggaatcgaagaagcaccaactatgcgcagtgaaagttttgttttcgttttttgtaaaaacaagattttgatggttaaaagagaggccgaaaagcagttcactgacatgtcaagaatttggaagtgttgatggatggaatgcggagagtatggaagatatgagaaagtgaaagcaaaacaaaagttggaggcagtacgaaaactaaagagcgaacgtgcggaaactcagttaatggaatataacctaaaatagatgaaggccaaaaagaaatggtccaaacaacaatgaacacatgtttttgcgcgtcggcgtgtgcgtgcgcgcaagtttgccgcttggaaacaacacacatcacacgaataaaacgagaagaacgggcaaggaaacaatgaaaccaccaatgggcggggctgcgataagcagtttgggcagtatggaaccatattattccatcataattgcaattttgtgcgaaattgagacggaaatttctaggcgaacagttgatgagtgccacgagccagctgtttagcccccatcatccccccgcacaaatcgtatacatccagaataactggaactgatataatcatgtgtgtgtgtgtacacactggcgggaattgagtgcgtgtgtgtgtgcgcgacgagattaacgtaagcagtgcactgtggaacaagttatgaaacacttggaagccgtttatctggtctcctatgaaagacatctttcaataaagtccagtttggacttgcgtttagccccactgtatgacatgcgctagtgtgcgtgcgtgtgtgagtaagcgagtgcaaaactgcacacgtgttttctttgtttcgcgcggaagggggctacttttgcgggcagtaagactaaaaaaattacactacttttgcggggattactcaccatcggctggctgctggaagttgacgtaggcatagcccaacgagcgacgggtaatcacatcgcggcagacacgaatggacagcactggaccagcagacgagaacttgtcaaaaagtcccgattcgttgacgtcctgtgggagatcaccgacgtatagagaagccatatttggtgatcaggtctacctgcaatttttaacaattaatttccacttttttgacactgaattttgggttttttcttaatctttacggaccggatggattcgaccaggcaggcggtgaaatagaaagaaaaaaagcggcgtggctttcggtcttctattcgtctctctgtctgtgtgtctgggtggcaacactggtacatgtgacagtcggtagacatggcaacgttggcatttgctttgttgttgctctttgctctccccttttatttctcttcgtgttggaaaatttccacacagacacaaagatagacacgcgtttgcctgatcgaattttggggaattctttgattttctcgaaaatatgcgacaactagttcctagaccactattttgcgggcaatctggcgtttatagacgccatctttgagcgaagaacgaccgcaaacaaagcaaatttcgatgggaaaggaaaatttccctattcgctttgtcgtgcgttgcgccctctcactctctacaccattgtaaccaatagctttacactgtacttacttctcaaacacgctcgattttttttgctactttttacaattttttttgttacgtttttgtgttttaatatttttttttattttttatatgttttttcttcacaaaaaatatgtgataagccgtgtgctgaaagcgaatccacgaccgctcacgtaaacggactctacacgactcatagagaggagattcgttagcgatgaccccacaaagtatcgattaaatcccactgcacaatgctgccacatagggttagagacaaataaatgtcactaaaaaatccgtgaggacaatttactaattacgaagcattattttgaatttcaaaaaagccagccatcacacataaaaaatttttatatttagctaattcccgaaacatgaaatacttgtgcattttcaggggttctttggtaactctgcttcatttatgttctgatattttcgccaatgtccttgaatactttgtctcataaaacacaatccaaaattaggaatgcagtttttttttcttttaaaaatgagcgtagacttttagaaaatgattttttggcactgcacagatattagcgtatgctccgaaaaccgaatcccatctttgtaattccccactgtgcgaacttacctaaatcagagaataaagcgatgaggctgcaagtcgacactccgagaagtgcttgagtacttcttttcgttctcgatggaaatcggcactacagagattgaagaattttttaagttttttttttgtgtttttgtttttacgaaatagaccacattcaaggatggctgaggataattttttttttctttttcccgttttgaacgtctggtgcatgtgccctatctggcgatcgagtacctaatgaagcggtgtgaggcgtcggtgcctgacaagcttcaaagcgaagtgtcactttgggcgcctactggcgtgtcctgagtaaaatcttaaaagatttgacatttcggaaacatttatttgggcattatatacttcattaaacatatttcgatctggtttggccaaacatttacttggcttgagaattagtttgctttcaactcaattttgatttttcgtagcatttaatagttaaacataaaacgtactggcttaattcattattgtgtagttttg

SEQ ID NO: 10607 - DNA, 3475 bp, DROSOPHILA
attcgctttcagcacacggcttatcacatattttttgtgaagaaaaaacatataaaaaataaaaaaaaatattaaaacacaaaaacgtaacaaaaaaaattgtaaaaagtagcaaaaaaaatcgagcgtgtttgagaagtaagtacagtgtaaagctattggttacaatggtgtagagagtgagagggcgcaacgcacgacaaagcgaatagggaaattttcctttcccatcgaaatttgctttgtttgcggtcgttcttcgctcaaagatggcgtctataaacgccagattgcccgcaaaatagtggtctaggaactagttgtcgcatattttcgagaaaatcaaagaattccccaaaattcgatcaggcaaacgcgtgtctatctttgtgtctgtgtggaaattttccaacacgaagagaaataaaaggggagagcaaagagcaacaacaaagcaaatgccaacgttgccatgtctaccgactgtcacatgtaccagtgttgccacccagacacacagacagagagacgaatagaagaccgaaagccacgccgctttttttctttctatttcaccgcctgcctggtcgaatccatccggtagacctgatcaccaaatatggcttctctatacgtcggtgatctcccacaggacgtcaacgaatcgggactttttgacaagttctcgtctgctggtccagtgctgtccattcgtgtctgccgcgatgtgattacccgtcgctcgttgggctatgcctacgtcaacttccagcagccagccgatgctgagcgtgctttggacaccatgaactttgacctggttcgcaacaagcccattcgcattatgtggtctcagcgtgatccttctcttcgtcgctcaggtgtgggcaacgtgttcatcaagaacttagatagggccatcgacaacaaggcaatctacgacactttctccgccttcggcaacattttaagctgcaaggtagccaccgatgaaaagggcaactcaaagggctatggattcgtccacttcgagaccgaggaggccgcaaacacgtccatcgacaaagtcaatggcatgttgctcaacggcaagaaggtctacgtgggtaagttcatcccgcgcaaggagcgcgagaaggagctgggcgagaaggctaagctcttcaccaatgtatatgtgaagaacttcactgaggatttcgacgatgaaaaactgaaggaattctttgagccctacggcaagataaccagctacaaggtcatgtccaaggaggatggcaagagcaagggcttcggattcgttgcattcgagacaacagaggctgctgaggcggccgttcaggctctcaatggcaaggacatgggagagggcaagtccctgtacgtggctcgtgcccagaagaaggccgaacgccagcaggagctgaagcgcaagttcgaggaactgaagcagaagcgtcacgagtctgtgttcggcgttaacttgtacgttaagaacctggacgacacaatcgatgacgatcgtctgcgcatcgcgttctctccatacggcaacatcacatcggccaaggtcatgaccgatgaggagggtcgctccaagggattcggcttcgtgtgcttcaatgccgcaagcgaggctacctgcgccgtcaccgagctgaacggtcgcgtcgtcggcagtaagccgttgtacgttgctttggcccaaaggaaggaggagcgcaaggctcatctcgcctcgcagtacatgcgtcacatgaccggcatgcgtatgcagcagctgggacagatctaccagcccaacgcggctagcggcttctttgtgccgacccttccgtcaaatcagcgtttcttcggttcccaggtggccactcagatgagaaacacaccccgctgggtgccccaggtgcgtcccccagcagccatacagggtgtccaggccggagctgccgctgctggtggcttccagggcacagccggtgcggtgcccactcagttccgttcggctgctgctggcgctcgcggggcacagcctcaggtgcagggcacacatgccgccgctgctgcggctaacaacatgcgcaacactggagcacgcgctattactggccagcaaactgcagcacccaacatgcagatccccggagcccaaatcgctggcggtgcccagcagcgtacttccaactataagtacacctcaaacatgcgcaatcctccagtgccacagttgcatcagacccagccaattccacagcaattgcaaggaaagaattctgagaagctcattgcctcgttgctggccaacgccaagccgcaggagcagaaacagatcctgggcgagcgtctgtatccgatgattgagcatatgcacgccaatttggctggtaagatcaccggcatgttgttggagatcgaaaactctgagctcttgcacatgatcgaggatcaggaggcccttaaggccaaggtggaggaggctgtggccgtgcttcaggtgcaccgcgtcaccgagcccgccaactaagctcgaacagctcaagcgtatgaacattttacaagaacactttacacccaaaaattttccactaatctttcaatacatgaacaacaaaaattcgcattcactgatgctttgcgcaggggaggattgccaaggacacacaattaacacagaaaaacaaagcgaaaaatctacggctttttcttttctaatcccagaaacatcaacaaaagcaatttcaatcatttaatttcgaacgcatttacgcaagtacacgaagcaaaagaagaaagtcacgcaatcaaattctgcagtccacttataaattctttttttttacataaacatgttaattaaaaaaaaaaacggaaaaatgtgaaatgaaaaaaatttcgttattgctttaactggatcgatattattttgtatgcgtataatgaaaacaccaaaaaaccattgcaaaataaacagattaaagcaaagcatacatgtaaaccgcttcttgcaagtattgaaattgtgttttaaaaattttaaagaagtttctagtgttacatacatattgagtttttcgtacactttttccatccacactttcaaacaacaacaaacacgaaagcgatatgtaatttttttcaattcttttttctcaaattcaaactttaagaaagctttgtttagaaaaagaaacgcgacaaccatacacttttaaaaaagcaaagaaaaaacaaaaaaattgcaaaagagttaaaataaaaacgaaaaaatggaaagcaaactgtgcagagaacagaagaatagaaagaaagaaagaaaaagaaaaccgcaagaatatgagagtcaagtttttgctactttgaaaaaagagagaaaatacagaataccaacagctgaaaaaatatgttgacaaatgaaaacaaaacataaatcgaaaaaactacaaaaaaatggcaaaacctatgtaaaaacagcaaa

SEQ ID NO: 10608 - protein, 634 aa, DROSOPHILA
MASLYVGDLPQDVNESGLFDKFSSAGPVLSIRVCRDVITRRSLGYAYVNFQQPADAERALDTMNFDLVRNKPIRIMWSQRDPSLRRSGVGNVFIKNLDRAIDNKAIYDTFSAFGNILSCKVATDEKGNSKGYGFVHFETEEAANTSIDKVNGMLLNGKKVYVGKFIPRKEREKELGEKAKLFTNVYVKNFTEDFDDEKLKEFFEPYGKITSYKVMSKEDGKSKGFGFVAFETTEAAEAAVQALNGKDMGEGKSLYVARAQKKAERQQELKRKFEELKQKRHESVFGVNLYVKNLDDTIDDDRLRIAFSPYGNITSAKVMTDEEGRSKGFGFVCFNAASEATCAVTELNGRVVGSKPLYVALAQRKEERKAHLASQYMRHMTGMRMQQLGQIYQPNAASGFFVPTLPSNQRFFGSQVATQMRNTPRWVPQVRPPAAIQGVQAGAAAAGGFQGTAGAVPTQFRSAAAGARGAQPQVQGTHAAAAAANNMRNTGARAITGQQTAAPNMQIPGAQIAGGAQQRTSNYKYTSNMRNPPVPQLHQTQPIPQQLQGKNSEKLIASLLANAKPQEQKQILGERLYPMIEHMHANLAGKITGMLLEIENSELLHMIEDQEALKAKVEEAVAVLQVHRVTEPAN

SEQ ID NO: 10609 - DNA, 19867 bp, DROSOPHILA
atcctttgttaatcatgttgctatttttcaaatttatattcaaaaaaaaagtattgaacattataaaattgtgaacttcccttctcaaaatattttaaaatgtgagaaagtaatcaagctttgtctaaaaactcccttttttctactacctttttaactcatttaatccgctcatagaatatactcccatttatcatactctttctactccggttttttggcctcttaagaacgcttgctctccctccgctctcttgtttaaacaaatacaaatcaaaaccgaaagcaagagcaaagtgcaataacgaaaaccacaagcaaagagtgttgtacaattgcagtttttgttttgctttagcgttcgctaggcagcgcagtcggatatactgcctcttcgctacttctgatgagttttcttcttcttctgaatttacctgctcgacaagatctttgtgtacccacacatacacgcgtacacagcctgcccacacactcttagttgaaacgagaaagaacgttttgtaagagtaccaactgagacatacccttcacattgtttgtgcatctaaatatgtactttatgttgtaagtaaatatgagttataaaatagtgttacttcagcaattagtgcgctggtacaatatttcagttttttcagtatgcgaaagccaatcaattaaatttttacaaccttaaaatctagatatgttaactatgctccttgatgcatttatgtagacgcaattcatggtccgagtatactcttcctcactcagctattacagggtaggtaaagagcgggattttttaaaatattttttttctctcaagtgtgcctccttcatgcacgtgcatgtgcaggagagggagcgagagagattgcgattgcactggctgcgcgcctacgctgccgctctgccgacgtcgcggtagaggctctgttgccgtagtttgaggccccagtgcgaacagttcatttttagccgcggagccagtaagacgtgtttcctgccctctttctttgagtctgcgacacgttttaagtgctcttccataattgacaacagcaaaagcaaagaataaaaaaataacaaaaaataaaaaacgaaatccatcgtgaacagttttgtgtttttaaatcagttctaaacacgaaaagggttgatgaaaaacgcagaagaatccgaaaaactaactaaccgagcaaaaacttgacttgagtgttgtttgacaaatcaggaaagataaaaaacaaatcataagaaaaaactgcacgaaaaatgaaaaagtttctaatattcaaaatcttgcacaagaaatacaaaatcaattaaagtgaactctaaccaaaagttgtacacaaaataaaaagcaaaacaaagcagcgaagaacaatcacaagaagagcaaagtgccaacaaagtgcaggaaggaaggaagcggataaggacaaaaaggaagccagcacacacacacacccacacaatggccgtgcccttttatttgcccgagggcggcgccgatgacgtagcgtcgagttcatcgggagcctcgggcaactcctccccccacaaccacccacttccctcgagcgcatcctcgtccgtctcctcctcgggcgtgtcctcggcctccgcctcctcggcctcatcttcgtcctccgcatcgtcggacggcgccagcagcgccgcctcgcaatcgccgaacaccaccacctcgtcggccacgcagacgccgatgcagtctccactgcccaccgaccaagtgctatacgccctctacgagtgggtcaggatgtaccagagccagcagagtggtaagtctacaaagatctcaattctccactcttaagaactttgaaattgtgtgggttaatcaggatatccatttagtttacctcaaatacatttgcagatacaaaaataagtttcgattcatatacggttattaattgcgaaatgtttaagaagttcccacacagaataactgcttacgcatgttggtaatatattttctaaaatgcttataaccaacactttatttaagcccacttgttttgctattaacaagaaggattttcataggatctccttgtaaaagtaaacaaaaaatgttattaacttgaaattgcttaaagaatagtaaatttatttctttcgaaaaaacagcattttaaatgtttgaagatattttcaaactaatagatttgatcaataaaaaatggcgaacaatttttttctatacaagcgactttaaaggtttcatatttttgattaccgcttttaatatcatttagtttagtttaagaaagtttctggacagccggagggtttccctcattttaaaatgggtcagcaattagccaagttgtgacgttatttgttaactgcttcagttccccttgtgcaagtttcacttttcaaggttgttgattcatccagtttcgagtaactgcgtcaactgcatccaggttgtttttgtttacttttacccagttttttttttattttatatatggtcaattcagcactttgtcagcttatcagcaaaaaaaaaagtgtaaaaggcagagcggaaggcaaatttctcggccacattcgaaaggaagccgaaaaaacggtaattcaataaaaattaatcgaacaagttcaaaaaggggaaaattgagaagtaattgagaagtttcgattggaggagagagcaaacttaataaacgaagtcacaaaactgcaaaaactcaaaatcatgtggggaattactggatcaaattcccaaagtgggaatcttacaaattaaaaaattttgtattgagacaaaaatctacttatgttataaataaatgaaaataaagtagaaatggtgataactagctcgataaatcacattaagatcaatttccttcggtcatgattatctaaactaggctgataaaacttttagtgtgctatggctttaagaaagaaacgccgagacacatgcaagacaactgccgagttggctgtcatgcgatattgttcgtaaatatggtcaaaaaattgggcgtgtgctggaccagcaagaaaataaagacctggctgaaaccagggaaacataacccagcggcaataaaacagagctgggagcacagagctaagcacgtttaattggcacgcgccaaactcgagtcgaatgtcttacttttgagacttttgagtgagtgtggtgtgcctgtgtgtctgggtatctgcaagatatctatctatctcgagcgtactgctcgtatatcttaccactcgactaacccaaattattaaacgccatttgaccttaggcaactagttttccgattttccaaaagggggccaaacgggttgagggtgtgggccatttgcaaagtgtttgacttaacggttgtttaagtagcttttgtgctcggccacgttgagtgcggtcagtttttattgtttttcttttttttgcgcgcgcgcttttcatgtttgctttgcggtttttcattcgcgttccttaattttgtgttgcctttgcataatagattttgtcgctgtcgatgattgccagctgcgctctttggttccaccgaacaaccgaattgttactttatattattttgctgttttatttggtttgttaccttttttgctgtcagcaacagttggtcagacgaaaaaaaagcgttcccttctcgaaattacagtgagtcacttttgggcgcttcaatctgttttcgtctataatatcataatttatacagagatacttttttttcgcttacgagagctgatgcccagtgaaaattcgattgcggggcatttattttgaaaaacgagctaaaaagacttgacgttatcgtgaaagtttcgatttaaaagtaattttcccttatctcattttcccgaaccacatctaagcccctactcaacgcacgccgatcatgtactttagttagccactcaagaggataatttatctaatcgtgacacatcccgaaactagtgaacaatgcttgaagcccttgaaacaagaaagggataaactgtagttaaccaagaagcgagaaccctttttcctggttcccccagctatgccatacatacacacatacatgcaagccagattcacggaatacttttagccagaaacgcgcttagtcatcagccagctatcaaccctaaaagcctaaaaatgcgaggcgcaaacaaccccgacaaaaattcctaaataccaacagagcttttccctaccaaaagcaaaaaaaaaaatgcggcagggagccttttgttttgggagaggattatgcatacagcatccagagcccaccacgtaacccattcccaatggcgaccaacaaaaggtgcaatgacagcagcggttccctaatcagtgatgggaacaggtacattttatctgttggctaattggatgcagattaaaagatgcgtaaacctagcggttattatgtaaactattatggactattacttttttggttcaacatttagttattaacatagatttttgttatcatagataataatatgtacctatgtaggtacagtgcagagtacaaaaatgttccccaccgtactcaactccaagttttggtcgctctgctttggcttgcaaattcgcatcattcgctttgctgttgccaacagctgttctgctgctaggcgttgtttttcgctgccggcgtctctgccgcacttgacattttcaaccattttgttttgctcggcaacttcgtgtaggtggactttagtagaaaagaggagccataatggcggcaaaaatggcgactcctgccgcatcctgcctggcaacaaaacacagctgactgctgcgcagatagagcgagatgaagcctacgcctggagaaagagagggagcgcaaaaactccgattaaccgcaagttttgaactcctcttttttctgcacagcatcacaaagggggtgggaaaataggaggagggttggatgggaggaggtttgcctccgcttttcatcatcgtcatttccatctcgatttgcttggcctgttgccaagctgatttatacgtacaggcggctttttatattttacatactttgcattgcttttttctgtttctctcgttgtctgctttattttttcgcttttcgttggtattacggcttcgcctttacattgaccgtgatttttggtttccttctggttttgttttcgatttttttatttttcccttgcaaatacatatgcagcttttttttgttgagttgcgtcctctgtaattgttacatttcatttaagttttatattgtcttacagctcagttttttatgactttactgctttcataaatttggcataaacattcttgacgatctgcccgaaacagctgcgacaaatccaatcggaagtctttactcgaaaatgattcgctcataaaagttgagagtgggttatgaacaaaaaacttgaaaaccagctgtcaaacacaatttctatctgagcccaaaacttttgaagaaatagtttcactaaaaatacacttctaaaaaggtataaaatttattttattagtattttggattgccaaatatttccacccatttatatacatacatttatatacattatatacatatgttcagcatattgaaaattaaataatccagtttgtttacatttcacaccactcagcgcaatgaactttacacatttttcaagtttaaatgcccgccaggcactttgcctaataagaaaaaatattacctgaatgcgaatataaacttgacacttttgagccactataagcgacgggacacggctgaatcgggctcagacggtagtcagccaggatgcctaagttggcttttgattaagtctccgctgaggccgtgctaaattgtttgcactgaggcgttcgggttaagttcagggggcagtggggggtgttagggatagaacgtgctcaagtttttgttatgaaattgagcctagacaagctaggcaaaaccccatctgcgctgacaactcgactccttttcaggaactaaggacaatgcaacttgtgcgacacgctcaaggcagaagtggaaaaggatatgtatcaaaaggcggaaaactaagaacaggatatactcctcggcacaaaacagacggcagacatcatacctggctacttgttataattggcaagctggcaaacgctccagacaccagttaactttcaaattttcctcgcgatgagctctcaaaggaacattcgttgaaggtgttctccgattcccaaagggaaaatgttccttcgcgatttaccttccacattttaaagagcgctgggtgagatcaagtttaaaggggcttaaatgaggaaggatagtggaatggcatctgatttatttgaaagagttgaaaaacaaaaacaccttttgttgtatattatttttaacaaaacccatttcatttggcaattccaattttaatgttcaacattaagtaaactactgaaatatgaactctgtttagaactccccctcctatttatctactgctcgggttgagtatcaatatcaacttatttggtaaacaaatcaaatgcgcttactaaatgtgcaaagtgccaacgacaattaaatcaacaaataagctcgtgtaattgtgtacgccaaaggcagtcggtgggtgggtgttttcagtggtctcggtgggttggtggtttggtgggttggtgggttggtggggcacatccgatccactggatcgagtatagataaccctacgggcacgcaagctccgagtggttgtggattggatgacgcagcgaagacagccagtctggcccagtcgcaaatgcaattcccattcatttattaataactttttgccgcggctgttgagacgtgcagtttgccgttttgcggctgcagttttgctttttttctctctttttaattattttaattgcgttgcatctgatcgaatgctggcgtacagttttatttattgtttaattgtaattttcgcatttacgttgttaattgcagcgtggtactgggcggagattcggtttaatcaactactaaatgcttttggctcgttgcaaagattttgaatttggttaagtggcgatggcatttatggccatacttcagtgcggaagtatggaaaattcgtgattttcataaataagaactaatgagctttagcaattaacaagaaattaatagaaatgtttagttaatctgtaatattttactaaatctcccaactacacagttttcaaattacagtgtagaacattttctttaagacttctttatatttgtttgatcctttttacacgctgattcagccagttatattttactgtcttcccaaaccattttcaaatgttcctcttgctcacaaaacacatgctcgccattttccactcttccggaaaatcctttggatccccggaaaatatgcaaacaactgcaaagaccaaagacttgtgtttcgctcagtttcctgtcaatcgatgtgcatcgtataagttccttgggaacgtcgtctcatgcctgattttccttttggctttttatagccttttaagctgttttccttttgttgtgtggagtgaagagaggaaattgaaaaattgcatttgtctgtcgctgataaaatattgagcagcttgctgcacattctccctggttttagctgggctgtcgtgataagcgtttgagctatttccagaaaaacgctctcatggagattggcaaagaatgaaaatgcgatgtgggtgggagaatttcggaattccattcagctgtccctcaaagggtttcctcattctttaaagccgtttccaacggctcttaattcctgaaatatttaattaaattcttgcatattagctttatgtgggctttaataatggctcgcgtgtttgctggccccgtttttgtttatattagtttataaccttgctgcgggaagattaaaatattttaaacgcatcacgatgcgaacataactggactgggttagatcatcaaagcttagatttagaattgccgacgatatgagctttaatatcttcatacacttgacctctgtttttattatcgagaatttctgctgactgagtgagtttagtgataattgtattgtttgtattcttggagacccacaagattgatgcgtgaatttgattcaatcgggatttgccaaatcatcaaacaaagaaactttctccttgccatcgagacattacgcaagttaattaaattgccatgctaagaatcatccttataacatctcacgagaactttctctttctgtttacatgaatcacttgtgacattatcaaatttgtcattagcttccgcatatttttcaccactcacttttggatatttccttaattcacaaacttctcgcattccacaaatggctaattagcggcttaccgaaattggccaataacagcgggatctgatctatagattgagactcgtacatagatcgacacctgattgacatgcagttcgagacaaaaactgatcgaattgtgcaaaaccccaaaaaaggcatttgtaaaacagtcttttgtcatatatagaaaaagccagaacacagagattcttaatcaggagtcgtcggcattgttttcggaattctctcccaatttcctgaagatcaattaattagtcacttgccttggccatgagcaattttaccgttcgactgtgcggggagaaaatcggcagctgttgttgcctaattaaatcgaggtgacaggccagacagacggacgatcaagtgaaactcgagttgaccaaccaaattagtaatctcgcatcgtgacagacgacaaatcgccttaaatgaacgacttcaaatgtaatttttgtgggatttttatttactgtttttggttgtggttacagctgcttattctgcttcctcttcgtgtgtgggcgttatgtggttggtaactgtaaaatgagtttatacacatttttttttttttggccaagttattcggcattattccgacgtgcatcatatcatgttgtaatcttggactttgcttaaccccagttttgagttcggtatggagtgtttctttgttctgtcatcttgagcttgtttcggttctgtttttcatgttttcatttttaaattaaatattcatcaataaatgtcaatgtcaagtgaagttgccgctggctttcgagaggtttcgagattttgggagaagagattgcaatttgctgaaagacttggagttgtgatggcacaaatgaaacatgcggttattctgtgaatccatgacggatttatacatcacgtatgctatatatttatttttgatttcaaagattccagtttcaactggaattagcttctttattttcttaaagttcgtggctagcctatgaataaatatgttgaatatcattttattattaacaaaaactccgttccgcaggtcaggttgttagccaccacttccttcctatatctcagctggtcaatagcttcctccctcgatatctggccgattcatatggcatttcccattccgttccactgaccaagttatagaactcgcactttgcaaactcgtttagcccccgataccgattgcgatcccaagtgcgacgcaattgttcgagttgggccgttggagatacgagccactcgagtacgggctcgtatttattcatacttacccgtgcagtgccggtggtgactctagtatatttttatgtgtagttttcttgtgcattttttcttttttttttttttttgcatttagtcagcacttcaaggttataatgagcaacatatgctgcgggtacgccagccagcaaactgcaactgcaaatgcaatcaactgcaaaggcacaactaaaaatgcatttcaacgttgccgacgacgatttgttcttttgtgtggcaactaaagcgaggcatttttcacgtttttccgctgcctccgagctgttcttgagctttttctgaggcgttctgcttagttaaacttttgcctgattgatgtttgtcagctgctgcccagcggccttagaaacggttgcaacatcgcctagaaccgatggagaattaaagtgaattatacacataattgcaattttttttatttcagtcgccgttgttatgtccagatgcgactggcactcgtaattcaattaaacattttgcccatattgtcgcccgtggaaatataagcgaatgcagcaattcgaataaaacaatactcctaacaattggtcacgtttcgtcaccaacaactgcagtgctaacaactactgcatcgcccgcattgagttgtgatcataaaattcttccaccttcccaccttatagagatggcgaggaaaactcgaaaatatatcacagaaatcacaaaaccacatttaaatgaaaataaattttcccttgcaatgcgtgactcaatagacgtgtttaaagaaattaacacttttttctctaagggtacaccccttgtacatttacgaattgatttaaatatctcatcatcacctatttaacgtgtgaattatataacgcatataagcattaggtgctataattaagcgttttataaatcaagataaatcaaacattttcttgcctcacaaattggaacaaaaaatcgttttaaatcatttaatcacgcctttttaagtttaaacaattgttttatgcgaaaaaaagaaacgtacactattgttaagccaggttcccgtttttatagagaatttcaagcacgctcacctaaacaaagattaaatcaccatagatagtagtttgtaaacgtttcgttctaatcgtagattaaatcgtaatctatggcaaaatgcgctatctatcttagcttattttagctcacgcagtcaccaccaaataaaaatatatgttaaatatgagtaagcgattacttactacagttacagttacagtttgtaactgtataatttcataatagatattgtatacgatgagaaaagcctatacaaattaaaacaaatgttctttaagacaaatttggaaagtttataatacattttaacatgtagaaccaaatgaagatgagcatacatctgtagatttgattaaaattaatatagagaaagaataagacatcaattctttctccactcatggctcgaaaaattgtatcaccttaagtggtgatggtatttttctgtgtgtaccagcatcgacatagcatggctagttatataagttggccaggcagtaatgatccctgccgttggcttcgcttcgtttctgaagctgatgctgaagctgaggcaaaacctggcagattttcaaggttaacagcgactttacgatggcgcgcggtgagcgcacgtgagttgcctcagctgctggccagcagcagcaaactagtttcaaatgcctggcacagtatctttcagatacagatggtaaggctgcggcaaggagtggctcttaactcgcttcgcctcggttcgcttcggtttcgtttgctttggttcggatcttggcccgcaattaaataccgattttttgcgctcttgcaactgcaactgcgaatgcaacagctgtgggctcgtttcgactcgattcgagttcaaggctattgggtcaaattgcaaattagtcgcctgcaggttgacagtgagtgacattattgtgtatctgcacactgcacactgaccaccgacaaagcgacagaaagacagacagacatggatgtatgtattgggtagattgtcgggcattatctgcggtcaattatcgttcttgctggctgctaatcggtaagatacacgtacttctgccgccggctgctgtcgatttgtataaattttgcattacaatcaatcatttgtcgctgggcaatggctttttaagtaaataaacattaagaaatcatacagatgaaaatgtacacccaactaatggggagctcacaatttatgcgcataccaagtggccagctcggcagcgcatttacctatcaacgcttttgttgtcgatttgcatgaaattgcaagtaaaaaaaaaaaacaaaaaaaaaacagggaggagaatacaaaaattgaaatacaactggaagtcaaatcgcagatacagatacgcttctcgttacatgcataaatgatgctaagctggaaagatttcgaagacagatacagatacttttcaagttgggccactcaagtagaccctcttggcaatgtttgttgctaaagatacaaaacaaaaaaaaaaaaataaaatactttgccaagtgagcacgagaattgccaatgacgtgtaaacaacttggatacaaatgcgcctgcaggcggcttgtaagatacttaaggctgcgaataacttgaatattagtggccattgttcatggatatgtatcagaagtgcaatatgtcgataaagtggtgtatttaggaagtttaatagtatttgttggaagccatatcaatttatgatgaaagccctaaatggatagttatattgttaaataagccatattacttaattaaggcccttggagcaaagggagccgaaagccattaaaaattgcaacgttccagttttagtcgtttatttacatttacatttatctttaaaacagcattatgtggcttcctgctgcaccggccgaagatattttattttattgtgcactgcaagcctgtaactggtaggggctgcctgatcgttttatgggtggttttatgatcagagaggacttgccataattgcggcgggttttacagtcagtcggctaagtggcagttggcaagacaatgggatcgccagcgccccgaccttagacacttccctacattgtcactgactcaatttcagacccggccaatgccgcctttgtttaccttatccattgttgggtgatctttattacgggtatatgtaagcgaactgtacatcatcaaaatattaaatattttagacttttcaataatattagtaagttcgtttgattttcttattatgtgccagctgtatttaaattattattcgcttaactttcgtttcagccccgcaaatcttccagtatccgccgccaagcccctcttgcaatttcacgggcggcgatgtgttctttccgcacggccatccgaatccgaactcgaatccccatccgcgcaccccccgaaccagcgtgagcttctcctccggcgaggagtacaacttcttccggcagcagcagccgcaaccacatccgtcatatccggcgccatcaacaccgcagccaatgccaccgcagtcagcgccgccgatgcactgcagccacagctacccgcagcagtcggcgcacatgatgccacaccattccgctcccttcggaatgggcggtacctactacgcgggctacacgccgccacccactccgaacacggccagtgcgggcacctccagctcatcggcggccttcggctggcacggccacccccacagccccttcacgtcgacctccacgccgttatcggcgccagtggcgcccaagatgcgcctgcagcgcagccagtcggatgcggccagacggtgagtagccagcgatgcagggtgccaaaagatacactgcctgggtggtgcaaaaccaatcaaactggaatttagattcagatcgatgagcatacagaataagagggaaagttccaaactatgacatgataggatgcaatttagaccaactaaaatatacaaagctatacagcgtgtattcaaattagagattaatataaactatgctaggcgttgaatataattgaagaataatatgaactttagttaagtgtaatacttaaattcattttcattgatgtttataattattatataatatttattataataattaataatcccactgagagaaatatagttgtaaaggaacgaagactagaaatcgttacacacacgctgtgaaattgattcgtactgaagtaccaagcaaaatagctagattattcatcgcaatctcgacacctttcgccccacccgaccccctttttccaattcccatgacacaacggcaagtttttaattaatgaaatcgcaaagttgtcgctggattatgtgcacacacaagtggcatatagtgctatacaacccgaatccgaatccgaaccgactgataattgctcatgacgttcccaagtcatctgtctatatgtgcagcgatatttatagtgcccattatgcgtctcttcccacagcaagcgattgacctcgacgggcgaggatgagcgcgagtaccagagcgatcatgaggccacttgggacgagtttggcgatcgctacgacaactttacggccggccgggagcgtctgcaggagttcaatggacgcatcccgccccggaagaagaagagctccaatagccactcgagcagcagcaataatccagtctgccataccgatagccagcccggtggtacatcccaagcggagagcggtgccatccatggccacatcagtcagcagcgacaggtggagcgagaacgacaaaaggcgaaggccgagaagaaggtaagaaatggccaccaatcttggaatgcacaacgcatacagagaaagggtattctcgtttcggtgaatcagcatcactacccaaatctagttagcattcattgcctgccaacttaatctaatatactttaggttttaaaaaatgttcaaaaaacttgaaaagaactatacaatcttgctgcaaacatacatagcaaaatatttccaacaggcagaggccccttctttgcttaagtcgcccaaaactgtccaacaattagaatacaaaagaggatatgagttggggagttcattaactcgggacttcacacatctgctagcagttcgtgcctcctaagtccgtggcacgtggcaaacatttttcaaaggctcaactagagagaagtgctaaaaatacgcggcaaggaatgacaaattgccgtacgcgaaaggagtcgcagattcggatgcagatacgaatacgatacgctagcaaaatgtatctgtatctgtatttagtggagtgcggcccgggcatgtataacacttttgcacatgctaaatgtgcgataaaaattaattgcgcagtgcgaagtgaaagagtcgctcttgtcacttgtctccgctttatgttaatcaaggcaggcgcctctatagagccacatgtgccccctccccccccccccccccttaagtcgggcctttgtgtatcggccctcattgagctcacttttttacgcgtcgcgttttttttttagttttagtttcttgcgcgtttgcctgcgcagttgaaagaaatgcaaacttgaagaaattcaatcgcaatcgcatgacacacacattgactcagacctgataccatttccagtccatttcagtcctacattatgttattcctattccactgcgattttgtttttattgtaattcatatgggctccgggctggccgttcttatcgctcatcgcattgtgggggctcatccttggggaagctgccgactgatcgggaagctatatagcggctccctcggctccctcggctcgctgggatctgaccttatccgagactcactcagctgctaaatgagagcgtgagaaattccgtaatctgaaaggcaacaggcatgcaaaagctagtggttctgcagatgtaaatacattttaaaatattctaattaactatagcttagtcaaggattagagagtggaaaacttataagtaaggaaagggaatgaatgctatacacattaaacataattgccaaacataaattctagcatgtgacaaactgtacctacacatctagtattaaaatgtgttacttaattcatagatactaaagcacattttattcgcataatggtgtgtatttcaccataatttattctcctttcaatgccaaaaatgaaatcaaaatatggccacatgttcgatggcctttcataccattaaccgcatagaagaagccacaatagtcctatcaaaatatagactaaaattcgagcgaaaacagcagaaaagcaaatttgcataataaatgtggggtcagttggatttttggtggttgcagttccaccacctcatcattcacacgtgccgcactgcaaccgttgaagcgtggactattggacaaataaatggtgtaaattataaaaccattgatgcgggttgggggggagtcaagtgcgctgtatagaaaaataattacaccagtgaccggacaaaagttgaccgcccatttgggtcaggccacatgaagttcatccgtcgggcagtcaatagtttcgcttgatttacggttcaaaagaggggtggttcggtcacgtgtgtggttttagatatttaatgccgcacaggggagctattggttgaactgaatgatttcttgaaatgcgttatattaaagcaacttgttctttatgtttaagatttgccttcacgtgcacctgaatataactaaatgctattgttttattctcctttcagaaaccacagagcttcacttggccaactgttgtgaccgttttcgttttggccatgggctgtggcttctttgcggcgcgatgaaagcgcaggagacgtgtaatcgaatgatctatagtgaaatcagctagcccttaagatatatgccgatctaaacatagttgtagttaaaccgtacataagtgcaacgaatttattgaactgcaggagcgaaagcagaaagtcattaattcgtaaacggattgttagatacacaaacagccaacatacacgaagagtgtgcctaagattaagaaggttgacgggacacaagaacaatatattctatctgtctatggtaactgcatttgtatttctaaaacgaaacgaaagataacaatcttaactgctcaaagtaatgaaaactcttagactggcaagagactcaaatcacacttatttttttgctgatccatatttttgtacaaccttttgagcgatatttacaaattatactagtacaaaaaaaagagagagagagataagcaaaagaaaactgccacttttgagatacttttgataatctttgatttgcatttaatcatttccacacttgcattttttataaacaacaaacaaaattacttccattgtagaacaaagtaaactgcaatttcaatgtcttcgcatttgtaattccgaattgcaagaaaaacaaaaatattttaaatatgtttaactagtagaattttttaaacgtaagtccacaaaaacaagcacatctagctttaattgttgaaacaaaagcagaaaaaacgcaacaaaaaaatgaatgaaaatcattaaattaattttgtatatagtttttatgccatttttgtgatgttttgtgtctacggtttatgtcatgttattttagttaaatttcttatgatttatgtttatttgtaatattttttgtcattgtttgttcatcatcatattcaaattggtctcacaatataatagttttaagctccacgcccgggagattgatggcaaaacgattgaaatttggccagaagagagatagttttccccattcgtacacagtcttttttggaatgcacattaatgatctctcacaatggaaattaatgaaaattgatctccgcagctagccaaagttaaaaaagaaatgaagaggaaaacatattctataggcaattttcactatatgctagaatttcccgggcgtttcaatgctaatcgaatacagtgacatgaaagcaaacatagcgaaaatattaagaaaatcaatcaaaaagaaagaaaaaccaattcccaaaaatcgcattgatctcatggatttatacaatacaattacatcaaccgtttttttacaatgagaaatgttataaaaagcagaaagtgaaacacagaaacataaacaaaaattaacgaaaagcttagatataagttcgccaagcgttttagttctattttctagaatgtctaagttggtttagtgagtttattaagctgtcttcggacacaagtttatttgtatataagcaatattatttgtgtagcctaagtgacagtcccaatcaaatccaatccaatatcacccagtcccggacatttcccagcaaaacaatagactattctcgcgttcacatgtatcaatcttaatttgaattaccacaaaatgaaatgaaatactaaaaccatacacaaatgaaaaattatttttgtaaattgtttgcatcaagtgagcaaggggattagattaaggaatcatccttgctttatcccctgcttattgctaattagttttcacaatgatctcggtaaagttttgtggccttgcgcccaaaagtcgtacagatttttggtttgccataaatactcgaacaaaaagttaatgaaaaacgaagcaaatggaaaaaaaatcagaatgaaacacaagaaatttatatttttgacccaatgctacttaatccgtttttgtaatttaagtatctttactcgaccttgtatatagcgcagttcgaatcacagaatcaaatgccatttttgtatagaattttatttggtgccaaaacagtgacagataattaaatgtctatgaacccgtgtatttcgcatattatacatttatacatatatcgtaacttcaatgataagtttgattctgaaattttgtcaactcaatttaagaaacatttctgttgtagtttagtgattgctagcagaaagcactttgtttaattgtacattttatattatgctgtaatattttaatatacataaatatcattattgatctcatgaatatgttcataagacaacaaaaattatatatatgaatacatctatgtgtatgtgtaaatgaaataaaagcgcataattattatgtaagatttatggaacaaatgaaaataaaagtgaaaaaaatatttgaaaaaattaaaagtttgtatatgatttgaatgggttgtcatggcatacaagcgttttttttataaggttattactcttcataaattcatcaatctcaaacattattattatttaattatgttgaataaccaaagaaaagtaagtaaaagtatttatttagtatattttacatcgcaagacattttacatatttataaaactatcatttttcattaccaatattttattaagatggacgcaaataaatgtaaaggaatatttatatatttatttatttgaaatattttacatggcaacttattttacatggattatggcaagctgatcacatgtaaaatacattttacaaggcctactttcaggcaggtatgagaaaagatcactgaagcattgcgtgtgagagagagagagttttcctcctaccctgaaaaacgaaccttttgttattgttcagggttgaagtgtgcgtgaggaaatatttttcttcgatttaaatggccacttggacggcatataaccaggcgaaagcttaaaccaatttgtagtttcaattcctttcgtggctacggattaagtggccataattgctgctcctgcagccgcgccacgtgacttggtaacgggatactgtgccggccacgttgctcgtgtcacaaaaatgatgtgttattagcggcttaagcaggcgatggcgattataatgaaacgcggcaccaggctgggcaattatgttaacctggccaccgaaaaacctcaggctcagcggtcatgacatccgtttccgccttaaatcacgcgacacatgcaagtgtcaatcaaaacggtatatttaatcagaaactgatattttcattgaatgcaggcgcgtgtgcgaatcagttgaacggacatcaaaaagcaactgctaatcggagattggaaatcttaca

SEQ ID NO: 10610 - DNA, 3988 bp, DROSOPHILA
acgtgtttcctgccctctttctttgagtctgcgacacgttttaagtgctcttccataattgacaacagcaaaagcaaagaataaaaaaataacaaaaaataaaaaacgaaatccatcgtgaacagttttgtgtttttaaatcagttctaaacacgaaaagggttgatgaaaaacgcagaagaatccgaaaaactaactaaccgagcaaaaacttgacttgagtgttgtttgacaaatcaggaaagataaaaaacaaatcataagaaaaaactgcacgaaaaatgaaaaagtttctaatattcaaaatcttgcacaagaaatacaaaatcaattaaagtgaactctaaccaaaagttgtacacaaaataaaaagcaaaacaaagcagcgaagaacaatcacaagaagagcaaagtgccaacaaagtgcaggaaggaaggaagcggataaggacaaaaaggaagccagcacacacacacacccacacaatggccgtgcccttttatttgcccgagggcggcgccgatgacgtagcgtcgagttcatcgggagcctcgggcaactcctccccccacaaccacccacttccctcgagcgcatcctcgtccgtctcctcctcgggcgtgtcctcggcctccgcctcctcggcctcatcttcgtcctccgcatcgtcggacggcgccagcagcgccgcctcgcaatcgccgaacaccaccacctcgtcggccacgcagacgccgatgcagtctccactgcccaccgaccaagtgctatacgccctctacgagtgggtcaggatgtaccagagccagcagagtgccccgcaaatcttccagtatccgccgccaagcccctcttgcaatttcacgggcggcgatgtgttctttccgcacggccatccgaatccgaactcgaatccccatccgcgcaccccccgaaccagcgtgagcttctcctccggcgaggagtacaacttcttccggcagcagcagccgcaaccacatccgtcatatccggcgccatcaacaccgcagccaatgccaccgcagtcagcgccgccgatgcactgcagccacagctacccgcagcagtcggcgcacatgatgccacaccattccgctcccttcggaatgggcggtacctactacgcgggctacacgccgccacccactccgaacacggccagtgcgggcacctccagctcatcggcggccttcggctggcacggccacccccacagccccttcacgtcgacctccacgccgttatcggcgccagtggcgcccaagatgcgcctgcagcgcagccagtcggatgcggccagacgcaagcgattgacctcgacgggcgaggatgagcgcgagtaccagagcgatcatgaggccacttgggacgagtttggcgatcgctacgacaactttacggccggccgggagcgtctgcaggagttcaatggacgcatcccgccccggaagaagaagagctccaatagccactcgagcagcagcaataatccagtctgccataccgatagccagcccggtggtacatcccaagcggagagcggtgccatccatggccacatcagtcagcagcgacaggtggagcgagaacgacaaaaggcgaaggccgagaagaagaaaccacagagcttcacttggccaactgttgtgaccgttttcgttttggccatgggctgtggcttctttgcggcgcgatgaaagcgcaggagacgtgtaatcgaatgatctatagtgaaatcagctagcccttaagatatatgccgatctaaacatagttgtagttaaaccgtacataagtgcaacgaatttattgaactgcaggagcgaaagcagaaagtcattaattcgtaaacggattgttagatacacaaacagccaacatacacgaagagtgtgcctaagattaagaaggttgacgggacacaagaacaatatattctatctgtctatggtaactgcatttgtatttctaaaacgaaacgaaagataacaatcttaactgctcaaagtaatgaaaactcttagactggcaagagactcaaatcacacttatttttttgctgatccatatttttgtacaaccttttgagcgatatttacaaattatactagtacaaaaaaaagagagagagagataagcaaaagaaaactgccacttttgagatacttttgataatctttgatttgcatttaatcatttccacacttgcattttttataaacaacaaacaaaattacttccattgtagaacaaagtaaactgcaatttcaatgtcttcgcatttgtaattccgaattgcaagaaaaacaaaaatattttaaatatgtttaactagtagaattttttaaacgtaagtccacaaaaacaagcacatctagctttaattgttgaaacaaaagcagaaaaaacgcaacaaaaaaatgaatgaaaatcattaaattaattttgtatatagtttttatgccatttttgtgatgttttgtgtctacggtttatgtcatgttattttagttaaatttcttatgatttatgtttatttgtaatattttttgtcattgtttgttcatcatcatattcaaattggtctcacaatataatagttttaagctccacgcccgggagattgatggcaaaacgattgaaatttggccagaagagagatagttttccccattcgtacacagtcttttttggaatgcacattaatgatctctcacaatggaaattaatgaaaattgatctccgcagctagccaaagttaaaaaagaaatgaagaggaaaacatattctataggcaattttcactatatgctagaatttcccgggcgtttcaatgctaatcgaatacagtgacatgaaagcaaacatagcgaaaatattaagaaaatcaatcaaaaagaaagaaaaaccaattcccaaaaatcgcattgatctcatggatttatacaatacaattacatcaaccgtttttttacaatgagaaatgttataaaaagcagaaagtgaaacacagaaacataaacaaaaattaacgaaaagcttagatataagttcgccaagcgttttagttctattttctagaatgtctaagttggtttagtgagtttattaagctgtcttcggacacaagtttatttgtatataagcaatattatttgtgtagcctaagtgacagtcccaatcaaatccaatccaatatcacccagtcccggacatttcccagcaaaacaatagactattctcgcgttcacatgtatcaatcttaatttgaattaccacaaaatgaaatgaaatactaaaaccatacacaaatgaaaaattatttttgtaaattgtttgcatcaagtgagcaaggggattagattaaggaatcatccttgctttatcccctgcttattgctaattagttttcacaatgatctcggtaaagttttgtggccttgcgcccaaaagtcgtacagatttttggtttgccataaatactcgaacaaaaagttaatgaaaaacgaagcaaatggaaaaaaaatcagaatgaaacacaagaaatttatatttttgacccaatgctacttaatccgtttttgtaatttaagtatctttactcgaccttgtatatagcgcagttcgaatcacagaatcaaatgccatttttgtatagaattttatttggtgccaaaacagtgacagataattaaatgtctatgaacccgtgtatttcgcatattatacatttatacatatatcgtaacttcaatgataagtttgattctgaaattttgtcaactcaatttaagaaacatttctgttgtagtttagtgattgctagcagaaagcactttgtttaattgtacattttatattatgctgtaatattttaatatacataaatatcattattgatctcatgaatatgttcataagacaacaaaaattatatatatgaatacatctatgtgtatgtgtaaa

SEQ ID NO: 10611 - protein, 410 aa, DROSOPHILA
MAVPFYLPEGGADDVASSSSGASGNSSPHNHPLPSSASSSVSSSGVSSASASSASSSSSASSDGASSAASQSPNTTTSSATQTPMQSPLPTDQVLYALYEWVRMYQSQQSAPQIFQYPPPSPSCNFTGGDVFFPHGHPNPNSNPHPRTPRTSVSFSSGEEYNFFRQQQPQPHPSYPAPSTPQPMPPQSAPPMHCSHSYPQQSAHMMPHHSAPFGMGGTYYAGYTPPPTPNTASAGTSSSSAAFGWHGHPHSPFTSTSTPLSAPVAPKMRLQRSQSDAARRKRLTSTGEDEREYQSDHEATWDEFGDRYDNFTAGRERLQEFNGRIPPRKKKSSNSHSSSSNNPVCHTDSQPGGTSQAESGAIHGHISQQRQVERERQKAKAEKKKPQSFTWPTVVTVFVLAMGCGFFAAR

SEQ ID NO: 10612 - DNA, 3640 bp, DROSOPHILA
aaatgattcactgtgcagataagagcgaattttttgattggtcacgcctgcttttcttatcccggggattgcacggtatgcgcaattcgtgctgctggtttacgtacactggtctccaaaaaaaaaaaatatatatattttcaatatgagctgctctttgctgcaagttggaatgcctctatttccgcactgcactgggctaccgcaattttagcgcatttaattcacaattcgcgacttatttcggttctccctgaccgactttcttgtattttggtattttcgtatttttgtatatttgcttgctcggcggcgaagcggcggctgttttgttttgttgaccaaaaaacatctgcagcagctgcgaatcgatattcggcaatttgacggctgggtggctgcgcggcggcctctgcacggtgcgagcgccgcattggggttcctccgcgctcagctgttcatgcgcgcttgcttgggtgacgtgcggggtattccagcaaatgcgatattaaactgttatcgggttatgtttttgatgaacaatttttttttttagaaaaactacatatgggtagggtggaaaagtaacaaatattaataaatatatttaatgaaatggttgtaactatgtttttttttaaataattttaatgtaatattgcataaaacaaacttacataagattaaaacttaaagcaaattaactgctctttgctctagtataaaaggctcgtagtatttataaagtatataatattaaatattttaaggataagaataaggtgtcgtttatttattttcaacataaacaagcttaagaaaacaaatatttcagatgtttccacacccccatttcgtaaactagataaaaaatccattttacccgttggccactgtacctgctactgaaactggtttgaggcaaagctctcctcgccagcttcttcttccatatcgggtggcaacgtcttgggtttatcgcaacctcagtggtctttggctcggtttcagtttgcatatgcattgcgcaaagtgcaaatctcatcagaaattggaagcggcgtcatcatgtcattttggagccacgtacttgatgccctgctggcactggtccacatcctgagcgatcgcctgctggagttcgtactggactggtatttgggcgagcacaagcgggtatcgggtccaccgagcctggaacagcagacgacgattacgaagagcgctgtggagttggcgcaacagatacgggaacgcaggcagcgcagttacgacatagtcaaggcctactgtgagcgaatcgagagcgttaatcgggatctcaatgcggtggtcgatggcccgtttccggaggccttggaccaggcacgcgaaatcgatcgcaagttggacgaaaaggagtacagcgatgaggatctgcggcgcctgcccttcctaggcgtacccttctccaccaaggatagcaccgctgtggctgggaggctacacacactgggcctgctagcaaggaaatcggaacgttcgaccacggatgcggaatgcgtgcgcctgatgaaggaaagtggcgccattatcatcgccaccagcaatgtgccggaggtgaacaagtggattgagtcgaggaacatgctaatcggctgcaccaacaatccctacgatctgcggcgttccgtcggcggttcttcgggtggtgaagccgctctgatcgctgcctgctgcacgggttttggtttgggaacagacattggtggttccatacgcataccggccttcaattgcggcatcttcgggcacaaacccacttccggtgcggtcaatatggccggatgtacgttcagaacgggcaaggaaaaggatacgatggtatgtgccggtccaatgagtcgttctgcgcgggatctactgcccatgatgcaggttctggtggagccatcgttgaaagccaagctaaaactggatcagaaggtggatctgaagcggctgcgttacttctatgtgtcctccaatggcatggctcagtgcaatcctattaaccgggaaaccgaacgggttatgtacaagattcgcaaacatttcgaggcagtgagtggaaaggacgtgcggcacgctgacttgccctataccaagctgaccggaaagatgtggcgctattggatgacccaggaaccggccaacttcaatctgctgttgggcaatggcgccgagctcaatccatttgtggagctcttcaagaagatactggggcaaagtgactacagcatggcggccatttatggtctgatcgacagtgtgctgcccaaggaaaaggagaagctgatgagggaagccacggccaagtgcaagaagtccgtccaggacttgctcggcgacgatggtgtgctgttctttcacagttctcccaggactgcaccattccactactatcctctggtcaagttcaatgacttcgcgtacttcagcctcttcaatgtgctccacttgccggccacccaggtgcccatgggtctggactccaagggcatgccgctgggcatccaagtggtggccaatccgaacaacgatcgcctttgcctggcggttgccgaggaactggagcgcacttttggcggctgggtgcctccatttccgctgaagaactagatggtttatgatgtatgatcgatcaacttattgttagagaacatagggtgtgggtaacgctgaagactgtcgcttttatttattacttttattacaggatataaataaattggctatcttttttaactgcttgattatttgttgttccttacttacttttgggtgcttaacatcaaattgcttatttaatttcgttgtttcatttttacggataccgttaatattagctttaggaaataaaaaacaaattttattaagaaatttattaaaattcaccacaattcaaacaataacaaaaatcagctgtgcgtaggtgtgtcagctctttcgcaatgtacagtgctgcataatccataaatatattcaaattatgccgccaaaaaatctacactacacaattcgaattacgtagaattaaaatgtaattaattaattttttttttttttttaatttccagttttgattattatggaatttatatgaataaaaataaatatttcaatgcgactgatcatggcgactccaagattctgactcagtaaacaaacagttgactgccgactttaaaggggccttacatataaaaaatacacacggcaaaaaggcactttcatttcacattaatgcttaattaaaaatgagattttacatcttaatacatatgtgattcatatatgttgataagagcattttgtattgaccttgattttaaattagaatcgagtagctttaacaatcagaacttgttgcacatatacatatttcgttactcatgctatatatgtatgtatatcatgctatgtatttcatgacatatttaaatgtaatctcaaaggcttggatgaccgattcgagagcaaagactaagtggactttggaactggttacccatagaggggattgtgcagcgggcggtaatcgtaggattgtctgagtttcttatcggaactgaaaaaatgaaaaaaaaaaaaaaattaattgctttaataaaaacaaaat

SEQ ID NO: 10613 - DNA, 1640 bp, DROSOPHILA
ctcggtttcagtttgcatatgcattgcgcaaagtgcaaatctcatcagaaattggaagcggcgtcatcatgtcattttggagccacgtacttgatgccctgctggcactggtccacatcctgagcgatcgcctgctggagttcgtactggactggtatttgggcgagcacaagcgggtatcgggtccaccgagcctggaacagcagacgacgattacgaagagcgctgtggagttggcgcaacagatacgggaacgcaggcagcgcagttacgacatagtcaaggcctactgtgagcgaatcgagagcgttaatcgggatctcaatgcggtggtcgatggcccgtttccggaggccttggaccaggcacgcgaaatcgatcgcaagttggacgaaaaggagtacagcgatgaggatctgcggcgcctgcccttcctaggcgtacccttctccaccaaggatagcaccgctgtggctgggaggctacacacactgggcctgctagcaaggaaatcggaacgttcgaccacggatgcggaatgcgtgcgcctgatgaaggaaagtggcgccattatcatcgccaccagcaatgtgccggaggtgaacaagtggattgagtcgaggaacatgctaatcggctgcaccaacaatccctacgatctgcggcgttccgtcggcggttcttcgggtggtgaagccgctctgatcgctgcctgctgcacgggttttggtttgggaacagacattggtggttccatacgcataccggccttcaattgcggcatcttcgggcacaaacccacttccggtgcggtcaatatggccggatgtacgttcagaacgggcaaggaaaaggatacgatggtatgtgccggtccaatgagtcgttctgcgcgggatctactgcccatgatgcaggttctggtggagccatcgttgaaagccaagctaaaactggatcagaaggtggatctgaagcggctgcgttacttctatgtgtcctccaatggcatggctcagtgcaatcctattaaccgggaaaccgaacgggttatgtacaagattcgcaaacatttcgaggcagtgagtggaaaggacgtgcggcacgctgacttgccctataccaagctgaccggaaagatgtggcgctattggatgacccaggaaccggccaacttcaatctgctgttgggcaatggcgccgagctcaatccatttgtggagctcttcaagaagatactggggcaaagtgactacagcatggcggccatttatggtctgatcgacagtgtgctgcccaaggaaaaggagaagctgatgagggaagccacggccaagtgcaagaagtccgtccaggacttgctcggcgacgatggtgtgctgttctttcacagttctcccaggactgcaccattccactactatcctctggtcaagttcaatgacttcgcgtacttcagcctcttcaatgtgctccacttgccggccacccaggtgcccatgggtctggactccaagggcatgccgctgggcatccaagtggtggccaatccgaacaacgatcgcctttgcctggcggttgccgaggaactggagcgcacttttggcggctgggtgcctccatttccgctgaagaactag

SEQ ID NO: 10614 - protein, 523 aa, DROSOPHILA
MSFWSHVLDALLALVHILSDRLLEFVLDWYLGEHKRVSGPPSLEQQTTITKSAVELAQQIRERRQRSYDIVKAYCERIESVNRDLNAVVDGPFPEALDQAREIDRKLDEKEYSDEDLRRLPFLGVPFSTKDSTAVAGRLHTLGLLARKSERSTTDAECVRLMKESGAIIIATSNVPEVNKWIESRNMLIGCTNNPYDLRRSVGGSSGGEAALIAACCTGFGLGTDIGGSIRIPAFNCGIFGHKPTSGAVNMAGCTFRTGKEKDTMVCAGPMSRSARDLLPMMQVLVEPSLKAKLKLDQKVDLKRLRYFYVSSNGMAQCNPINRETERVMYKIRKHFEAVSGKDVRHADLPYTKLTGKMWRYWMTQEPANFNLLLGNGAELNPFVELFKKILGQSDYSMAAIYGLIDSVLPKEKEKLMREATAKCKKSVQDLLGDDGVLFFHSSPRTAPFHYYPLVKFNDFAYFSLFNVLHLPATQVPMGLDSKGMPLGIQVVANPNNDRLCLAVAEELERTFGGWVPPFPLKN

SEQ ID NO: 10615 - DNA, 6801 bp, DROSOPHILA
gcgtgtttatgaagatttctgaacttacttatattttttttttttggctgctgctgttcatttttcggttcttctcggtttgtttaaagaagaattagtcggtcgatcggcggaagccgcttgggaactggaatttcgggacactcaaacgaactgggatttcgagagttggttaaatggagtctcaggtaatgcgacaaatgaaaggaaaaaagctcaggccgaaaataaagtttaatttcagtgctaattaaagacggcgaatcgaagccagctcagaatgctgtatactcagatgtatgtgcacatttagccaactgaatttatgtgcacggctttctttgaattgcgcagcagccacgatttcgagatctgtgttctgggatttgttggctgaaccctgtccttgaccccaatgatatcagaaagcacccataagcacccgctccttgttttctcagagttctataaaaagcacaaacgaaacatcagttaagactaattgagtttggctaaaattggtcaaaatgcgcagcaagcggccaagacaagagcacctactctgaccaattcaatcggattcaaaccaatccatccaatccaatccgagattcgccgcaacgaatccatcaacgacaagcagctcgccacgatgactgctgcaaaaagtcaccttttggcacctatatctacctgccggatgacatcatcgcgacagcagcgacgacaattactcggaatacaaataaagaattgcgaccccaacttggtcgcaggctatcctcaaatgctggctaactgcagcgcggagcatgacatggcaccaaatggccacggaacgaactcgaaatcggaatcgcagctgagagccacgccaagcaggcatccaaacaagcaaacaaccgaacgaacaaacaaacagtcgttgaatcgaattcgttgtccaagaggcggcttttgagccaagtcaagatcgatgctgcaggggctccataaatggctaaggcggtgcgctcatacgccatgtggccggcgaataagcctgattacatctgcctgcatgtgcaatcatgaaattaggatattattggctcaattaatggaaaagttacaaaattttaagcatatatgagactacaacttaaaaatgtattgttaccaaagaattctatttaatccaatagggagacccatttattcatattacctatactaatttgttatctatacacaaatctgtcattcgaaacaaccaatggtaaagaatatgtttataatatcaaagatcccattaagtaccaaacgcttaatagggttaaatacagcttagggctttgacaattccaaagatcgattaatccatctatcactcttgaataaacccattaaagcgtctctgaattgagtttttaccacttcattagcttgaggggactttgtggttggtcatagaaacactccatgattaatgaccaaacttgtctgctctacgttcacctaattggttaattaatttgtgtaaatttttgtaaatattaagtcgtttaagtgacgcactcctccgcctttccaactcttttccccctcccaaccaaatgaaaaaggagaggtttgtgccccatatagttataacaaccagtaattaggctttcgcagttttgtttgccttttgtttgagtcttttttctgtttgctgcttgttaactctgttttgtttgagatcactttttggggtccacctctttggggccacacacccctcccagccctgccggccccactcagtgttggcactcaagtggcaattagtgttgacattcattagctgtgattaaaatgagatcagattgtggccggccgatgacgagcagcacgtgagaggagggctgaccgccggaccacgcccaccgcagaactgcgccgaaaggcgtgtgattcacacgctgagtttggcaaagtcaacttaattcggtttatcaggtatatcagctactcgtatttggaaaagattgaagtgcttaaatggaattttaacttcgaacttctagggctttccattaaagttattttgatgtaaatatgatatatacaattcaatcattatacaatatgtattattagtatttaaaacagatccccatatgtacagcattttcaattgaagcgaatcgaagtaaggcgaaatggagtgatccaattagaatgcctgaaatttggctaatgacagcaatgtagggatttgcatgaaaataaatcgcaattcgctggaatgatcatatagagatatatatagagatctacctcacagatgcagatgcagatacagctgcactgctttgatcatgtgttttcttcgcctcactctttcacgcttttcgtggactctattgcaatctgcatctgcatatcacattcacaatggaaagcagaagtgaaataccaaagaatcgaatggaagagaacagcacagagcacacttcgcattctgcaatgctcagatgtgccggtataatagatacacatactcagatacttctgcagatacgcggcaaacacagcagtgcatttagattgcttgagagaggtggggattgaagagatggcggcttcttgtaccaattacttaatttagcaataaaattgcagccggcaaagagcagagaaccgagagcaaaatcaaaagaattgcatctgcaaatgttgcataagaactggcggggcaaatatgagatgataatgttagactttttgccccctggagaagaaggcgccgcattcatgatgaaagtgggttagtggtgcattgaaatggacattttactcagcgatcttttaagtattacgtacttgacaagagactactttactattgaaatatttataatatagttaaggctatggttcaattacacccaaaaaactgaatcacaataccttacttattctttcccaaactgtttttgtttaattaagaagtcccgtgggcgatgtcggatgatctgagttggctgcaaatttttttttcctctgactcaggctaatattttcgaagagaatttcacgcgtctccagtttttttcttttttgtcaaaggtgagcatggttttggagtgagtaatatgcgttcgtttgttcaacgaccctgaactcaaactcagttaaagtggcttttttaatgcaactgaaaatatgacgtgtgtatatttgccttgttttaaaacgttacacaagagggtatccaaatagaaatctctaggggattcccttctagaccagcactgtttcgcatttacatggatgttcgcccgcacgttcacctccagtgagcaggattagttttctcatgtcgtttagggactttttgatggcttttgcgaatcgtatggtgttgatttctttgcaacttttccaagcggagatggcgaaggtgatcttactttcctttggattgtaacacactccatatccgtcggatagaagtggtccgtatgccatgaacccttcattggaggtggctacctgggaggtgaagagctggaaggtcaccgatcggacgtaacccttggaccgaaagaattccggtattggcattcccttttccagtgccatctcctgcaggccaaacaaatgccgatcgataccctgtccattaatggcctctttgatcaacttttcgtgggcatccacggccttttgaagcgctgccaatttctcgctcattgacgccttctccgattgcatggccagtaggaaggtcttggattcattggaagtggatctaatggtctcagtgcgaccctcatggaaaatccttaaatgagcggactcgtactgtgcgggtatttttccgtacatggagtagtaggccagacttagggccatctgaatgtagctatccggattcagaccctgtgccttaatgaagcatttgccgtagcactcgaaattgatcacattcatctgcagctggctgacgatccgctggatatttcgccttgcctggcacaaccacaaattgatgcactcgttcacaggctgaaattttaacaggttggacgtgacctttttgtccgcctcacagccttcgcagccatagtttggctcagtgctaaaatacaagattcatttggcattaaattaaaaaagggttgtatagatatacttacacttttaactgcacaaaatccatcagcatggcaagtggctggcaatccgcgggcgaatgctcgtaacaaaatccggccaaaccatttggattgactatcagctgaatggttttgtccatccaacgattggcgctattctgacgcactccaccaccgtgcaggagctgatgggcctggacaatccgctcctctcccttcggcgtgggtacacagttgtccagacagaccacgaacagggactgctctatggtctccacggtatctgcatttccgtgaggacgacatagtactgtatatgcctctgcccagttgcttctattgtcgtgagtcaaaagaccaaagtgtttgcccactttaatggggcattcaagtatatcttgcaacgcatctctcagtgtatgagcatgcaacaatgctccactttgggaataaattggcaacttaaagtactgtgaaggagacaaggaaaaacaattagattaatataattatagaatattaggtcttactttcaaatgataactttcttagtactcacattattattatataccacaacaatataatcggcatcattatactgttcgatggtatcgcagaatcgacctggcttacgaaccgtaccaaagattttaccaaactggctgttgtccagttggtgtttacccatctgaaccactggaattttgttttggtcgactagctgcttgaactcgcacataccgtagatagctttggccgtgaagttgagaaaatcattggtatctttaaactcctgaatgggaaaggagagacccggactggagaagacggtcagcggagcctgataggtcaaatatgcggaacgtgtccatctgggagttagccagttgtccgtaccctcggcttcttcctcgagaagctgctggagtttcgcaccctcgttgtccacaaacttcttggccaccttctgttccactttgagttcctcctcattaagaaatggttcaatactgcttaaataactggcgatgctttgctttagcggaagagctggaaactttttaagctcgggtttcttattcggatcattgttggcatcggctaggtggcgaatttccgattttatgcatttcttgggaactttttgcggcttttcagcacattgtgtttttacttcgcaattcgatctttttgagtattggggctttgaaagtggctttggagattttattttttccactgtagctattttgatttccttattagaaggtgaaggcgaaagctgtggagcttgaggtgccttggtgtctttaattggtgatggcaagggtgctttaactgttgagatacttggatctttgggggaaggaagagcagacatgctgatttccttgaccggtgttgggggtggcgaagtttgggatgaagccttcgacactggtgcggtgtgagattctacagacgttgctgcatcagattgtttaaaatctttttgcgaaaccgttttcaatgaacttgatgctctttccagttttgcggcattcgatctattcttcttagattgacaggaatcggatgctgaatggcaatcgttgactatttttttaccgcaaggaccttcttcttcttttttggatgatccccttggcccatcccggcaaggatttcttccaataggaaatgccatcataagaggcatggaaaaccgggaagttgacaccggtggtagcccttcgtcttttggttgtttaatagccttagaagccggtttcttactctttggttttgatggattaacaacaccctgcctcattgactttttctttcgaggttcggcttttggtgcagcactttccggagatttaggtgaaccacttggaacagtagctgctttcttactcacagatgcatttgggcaagatgccattttcttttcttgcttacattcactttttgccgcaactttcggcttcttggctttttgttgtggcttggaatccgttgccgcacccttagatacttttttctcattcttaccatcaacgcaagggtttcttcccaatggaaaagccgaattcgacggcatattaaaaccaacctttggattttcaggtgatttatctgtttgagctttatttggaggtgggctcgcgatctttggctttgcggaagcattttcttttttctgtgcgtctggtgcagtagaatcaactgttttaggtggatcttttgacttggatttagacttttttttaactggaggcttgttctcatctttcgatgagggacaagatttgggtttgggtggcggacatttcgattttttagcttttttgccgtcaaaacagggatttcttccaatcggaaaagctgatttttgcggcatggaaaatctttcattaagagaattagagcttggggaatcggcaggttttcttggagcaacagatggtagagattggccaaccgatggtttggatgcggatgttgaaggcttctttaaaacacttgccaattcagttttactgttttccaatagtagtgatgtcgcctttccaataactgactctacagattgactatggccatctccaatgcaatttttgcagttggcaatcgttatctctggactattttcaaaacagttcttgca

SEQ ID NO: 10616 - DNA, 1686 bp, DROSOPHILA
atgggccaaggggatcatccaaaaaagaagaagaaggtccttgcgccgcaaaaagttcccaagaaatgcataaaatcggaaattcgccacctagccgatgccaacaatgatccgaataagaaacccgagcttaaaaagtttccagctcttccgctaaagcaaagcatcgccagttatttaagcagtattgaaccatttcttaatgaggaggaactcaaagtggaacagaaggtggccaagaagtttgtggacaacgagggtgcgaaactccagcagcttctcgaggaagaagccgagggtacggacaactggctaactcccagatggacacgttccgcatatttgacctatcaggctccgctgaccgtcttctccagtccgggtctctcctttcccattcaggagtttaaagataccaatgattttctcaacttcacggccaaagctatctacggtatgtgcgagttcaagcagctagtcgaccaaaacaaaattccagtggttcagatgggtaaacaccaactggacaacagccagtttggtaaaatctttgataccgtggagaccatagagcagtccctgttcgtggtctgtctggacaactgtgtacccacgccgaagggagaggagcggattgtccaggcccatcagctcctgcacggtggtggagtgcgtcagaatagcgccaatcgttggatggacaaaaccattcagctgatagtcaatccaaatggtttggccggattttgttacgagcattcgcccgcggattgccagccacttgccatgctgatggattttgtgcagttaaaagtcactgagccaaactatggctgcgaaggctgtgaggcggacaaaaaggtcacgtccaacctgttaaaatttcagcctgtgaacgagtgcatcaatttgtggttgtgccaggcaaggcgaaatatccagcggatcgtcagccagctgcagatgaatgtgatcaatttcgagtgctacggcaaatgcttcattaaggcacagggtctgaatccggatagctacattcagatggccctaagtctggcctactactccatgtacggaaaaatacccgcacagtacgagtccgctcatttaaggattttccatgagggtcgcactgagaccattagatccacttccaatgaatccaagaccttcctactggccatgcaatcggagaaggcgtcaatgagcgagaaattggcagcgcttcaaaaggccgtggatgcccacgaaaagttgatcaaagaggccattaatggacagggtatcgatcggcatttgtttggcctgcaggagatggcactggaaaagggaatgccaataccggaattctttcggtccaagggttacgtccgatcggtgaccttccagctcttcacctcccaggtagccacctccaatgaagggttcatggcatacggaccacttctatccgacggatatggagtgtgttacaatccaaaggaaagtaagatcaccttcgccatctccgcttggaaaagttgcaaagaaatcaacaccatacgattcgcaaaagccatcaaaaagtccctaaacgacatgagaaaactaatcctgctcactggaggtgaacgtgcgggcgaacatccatgcagatgtaatcaggcttattcgccggccacatggcgtatgagcgcaccgccttag

SEQ ID NO: 10617 - protein, 561 aa, DROSOPHILA
MGQGDHPKKKKKVLAPQKVPKKCIKSEIRHLADANNDPNKKPELKKFPALPLKQSIASYLSSIEPFLNEEELKVEQKVAKKFVDNEGAKLQQLLEEEAEGTDNWLTPRWTRSAYLTYQAPLTVFSSPGLSFPIQEFKDTNDFLNFTAKAIYGMCEFKQLVDQNKIPVVQMGKHQLDNSQFGKIFDTVETIEQSLFVVCLDNCVPTPKGEERIVQAHQLLHGGGVRQNSANRWMDKTIQLIVNPNGLAGFCYEHSPADCQPLAMLMDFVQLKVTEPNYGCEGCEADKKVTSNLLKFQPVNECINLWLCQARRNIQRIVSQLQMNVINFECYGKCFIKAQGLNPDSYIQMALSLAYYSMYGKIPAQYESAHLRIFHEGRTETIRSTSNESKTFLLAMQSEKASMSEKLAALQKAVDAHEKLIKEAINGQGIDRHLFGLQEMALEKGMPIPEFFRSKGYVRSVTFQLFTSQVATSNEGFMAYGPLLSDGYGVCYNPKESKITFAISAWKSCKEINTIRFAKAIKKSLNDMRKLILLTGGERAGEHPCRCNQAYSPATWRMSAPP

SEQ ID NO: 10618 - DNA, 4148 bp, DROSOPHILA
gacatttttatgcgttcgcgactgcttggtgttcgaccttggaggcgaggactccgattcggatgcagatttggattccgttgcggattcgcgccgagatacggatgaggagttggagtcgtctgtggtcaaaggtgttgcggcatctgtgtgacgggcgttggggtttttctttcccataggtaaccggctgtttatccgcccagcacgtcgaagatctgcaagaaatgcgattttgttgcgttactggttttttatttgcagcctgcaaaaggtaatgttctttttttttcgttcgttattatatttttattgtcagcatttgccgcgcgttcttcgcttcgctttctcttcttctttccacctatcgcacttcctctgttcgctctcttcgccttttttttgcaatctgcgtctgtctctctctatttttttttgtgtgtggctcggcaccactgctaaatctattatttatccgaaaacactttagtttccacatcgaaaatatcactagatcggtttgttctgctgtgttcacctgctactggttgtgtggccgcttcatcgcgtcctgccactcgatatccactcctttttgcgagcctttaattgttatttttcagcgtgaagacgccgcaattccaacttgggtatactaaattcgtaagggttgccaggccaccggacgagctgttatcggtggcttgactcatgcgatagtatcgaaccgaggcggttgaaatcaaattgttcaatatgcgcactatcatattacttatatgaaatactaagtaaagaaagttaatattatataagcattctctccttaatcgtattttctttattacaaactgtaacgtgaataattttaaaacataagatatttccctatcgatactatttgtaatcgcttagccacctctgggacaaacagctgatttcgcgcaccggctaaaagccaatgaaaataaacgcttaattagttcaccggccgtttattatgaacgatattaagcgattgaaggatcagcagcgcgagaagcatcccgggttcgatggttacatggactgcatgacccgctcccttttcacggggctcgccacattttgtttaagtgcgtaattagcttcagtttttcgataattgcataataattgctcaaactacaggtttttccggcacctatttcgcccagaagatagtacaatcaaaaattcgctacccaatcaagtacaacatacttatctcctcactggtggccaccggcgtgtcctaccaaatcacatcgacacggactaaagcctgccaagcggcgtggatggcctttgaggacaagcattcggtgctcaaagagaaaaccttttaacaccttcaaaattccatttagctttagtcatgtctgctctacgaatattggcccgatttgtcagcactaggactctgcgaattcgtccgattctggagattcccgcacgctgcaagtacacccaacatcaaggagttaagggcattcggaacaggaagagcttcttcgaagcccaaattcaggcaggtcaacaaggtgaggaggatgcggacttagagcggacagccaatagcgatctggcggatatgcggttcttggatgatcggtaggcttaaaaatcaaagaaaaaaaaagagatattactaaccttttatttaagagcctacgacgaggtggctggaggagccatgagaatcacacgtgacatagccagctctcagcaggtgctcatcctccaaccgtatgtaaaatgggcagccaaacgacagaacgcacccgtcgatgttcggcccgaggatcaactcgcggaggccacagcgctgatccactccctgcccaattggcaggtggccagggcattaaaggttcccctcgaaagcctcgaaaagaagacgcttttcggcagcggcaagctggtggaactcaaggaactggtcgccgaattgcggcaggaacggcatctaacttgcctgtttgtcagcaaggggacactatcattcgcccaaaaacgtttcctggaggcggagtttcgcctgccagtaatggatcgctattccgttgttatacagatactaagactgcatgccaccagcgccgaagcaaaactgcaggttactatactcattgaacaagcactataacgaattagatactgatcatgttatttaggtagccatggctgaacttccttacatttgggcgcaggctaaggatgccagtgttacgcagacgcgtcgtcagggctacgccttgaccgatctgcagaaggagattctgcgaaccagggagcgaaagttgcgagcggaattagatcgtgtccggcgacagaggcagttgcttcgccagaaaagaaaacagcaaaattatcccatcgttgcagtggtgggttacacaaatgctggcaagacttccttgatcaaggcactcacagtcgaggatgcactgcagcccaggaatcagttgttcgcaacgcttgatgtgactgctcatgctggttgtttgccatgcaatctggaggtgatctatatggacacggtgggctttatgtccgatctgccaacgggactgtttgaatgctttgtggccactttggaggatgccatgctggcggtaagtaaaatcttctgccattaaaaagttctatacataaaaacctttttccttcgcaggatgtaatagtccacgtccaggatctttcccatccgtgtcacgctgctcaacgcagccatgtggaggccacgcttcgttctttggcattcaacgtggctggcggagattccacggccagccagttgccgccgatcattaatgtgtacaacaaatgtgatcttgtttcccaagaggctcagtcgtctgcagacccagtgcatcatatatcagccagagcacagactgggctggaacccctgctagatgacatcgagcaacagatattgaccgccaccgggcgaagaaaacttcagatgcgagtgcccagcggcggtccagaaatggcttggctgtacaaaaacgcagctgtggtggaaacgacagcggatgcggagaatcccgaacgcctcatgatgcacgtggttatcagccaacgcacactggatcagttcaagcgacagttttgccgatgaatttaaagtgccatggataaatatctgaggcgcaactggcaccgactaaatgtttattattgctctcgttttttttgttggtttattagcgggtgtagttaggactggttttcttttcttgttttaaattctatacaaatataaaagtatctgccgaaaactaaaacgaaacaatctctaaaaatattttttaacataatatttgtattgtattgcacttctctgacatttttgtgctgtggttttctctaggaataatcgaaactaaacccttgtgggatcagttttcgcatcaaccatttttgtttatataactagggcaagttttttttatttatttttctttgtgtggtgctgacttctctattggcacaatggaatatttaaaaataatgcagggttgatgagcataaacaacttaaaatacagaaactgaaacaaacttaacaccagcttaaacctaaagtaacttaaaattaaacaaaaatgcgttcaacactctagtgtacaaattaaaaacccatttatgcgtgtgaaaattgacttaaaaattgtgctaaactattttcgttaaaaaaagtgaatgtgctttcaatgttacattttgttggcaacatttctatgaattcctcggctaaaaatatatgtgatatatatttcgatgggatctaacactaaccggcttgtctatacaacatttttgaatgaaaaatccacttttttgcaagtgtatgtttttggcggtttcgtgaatttcatttgcttcatagcgaactggacataaaatatcagttgttagactataagattctctatgcactcggatacactaacactcaaggatggatcgatttcgctagtcacaaaattgtagttcaatcttattctagcatagctcttttgtcttcctaacaaatgggtgtcgctatgtacattatcaaaaactcttaaatggcaggtggaaaatagggaatgttaattatgccaatataaataggat

SEQ ID NO: 10619 - DNA, 1704 bp, DROSOPHILA
atgaacgatattaagcgattgaaggatcagcagcgcgagaagcatcccgggttcgatggttacatggactgcatgacccgctcccttttcacggggctcgccacattttgtttaactttagtcatgtctgctctacgaatattggcccgatttgtcagcactaggactctgcgaattcgtccgattctggagattcccgcacgctgcaagtacacccaacatcaaggagttaagggcattcggaacaggaagagcttcttcgaagcccaaattcaggcaggtcaacaaggtgaggaggatgcggacttagagcggacagccaatagcgatctggcggatatgcggttcttggatgatcgagcctacgacgaggtggctggaggagccatgagaatcacacgtgacatagccagctctcagcaggtgctcatcctccaaccgtatgtaaaatgggcagccaaacgacagaacgcacccgtcgatgttcggcccgaggatcaactcgcggaggccacagcgctgatccactccctgcccaattggcaggtggccagggcattaaaggttcccctcgaaagcctcgaaaagaagacgcttttcggcagcggcaagctggtggaactcaaggaactggtcgccgaattgcggcaggaacggcatctaacttgcctgtttgtcagcaaggggacactatcattcgcccaaaaacgtttcctggaggcggagtttcgcctgccagtaatggatcgctattccgttgttatacagatactaagactgcatgccaccagcgccgaagcaaaactgcaggtagccatggctgaacttccttacatttgggcgcaggctaaggatgccagtgttacgcagacgcgtcgtcagggctacgccttgaccgatctgcagaaggagattctgcgaaccagggagcgaaagttgcgagcggaattagatcgtgtccggcgacagaggcagttgcttcgccagaaaagaaaacagcaaaattatcccatcgttgcagtggtgggttacacaaatgctggcaagacttccttgatcaaggcactcacagtcgaggatgcactgcagcccaggaatcagttgttcgcaacgcttgatgtgactgctcatgctggttgtttgccatgcaatctggaggtgatctatatggacacggtgggctttatgtccgatctgccaacgggactgtttgaatgctttgtggccactttggaggatgccatgctggcggatgtaatagtccacgtccaggatctttcccatccgtgtcacgctgctcaacgcagccatgtggaggccacgcttcgttctttggcattcaacgtggctggcggagattccacggccagccagttgccgccgatcattaatgtgtacaacaaatgtgatcttgtttcccaagaggctcagtcgtctgcagacccagtgcatcatatatcagccagagcacagactgggctggaacccctgctagatgacatcgagcaacagatattgaccgccaccgggcgaagaaaacttcagatgcgagtgcccagcggcggtccagaaatggcttggctgtacaaaaacgcagctgtggtggaaacgacagcggatgcggagaatcccgaacgcctcatgatgcacgtggttatcagccaacgcacactggatcagttcaagcgacagttttgccgatga

SEQ ID NO: 10620 - protein, 567 aa, DROSOPHILA
MNDIKRLKDQQREKHPGFDGYMDCMTRSLFTGLATFCLTLVMSALRILARFVSTRTLRIRPILEIPARCKYTQHQGVKGIRNRKSFFEAQIQAGQQGEEDADLERTANSDLADMRFLDDRAYDEVAGGAMRITRDIASSQQVLILQPYVKWAAKRQNAPVDVRPEDQLAEATALIHSLPNWQVARALKVPLESLEKKTLFGSGKLVELKELVAELRQERHLTCLFVSKGTLSFAQKRFLEAEFRLPVMDRYSVVIQILRLHATSAEAKLQVAMAELPYIWAQAKDASVTQTRRQGYALTDLQKEILRTRERKLRAELDRVRRQRQLLRQKRKQQNYPIVAVVGYTNAGKTSLIKALTVEDALQPRNQLFATLDVTAHAGCLPCNLEVIYMDTVGFMSDLPTGLFECFVATLEDAMLADVIVHVQDLSHPCHAAQRSHVEATLRSLAFNVAGGDSTASQLPPIINVYNKCDLVSQEAQSSADPVHHISARAQTGLEPLLDDIEQQILTATGRRKLQMRVPSGGPEMAWLYKNAAVVETTADAENPERLMMHVVISQRTLDQFKRQFCR

SEQ ID NO: 10621 - DNA, 4615 bp, DROSOPHILA
ctccaggcaacccatataaccacatatccgtgtattatcaagtttggcctctggctctctttatcgaacctcatctatcggaagcccagagctagttgtagatctcaacagactgagtattgtcccaccccgctcccattatgcgttgtatataacataaacataggtgtactatagaaaaggtctcaaaaaaaaaaaatccattgtaagtaggttctaaattgttgtagtttgtagcaagaacccatcgtttccataggttagccttatccagtaagtgccatcgaggcgcaaacaaggatctctgatacgaaatcgaaccttaaaacctaatcctaagttatttgtattctaatatactgagaagcgactaacaagcaaacgagttgagcaaagctaattcaattccatattattttcaagactgggcttcgtcattgaggtcaaaaatgatatttatcgtacgatttagtgttattatgtatgtataactcataactcaggttgagattgcaactgacatttattttgctgtgaagatattcccataagttttctttaggcccgatcttttctgacagctgaaatgccattagttcaatcattattacaatttcccctgcattaccattttactgttggaaaagttcgttcgaatatgcttcgatctgcagctgataaagagccaaatgctttaaacttagaacttgtaaatggaaacaaactatcttaaactcaactacaactaccttaataattttagttagctcaatgtttaagatttgtacatacctataggacgagtcgttagaacttgcttaagcctgtaaatacgatgaggataatgtagacccattttgtacataactgtttatatgtttttcaaaagagcttaacaacaaaatgtaattgaacatgctaaccaaaccaaaaaaaaaaaccagaacattatcgatacagagttgtaataaagcaaaacaaaaaacagttacaaaaacttacataattgcatgttatttattatttgattcattcttaatagtaagtaaagagagggagtaaaaaatgtatatgaattctactcagacgcgcagcttggcaacggcattctgaagaatctggaactcggagttaatgttgtccatcagattcgaaatctggggcttcgagtcgagaacctcaacactctgagtataggcattgtagcgaacaccaaagggtcggggaatcgagttcgcaaatttactaaaagtaattcaagttatttaacactttcgttagatatgtttaggcctagtaacttacatggtcttctccttggcggtttcgaaactatcggccacatagtacagaggctggaactgagtaatgggatacttggtgacgccagtgacctccggctcaaagtccttcagctgcggcttgtccgtgaggcaatactccagttccccgtaggaggacagcagaccagctccgtacgccttcaactcaccctcctggcggcacacgccgtactcaacagtgaaccagaagatctgaaagaaagaattcacgcatcacacagttatcctttgttagcctagagcaaagagccacttacggtggacaatttctcaatgtaatcatcgggtgctcccagggaagctagcccgatctcctgactgaattgggcaaaagctggatctgcaaaaagcggcacgtggcccatcagctcgtggcagacatctggttccggtgtgtacatgggcttgctgggatgtcggatatactgagtggagtggaagacgcggaaggccagtccagccaggaaatcccgagagctgagtagtccagccactggacgcagagtgaaacctgtgcaatctgaagtgcagcaatttaatgttacgaattctatctaatgggcagtaatcgaactaacccctcaaaaagttggacacatcctccagctggggaatgttatcctctcggaatccacagttgtccaccagcaagggaaagacgtggttgtactcgcgacaggcatgtgtcttatacagcttcgtaagattcctgaagataatgccccaggtctcgatctcctccttggtgtaatccacatggggcaagggctcgccatgcttgtagttgtaggcaatgtcggcgaagtacttgcgacgcttgcggtattccggatcggtaaaaccaggatgatcggcatccagctccgatccgtagctcagaatctgattggcgaaacgatccagatcgcgtatacgccgcgggaaccagggcacagccgtggcattatccttgtagtcacgcgaaatgatgttaaagtagctacactgctccttcacatcctcgatggcttttcccaaggctcccgattttccatcggcctccacgaaaaactcataaccgggaacacgcagcgaggaacgcgactcaatatgcaccaggtttatgtcatgcttcttgaagatggccaaaatgttggccaaagctccgctggacaacgacgaatccttgggcgaaaacagaagacaggtgttcctggcctccttaatatctacaccctcgactatgtaagccgaatcctctacgcgcgttggctgtaataaattcattggtaatttaaaaaatatttacggtttatatttttgctgtttgggaaaacagccattgcatcattggaaatttgacagattgactccgagtgacctgggctaaacgagcagtcaagccaaactatttaatatagataatatttctctgctcttatgactatgcaatgtctatcagcaaatctcctattacagaggctaccagggcccaaatcgcataatcatttaaccgaagccttatatgagccaacgaactgtaattgtagtacttgcctcagatctgcatcattgagattgtttgtgttttggcttgaacccccatattgaaggtttaggtccgaccgcaatggcaatcagcgcatattgccaaggactcggcctagaacttggtgtgctgtatctgtgggaaggtctcccaagtagtatactttgcaagatcttgagccataacaaggtcctctaacagggctgaattatttgttcttaatgtatttatatgacatcttattaagctgtactgtttctacttccaatatatgcgcctgacgtcttaattcaggttttactctacaaaacacattaataaactacttgtttaggagcgaaaataaaataaaccactaggagtcccagacaccactctgttttcctttgtctagaactattgcgaactaacccaattccatgacaggttttatacattatagatccgcattctcatttcaatcaaaataataaaattatattttatttgaattttttttcctcaaaggttggacaagttcatgctgagaacgcagaataataaacttgttattgtttttaatttattagctattttacggatcactttctataccgggtgcacagaggactctcgccgaagcaacaaaccttatcaaaggagacctgccgctggtacattttcacaagattctcgggtttctccactgataagtacaataaaaccgatggcgaacgatccgttcagcaaacgaattaaaactgatttaatttctctatgaatcgcgcgcttaaatagacttttcgataggccccatagctgagcccaaacgaaaatcaatccgaactgaaaccagtaaaaaatacaaataatatcgcgggcaatcgggcgagtaaatgatcttggaacggcatccacatgcgatccaatcgcggctatggctctgcggctgcggggttatcagtgcccagtgtctcgatgggcctaaaatcccatttcagtattcagcttcattacagaagccgtcgtctagccgatcaaatctaaatgttgaggcttaaatacagtctagcatccataattcaaaatacgaaaaaaaggaacgcctgattcgaaaaaccagttttgaatgttatagatctgtgttcctggaacttaggcacagttttctatagataaaatataatatcgtaaacaatgttttcttacttttgaagaacccaaagcacttccttttcgcatgttccactgtattttggaaatattatcagctaagactcgcccctctgctggggtccaaattaacaaaacattatttcagctagttttagatttgctttgttttgcaaaaaatcatactgaataatctgggctgtgtttttctaatgacaggttctaaccaaacgagttcaacggcatttcagggcaattatttcagtagtgaatagctccaagtgggcctggcacgcgctactcttggttttttttttatacttgcggtccacatcagattgactggaatcaattagtccaatcgttacactcacccgaactttttgtcggattttgtcttttaaatggtaatacgctttccttaagtctaggtgacttacattgtggtacccacttgtaattgttaatctatgagtaggtttattattgtttcaagttcagagttcactcggtataagcacgtcaacagataaccccgaaatttaagctgatgtaatattacaagagcttacaaaagctaaagcaataaacc

SEQ ID NO: 10622 - DNA, 1526 bp, DROSOPHILA
tcagttttaattcgtttgctgaacggatcgttcgccatcggttttattgtacttatcagtggagaaacccgagaatcttgtgaaaatgtaccagcggcaggtctcctttgataagccaacgcgcgtagaggattcggcttacatagtcgagggtgtagatattaaggaggccaggaacacctgtcttctgttttcgcccaaggattcgtcgttgtccagcggagctttggccaacattttggccatcttcaagaagcatgacataaacctggtgcatattgagtcgcgttcctcgctgcgtgttcccggttatgagtttttcgtggaggccgatggaaaatcgggagccttgggaaaagccatcgaggatgtgaaggagcagtgtagctactttaacatcatttcgcgtgactacaaggataatgccacggctgtgccctggttcccgcggcgtatacgcgatctggatcgtttcgccaatcagattctgagctacggatcggagctggatgccgatcatcctggttttaccgatccggaataccgcaagcgtcgcaagtacttcgccgacattgcctacaactacaagcatggcgagcccttgccccatgtggattacaccaaggaggagatcgagacctggggcattatcttcaggaatcttacgaagctgtataagacacatgcctgtcgcgagtacaaccacgtctttcccttgctggtggacaactgtggattccgagaggataacattccccagctggaggatgtgtccaactttttgagggattgcacaggtttcactctgcgtccagtggctggactactcagctctcgggatttcctggctggactggccttccgcgtcttccactccactcagtatatccgacatcccagcaagcccatgtacacaccggaaccagatgtctgccacgagctgatgggccacgtgccgctttttgcagatccagcttttgcccaattcagtcaggagatcgggctagcttccctgggagcacccgatgattacattgagaaattgtccaccatcttctggttcactgttgagtacggcgtgtgccgccaggagggtgagttgaaggcgtacggagctggtctgctgtcctcctacggggaactggagtattgcctcacggacaagccgcagctgaaggactttgagccggaggtcactggcgtcaccaagtatcccattactcagttccagcctctgtactatgtggccgatagtttcgaaaccgccaaggagaagaccattaaatttgcgaactcgattccccgaccctttggtgttcgctacaatgcctatactcagagtgttgaggttctcgactcgaagccccagatttcgaatctgatggacaacattaactccgagttccagattcttcagaatgccgttgccaagctgcgcgtctgagtagaattcatatacattttttactccctctctttacttactattaagaatgaatcaaataataaataacatgcaattatgt

SEQ ID NO: 10623 - protein, 452 aa, DROSOPHILA
MYQRQVSFDKPTRVEDSAYIVEGVDIKEARNTCLLFSPKDSSLSSGALANILAIFKKHDINLVHIESRSSLRVPGYEFFVEADGKSGALGKAIEDVKEQCSYFNIISRDYKDNATAVPWFPRRIRDLDRFANQILSYGSELDADHPGFTDPEYRKRRKYFADIAYNYKHGEPLPHVDYTKEEIETWGIIFRNLTKLYKTHACREYNHVFPLLVDNCGFREDNIPQLEDVSNFLRDCTGFTLRPVAGLLSSRDFLAGLAFRVFHSTQYIRHPSKPMYTPEPDVCHELMGHVPLFADPAFAQFSQEIGLASLGAPDDYIEKLSTIFWFTVEYGVCRQEGELKAYGAGLLSSYGELEYCLTDKPQLKDFEPEVTGVTKYPITQFQPLYYVADSFETAKEKTIKFANSIPRPFGVRYNAYTQSVEVLDSKPQISNLMDNINSEFQILQNAVAKLRV

SEQ ID NO: 10624 - DNA, 2529 bp, DROSOPHILA
tccactcgattccactcgcaacaatttcgtattgcttacattcatttactacagagaaatacgaacatatataccatacatacatatgtatgtatatataattcgttatttttttctcgctcgagcactacatttatgacagtacagtaagaacttagccatgaaactatatttatatcttcagtatatggcagtacatctaccattaaatgtattttcataggtgaaatcggtaatctcgatttaaatgtctgctctgattgctcgttttcgttttcatgatatttgtttgcgagcaaacagaacttttatttattataatttggttgggatagttcaagataagcactgatatgtcccagaagttcagatctgaaatgtttatggaacagtggcttatttccctcgaataattgcctcttttcactgctgaaatctgtaatctctgctgcgattgcttgacccccagataaaaagtctgtcaaaaggatcaataacattatctatataggtcgtacatgtgttggcgtgtttaggtatatgatgcatgacccttctataaatcatgcggctcttgcaacctcctaatggagtttggctttagtttttgttgaatttttccgacacaaaaacgtgtatcagagaagcatcgcaaaatggccagcggcccaaattcgacatggttccattgttattgaacagaggaccacgaaaggataaagaaaaagaccgatggcactggcggctgatgctccggcaaaagctgctagctgctccggccagagtgccgtaaattgtgataaaattcacagaaatttaattacgacggggcctatccgcaggcggatgggatggcgcaactgcatttcgattcggaaacatgtcagttgccaggtaatttattgcggtacacactttctgtggcaactcaaaacccgcacggatatcacttacatggctagcggtggcgatggcgacacgttccgcggatatgggatgcaatcttcagtcgagttctgctatgttggcatatagataatggcgatggcgcaactaaaccgacagttttggcctgccagctcaacgaaccgcgacgcgaacacggaacacggaatacggaatacggatgcgaaacgggttacgggttacgggttatttcgatggacacggatttaccggggtaccagcaacggatgcgggtacgggatcgggaccgaacgagatggaggtgtcagtatattgcccgtggcacgctgtgaattcgcaactagccgttgcatttgcggctttgccacaagttcaaactgcgtgcaatgcccataatgccactctcttcctttctccctctctctctatctatctctcacacaaacacacacttttgcactttctaaacactttggtacggggttatttcgtgcttttgcctctggggccacctctatatttatattcaaccgaccctcgtcgaaggatcgcacgatattgttatcctgtctgagttatcctcgcgttttggttgctgtaaccgcgcgctgcgtgttcattgctcgactgcggcaaactgacaggcgaggaaagcgcgccgcttttccattttccgttcgcctaggtcgtgtccataagccgaaggtacaagtccccgaactcttagccggataaaagcgggccgaaagagagaagaggactcgaagtgaaagagagcgccattctcttcggctcgcaacaaacttaaagtcaatgttggctctgcgattaaggcctttgggaatatggccctatttcggcttgggtctgcgcttcaaattcaatttggccactctcacgttggctgctgcaatttcggggcactcgaaggcccaaaaaccccatcccgcacccccccgataataaagcgcccacacccgaaaacacctccgcctcagctcggcacatgcaaagtgcgggaaaaacgggcaaacaattgggtcaattggtcatggctgtcaaggtcttaaactttcgtatttatggcatgccatgcattgtaattttaactttaatttgtaaactcgtatgaggggcgagtggaggaactacattccgatccggaacggctgttgatggcatcccgatgaaaggggtggaaaggatactgggcgtcaaaggggttaccaagtggccgggctgcgtgcgttgcatgtgcagcaatttccgccgtagtcgcgtgcttccgccatccagtccggccggactgcgacggattgccacggactgctccgtactacgccggaatgcgacgctcggggctgccggacagcacttaagtatctgttgccgacaaagtgacaccctccagataatatccgcaacttgtggtctccgcgtgcgacacactgccgttcataacgcgcgcgtgtctcccctgaatagtcctattgataataaccacttgcagtgctggctgtaatgtaggacgcaataaatggcgcggaatgggtgacagaagtccacccatcgcaagagtattgggaaataaatgattatatg

SEQ ID NO: 10625 - DNA, 529 bp, DROSOPHILA
aatcttcagtcgagttctgctatgttggcatatagataatggcgatggcgcaactaaaccgacagttttggcctgccagctcaacgaaccgcgacgcgaacacggaacacggaatacggaatacggatgcgaaacgggttacgggttacgggttatttcgatggacacggatttaccggggtaccagcaacggatgcgggtacgggatcgggaccgaacgagatggaggtgtcagtatattgcccgtggcacgctgtgaattcgcaactagccgttgcatttgcggctttgccacaagttcaaactgcgtgcaatgcccataatgccactctcttcctttctccctctctctctatctatctctcacacaaacacacacttttgcactttctaaacactttggtacggggttatttcgtgcttttgcctctggggccacctctatatttatattcaaccgaccctcgtcgaaggatcgcacgatattgttatcctgtctgagttatcctcgcgttttggttgctgtaac

SEQ ID NO: 10626 - protein, 92 aa, DROSOPHILA
MAQLNRQFWPASSTNRDANTEHGIRNTDAKRVTGYGLFRWTRIYRGTSNGCGYGIGTERDGGVSILPVARCEFATSRCICGFATSSNCVQCP

SEQ ID NO: 10627 - DNA, 2669 bp, DROSOPHILA
tcgatgggccgcttcatttcctctggaactgcgggcgcagactcaacgagctgcaattccttaagctcctgcagccgcatcttctttttattacggattttgtccaacaaataggtttcatcttcggcagcagagggtggagcttcatagccggatgggatttgtggtgtaggcatctcctctgttgttttactactgctgcccagcagtttgcggaattcgttgccttgcggagtcggtagttgtgattttgtgggccaatcctggattttaagctcccgcagatcctgccaccttcgctcggcgaatttctgcagatgctggagaagagacggtgggatactgaagtcaccctttcccgtccctaaaagctgccagtttttaatgacggtttcatcgtgggagcgtatcctttgcacacttctcggtcgccacttggcccgcagaattttctgcacaatgtccggagtggcgggaaaactttcggccaatcgctcaacgctccattcctcgggatctcgctcgtgcagcaggcgcatctgctccttttcggcatgaagcaagagattgggcaacttggcgtctcggaaatacttgtgctttatcataaactgacggatgcggtcgcgatgctgctgctgctccctctcgtactgccgatgggtcttctgcacgtccatgaaatccgactccagatcggcgtaatcctcgctagcttcgctgctcttttccgggtgctcctgcagctgctccagctggtaacctagtccaggatttgcgcgacgaggagctctcgccaacagacaggagcgagcagtgtgcaggccgcgttggatcatgcgggcagtcatcttggtgaacaattttaagtcatttaaactttttgtttacataaacagccgcatgcaaaccgcgattaaggctatcgatatatagcgcttatcgtcttctaattcattatcgataagtcgtcggtatagcactttacaaaacgtaacaaccctcccgaaattgtgttgctgatttttttgttgtttccgctgaaccggcgaagttatttgtatttaattgtttattcgacttccaagctcacgaaatcatggccagcaatgagtccggcggcggtaacctgatggacgagttcgaggaggccttccagtcgtgcctgctgacgctgaccaaacaggagccgaattccgggacaaacaaggaggaaatcgatctggaggtacagaagaccacaaatcgcttcatagacgtcgcccgccaaatggaggcgttcttcctgcagaagcgttttctcgtctccacgctgaagccctacatgctgatcaaggacgagaatcaggacctgagcatcgagattcaacgcaaggaggcactcctgcagaagcactacaatcgcctggaggagtggaaggcctgcctatcggacatccaacagggcgtacacagtcgccccacgccgcccatcggctctggaatgctgcaaggtcccggtggcggaatgccacccatgggaggtacaccgccgcgaccgggaatgatgcccggaatgcctccgggtgcaatgcaacccggcggacccatgcagcccagtccacacatgctgcaggcacagcagatgcagcagctccgcatgataagcagacaaatgccacccaaatgaaacaggaatgcattccttttagcttgtaatcttgtatagacctggattagttaaataaaccgatttgattatatatcacgaacgtttttataatccttatatagttcgtttcttactcatagttttgatgattaatagttttccttcccatatctgcaaaacattcacttttgaggagaaaaatcgttacgcatttattataatatctgtgccatttatttttgttatctttatgtcgcgtgttaaataattgtaattctgcttgtcctagccggatacgcagaattgtttgtatatagccatgatctatatcgtgtaaatatgtatttaaatcatatgctgtatattttgttgtttttacttgtatctaatgtaagtctacacatgaattaggacagtttcgaacttaactgagttgacgaaaaaataatcttatgcgctcggttatgggtaattggtaattgtaattagataggataaaccacatttgtaactttagtccacaggaaatatcgacaaagtcgacgaattacctacgattaaattaaagggtgtaaccacggcattggttcgattcgggtattttagtcgatctcgtataccttatccggttcaaagcccggagcaggtgctgccggtggcccatgtgccaccgatccgcccgccattggcggaacaccaccagtgccctggttgtagccagcggcattgggattctggttggcgtagagcaggggattcatgtacatcccgctgggatggacaatatttgagtgcaggttgaggagatccttgtacatggtcggatcgccgttgttcatctcattgtacagttgctgcagataggtaggcaccagctgaatgacctggttctggttgagctcctgatgatccttcgatatcttcatgttcagcagctgcagcaatatgtccgagcggaagccgaagatcttgttggacgtcacgctgccggaggcattgccaaactggcccatcacct

SEQ ID NO: 10628 - DNA, 669 bp, DROSOPHILA
ccctcccgaaattgtgttgctgatttttttgttgtttccgctgaaccggcgaagttatttgtatttaattgtttattcgacttccaagctcacgaaatcatggccagcaatgagtccggcggcggtaacctgatggacgagttcgaggaggccttccagtcgtgcctgctgacgctgaccaaacaggagccgaattccgggacaaacaaggaggaaatcgatctggaggtacagaagaccacaaatcgcttcatagacgtcgcccgccaaatggaggcgttcttcctgcagaagcgttttctcgtctccacgctgaagccctacatgctgatcaaggacgagaatcaggacctgagcatcgagattcaacgcaaggaggcactcctgcagaagcactacaatcgcctggaggagtggaaggcctgcctatcggacatccaacagggcgtacacagtcgccccacgccgcccatcggctctggaatgctgcaaggtcccggtggcggaatgccacccatgggaggtacaccgccgcgaccgggaatgatgcccggaatgcctccgggtgcaatgcaacccggcggacccatgcagcccagtccacacatgctgcaggcacagcagatgcagcagctccgcatgataagcagacaaatgccacccaaatga

SEQ ID NO: 10629 - protein, 189 aa, DROSOPHILA
MASNESGGGNLMDEFEEAFQSCLLTLTKQEPNSGTNKEEIDLEVQKTTNRFIDVARQMEAFFLQKRFLVSTLKPYMLIKDENQDLSIEIQRKEALLQKHYNRLEEWKACLSDIQQGVHSRPTPPIGSGMLQGPGGGMPPMGGTPPRPGMMPGMPPGAMQPGGPMQPSPHMLQAQQMQQLRMISRQMPPK

SEQ ID NO: 10630 - DNA, 4060 bp, DROSOPHILA
gcaaaaaaaaaaaaaacaacacttaccgacaaccccacagaactcgatttgaattctttttgtttaatttctgcataaaatagtttgtaatatattattaacaatacaaaccactctgtataaataaaacgatatggacagcagcccctaaagcaaaacaaaacataacgaaacgaaacaaaacaaaaaacgcacttttgtaaagtaattaaagaagatccatttaaaatatataaagataattataaatatagtgtgaaatgtgcaagtagatggaaaaagccacgacgggcgcgaatattacaacacattcggttagtttttaagccactaactacaaccccagacatgccacgcctccagacagacaaactcattttcatctatatttaaacaataaaatagaaacaaatgcaaaattgtacttcaattaattgtgtgtggacaagcgcgtttttccccaacttctgatcatacgcgagatacatacatatattgtattaataacaaaacgaagaaaaggtgtttcagtgcgaagctagcagttctacacagtttaaacaaaagagtaaggaaatacgttagaatgaaaaatacaacttgagtaaaaactatacttgaatattattacataaagtaaaatatttatatgtatgtatatgtatacatgtgagcatagatttaaagaaactacggtaaataaacagaataattaaaacaaaaaaaaaaaaaaaacaaatgcaaatcatcctgagcttttcattaaattacgattcgaaaaccggtcgatttgcatgtctgcatttattttaatagtctttcataacatccttcataagcttcgtactttgtatacagagtaattcgtttacaaattaacaaaaatatgttcgcttagcttaaattacactaatatttgatatattgccgattggatctcgcttgctgttgcacatgcatgcagccaatatagatcaagatgcacaataagccacagttcctaattattgaaacagtacgcattgcgcgtgtgcagttcgaatggatcgaggcgcatcttctcctggttatcctcaacgaaacgcgtcacatccgccacgagattgggtcgctcctcggcgctggcggcgcacggcgaccagatcttaatgttatggtcaatgccactggtggccagcatgcagatgctcggatgcggctgcacgcaattcacgatggcactgtccgcccgataaacggcgcgtatcttgcccgtgtctccctcccaaatgtacatgttgccgtcatccgaaccagcggctatgaactcgccctggctgcccaaatagttggcctcctttatgtccgtcgtgacgttgcagtggcccacatagcgttgcatatagtcgcgtgccgtggaacggagatcatattcggcgttcttcagacgcaggtagcggaagccatcatccacttccaccggctgtagctcgggtgcctcggggctctttgactgtcgtcgattctccttgatgtccttgttcagcatgagcacgccgtgattgttggcgaagtcggggaaacgctgaattagtgcctgcaagcactgatccgcatcctggggtcgatgcagctcaagcaatgccctggccagccgaaagtgggccttcacataactgggatccagacgcagggcctcgtggcagtccctaagtgccgcatatatatcaccaaaccagccgcgtcgcattagagccgtcgctctgttcagatagaggacctctccttgtggatatttcgccaaagccgctgagtaagcatcaattgcatctacaagtttgccgttctcaagaaagtcattgccctccttcttatacacctctatttcggttggcagcgagcgacttctgtgtggcatcttcaccggctcctcctcgtgaacgagtgttgatgtgaaggcgggcagatcgtagaaaaccggaggctcagcgtgattcagatcaaagcggtagacgtgctcgcagcctatgttgaccaaaagctctgtgccattgccattgaacgtaagataagtgattccccgtggctcgtggacaatgttccggctgatgtttttcacgatctgtccgggtgcatagtacgccacgcaggcagagagaccttaaagggataagagttcaatatgcatatgtatgagctgcagcgcctacaaattcaagtactcaccattgccgttggtggagggcagcttgcggcgatcgtacacccgggcaaagggatcgttggtgcccacggccaggtattccgtccttcggggatttatagccagacatttggcctctgtgttctccaactgatcgtgcaggttcaagagcctgacaccaataccttcctcgggacggcagcgatgtggctcacgtatatctagctgcaggatgcaaccatcctctcccgccgaccaaaagacgtgcggcgagtcctgggcggtggccaagcgcttcgcccgagaaaaatggcaaatgcaagaaaaaagggtctcgttcgggtcgttgatgtcgtagacgtagatgaacttatccgctgcacacgtagccacaatgctgttgttggtcttgggcagaaattttacagagaacacattgcccagatgcttggtcctgatgacatgaacaagcttctttcggaacggatcccagatcatcacacgatagtcgtcggatccggaggccagccacataccatcagtggtccactccagacagttgacgcagccctcgtgaccgacgagcactgcctcctgctccagcctgtccacgtaggccggcgatgccagcagacgtcgccggagcatctcgtccagctcatgaccgtattgctggcgctgccaatgcaaggagctggcgttcaagggcgtgtgctggcgctgatagcgcgaactagagtactttacgcgatacagttcatcgctcgacattatctccgactgctgtggataggattatgacacttgtttccgtttgttttcgtctcgttctccgtttaattcattttgcattcgctgatttcccctgccccgcttcgccccccttccatcaacaactttgctgttgttgacacctgtgcgcggcgttgccaggccagcgcgtatcgccgtaacggtttgcgttagcttacgggatcgaacaaccaaatttcagttatggaaaaagtatttctttttttaaacacccgagaagtgaaagattaagtagagtctagcacacaactgacttaaaccgcctacgaaggcaaacgtaaattcatttataaaacctcttaaactctattatggcttaaaaaaagaacaaacaaaaaaaaacaggttttacgtatagtaaaaaaatgtaagccaattgcaagttccgctctagccgaccgtttttaagggctggaaaatggtggaaaacatttgagggattataacagttttaccatctggtaacactgccagataaactaaaaaaatcgaattgatttatttaattccacggaagacgcgacgttgactgaaaagctaagacatgtccaaagaaaaggaggacgagtgcgacaagcacaaacagcaggcgacggcggacgccaagtccacgtcgagcgaggattccgatgagtaccaatcggccggtgagggcgaggatggagacggcgatggtgacggtgattccccagcggagcgcccgcctgacaaaaccagccccacggtcgccgttgcgcccacagcaaaggcagcatcgccactgcccactgtgaagccagcatccgaggccctggactttcctatgcaccggagtgttttcgaggacgacatcaagtcgctgcagcgacgacttctattgagcacggcccaagacgaagtgggtagaaaggataagcacggcaatacgccactccatctggccgtaatgctgggcagaaagcacgctgtccgtttgcttctggcccaaaacgcccccgtaaagatcaagaacaatgagggctggtccccgctgtccgaggccattagctacggcgaccgccagacaatcacccaggtgctgcgaat

SEQ ID NO: 10631 - DNA, 1994 bp, DROSOPHILA
cgaagcggggcaggggaaatcagcgaatgcaaaatgaattaaacggagaacgagacgaaaacaaacggaaacaagtgtcataatcctatccacagcagtcggagataatgtcgagcgatgaactgtatcgcgtaaagtactctagttcgcgctatcagcgccagcacacgcccttgaacgccagctccttgcattggcagcgccagcaatacggtcatgagctggacgagatgctccggcgacgtctgctggcatcgccggcctacgtggacaggctggagcaggaggcagtgctcgtcggtcacgagggctgcgtcaactgtctggagtggaccactgatggtatgtggctggcctccggatccgacgactatcgtgtgatgatctgggatccgttccgaaagaagcttgttcatgtcatcaggaccaagcatctgggcaatgtgttctctgtaaaatttctgcccaagaccaacaacagcattgtggctacgtgtgcagcggataagttcatctacgtctacgacatcaacgacccgaacgagacccttttttcttgcatttgccatttttctcgggcgaagcgcttggccaccgcccaggactcgccgcacgtcttttggtcggcgggagaggatggttgcatcctgcagctagatatacgtgagccacatcgctgccgtcccgaggaaggtattggtgtcaggctcttgaacctgcacgatcagttggagaacacagaggccaaatgtctggctataaatccccgaaggacggaatacctggccgtgggcaccaacgatccctttgcccgggtgtacgatcgccgcaagctgccctccaccaacggcaatggtctctctgcctgcgtggcgtactatgcacccggacagatcgtgaaaaacatcagccggaacattgtccacgagccacggggaatcacttatcttacgttcaatggcaatggcacagagcttttggtcaacataggctgcgagcacgtctaccgctttgatctgaatcacgctgagcctccggttttctacgatctgcccgccttcacatcaacactcgttcacgaggaggagccggtgaagatgccacacagaagtcgctcgctgccaaccgaaatagaggtgtataagaaggagggcaatgactttcttgagaacggcaaacttgtagatgcaattgatgcttactcagcggctttggcgaaatatccacaaggagaggtcctctatctgaacagagcgacggctctaatgcgacgcggctggtttggtgatatatatgcggcacttagggactgccacgaggccctgcgtctggatcccagttatgtgaaggcccactttcggctggccagggcattgcttgagctgcatcgaccccaggatgcggatcagtgcttgcaggcactaattcagcgtttccccgacttcgccaacaatcacggcgtgctcatgctgaacaaggacatcaaggagaatcgacgacagtcaaagagccccgaggcacccgagctacagccggtggaagtggatgatggcttccgctacctgcgtctgaagaacgccgaatatgatctccgttccacggcacgcgactatatgcaacgctatgtgggccactgcaacgtcacgacggacataaaggaggccaactatttgggcagccagggcgagttcatagccgctggttcggatgacggcaacatgtacatttgggagggagacacgggcaagatacgcgccgtttatcgggcggacagtgccatcgtgaattgcgtgcagccgcatccgagcatctgcatgctggccaccagtggcattgaccataacattaagatctggtcgccgtgcgccgccagcgccgaggagcgacccaatctcgtggcggatgtgacgcgtttcgttgaggataaccaggagaagatgcgcctcgatccattcgaactgcacacgcgcaatgcgtactgtttcaataattag

SEQ ID NO: 10632 - protein, 628 aa, DROSOPHILA
MSSDELYRVKYSSSRYQRQHTPLNASSLHWQRQQYGHELDEMLRRRLLASPAYVDRLEQEAVLVGHEGCVNCLEWTTDGMWLASGSDDYRVMIWDPFRKKLVHVIRTKHLGNVFSVKFLPKTNNSIVATCAADKFIYVYDINDPNETLFSCICHFSRAKRLATAQDSPHVFWSAGEDGCILQLDIREPHRCRPEEGIGVRLLNLHDQLENTEAKCLAINPRRTEYLAVGTNDPFARVYDRRKLPSTNGNGLSACVAYYAPGQIVKNISRNIVHEPRGITYLTFNGNGTELLVNIGCEHVYRFDLNHAEPPVFYDLPAFTSTLVHEEEPVKMPHRSRSLPTEIEVYKKEGNDFLENGKLVDAIDAYSAALAKYPQGEVLYLNRATALMRRGWFGDIYAALRDCHEALRLDPSYVKAHFRLARALLELHRPQDADQCLQALIQRFPDFANNHGVLMLNKDIKENRRQSKSPEAPELQPVEVDDGFRYLRLKNAEYDLRSTARDYMQRYVGHCNVTTDIKEANYLGSQGEFIAAGSDDGNMYIWEGDTGKIRAVYRADSAIVNCVQPHPSICMLATSGIDHNIKIWSPCAASAEERPNLVADVTRFVEDNQEKMRLDPFELHTRNAYCFNN

SEQ ID NO: 10633 - DNA, 5661 bp, DROSOPHILA
gtgtggctggtgaattatttcgcgctgatttggcttacattatgcataatatatgcatcgatttctatgaatggaagccaaatcgattcgttgcccctttgaactatccgcaacgactggctagataaattctctgtggtcccatctccttctggatgcacttaaaaacttaattaaaaatattaaacacgaaatgtttggcgccaccgtttaggaaacgctcaaaagtggaccgcacacatccacggagcgccgagttatcagctcaattatgcaagctgaaaggcagccgccgggccacagacagatttgtcgcatttgacacgataatgcacacaaggagtgaccacaccaaagtctctccaaccgactcggcatcggtttctgtttcggtttcttggccagctcccacttcgttttggcctggccaatggccataaaaggtgcgataaaacgaaaatttcacaagacggcaacagcagcaagtgcactgcaagaaaagtgcttcgattttgaaatgatcagatgaatgttgaatttttctttctttaaatttactttaaaaaccatttctattagcaataccataagccaaaacttacttagttgaattgaaatgtgtgatacttttttttctccgtgcacccacctctgcgtcatctctgtgtcccagggatgcggatggaatcgcaggggagctgggagtcggcaaagaccaaacagcctgaaagccgtcaaatcgctgctcataatggacgccttatctttggagaattgctttaactactaccggagttggatgtttttcagatacgtgtgactcgagaaccgactggtcaccataatggagagcattaatttgtcttaggcccgccaaagcggtcgcataactgcttttggcccaggcactgcgatatggccaaaaacctgtaaaaacggaaacgctgaaggttaccgttgctccccccccccccgcaaatagttttgcattttctacggattcgatgtctgatttgtttattttgaccaaagactcttaaaacgaattaacaatgtatatgattgcagcttggttcttaaacgatcttatatgtagcatagattagcttacaaagtatatgcacacgtttctcactaatcacaacagaagatgactccaacttaagtatgtttaccaaatatttctttcaataggccaaaatggctgaaatgctgaagctatttcttttcgttgaggttgaaggccttggtgatgttgtgggtgtgctggagccaacgggttgcgaggccacaggactaacaggcgcgacagttggcgcatatgtggctggtggcattggcagaatctgcggaggaactccaccaaaataggcagctgcaatgctgggcggcaatccggcagctccactgggtccatagctcaagtgatggcggagatacggcgacataggattggcaactggatgagttgctccatagtaagctggcgaaacactacccgttgagtcctgctcaaaatcctggcgctggcgcttcgcctgcggagaatcgcagctgctcacactggagccatcatcctccgactccagcgtcgagtttccgctgctgttcagcttccttttgcagcgggattgacccgactcgcggaaacccttagcgaacggattgttatcgatcttcaatttggtgatgcgatcgttctgcaagcatgagaacaaatttataaattaatttaagcacataaatgattaattactatcagtttttatacaacaatgaattcttaaaacgaattagctctaaatgtattacttttaacacttgaattttcaattagatcgtaaaaaggaacaataaataaatttacggccttataaaaaagatttgcagattaaataaatatgtaaaaaaacgcgtagttttaaatctaatttaaatagtatgaaaaacgatctctattgtttttgtctggtcgaaatttaaactacgaggcgtcagtaagtagccgtcggctgggagggcacttgaaaagttccactgtgatcctcgttaggatcaaactcaagtggctggctaggcgacaaatttgaaaatgcctcaattaggcgacgacccccgcagagtctttgtcctgtcagacatgtcctcaatggaggacggaaaggatgttgtctttaacccacctgataggctgtgacagctacgaactccgtctccgggaaaacgaacgcctgctgaggagcccatggaagttgggtgagctcgctgctgcggatgatgtgcaggcgtggctggtacttatgcatgctggccaaaacgatctggaaatgttaatggaaactataagtaacccattcaaaagatacactatgagctcactcaaacttacatgtccgctgctgtccagtgtattgttggtcagtttgaccttgttgaagagcaatgcctgggattgccaatgggcaccggtcgccggactgtccggatgcagatacatgcgctgcggactctggggctcggctcctccggccggaacccactgggaaccggagaacttgtagcggcaatcgccaatgggcaccatctcgaggagtacgcaatagctggcctcctcctccagtccgctgagggaaactcgcatcgaggggaacatgcgtctgtaaggatgaaaagaataggacttgattaagtggcctgccacgaactgcatataaatcagggaaggagcatcgcaaaagaaggcgtcgcccgggcatctattctattttacttcatatcgcctgtgatttgttgccccggctaacaagtgtgtaattatggaccgaaaagtagagggcagcggggagtctgcgtagcgcaacgcatcgatttaaaaggtaacgcaaacagatcttgccagcccaaaacaatatgccaacggcacatgattaattgtgtggatcgttggttcatggaggagcacggggagcaacagagtgctggaggagctggggcaatctggcgccaagcaattagacaaaatctgggagtcgccctaacggcttccaagcgtcgaatgcatgtctaatgagccgagaaagtgactgttatcgcggattaaacagcacagaaaaataatatttctactggatattaatcattttcaataaaatattacgaaatatatatatatataacaaatatatatttatgttcaagatctcttgatttctatgatgcccagccatattctaagccttggccaaaaataatgcttgtagttgcacgatttctttccgtgtacatttgcaacttaaacttcgagttcagatcataattatgtaaatttgtctcggctcccgctcggtagtcgctgttcgatagttcccctatctgagatacgctagggtctggtctcatcgctttggagaagggtcacggacagggcatggaatggtatggtatggtatggtatggtggtattgtgggcaaagtgtgaaaagcgcaggtagatcgaccaaacccgattgtcaacgccgaaaccgagagaagaaagatttttatgatcggaccggcgccagggcggcgtcttgctcttgtgttctcctccgccgactacactgcacttgttgtcactccgagcgagagctcctgctgcgttttgagttatggccaggcgccacattaggcccgggaaatcgaaaggttcagggtataggcatactcgtactcgtatgagataggaattgggaaagttggccctggtacaggagcaaatatttacataggccgtgcgacgcacttgacttttggaaaaactcgggctatttgcataggataatgggttcgcgggaaaatgaaacttaccggccgctctttgtgatgatcatctcggtgccgattttatggaactgttgccacaaatcgttgttctccaacttggcctccacgccgggcagggtgggacgactgggcagcatcatgtgcggctgctggtggggcatgttgaaaggtaacatcgatggaaagggatctggaagaagcggtttggttagttcattagcatgggtttgcaatggacctcttcagggaggtgggtgttgcagaaatcatatttctaagttagctggaatttcgctatctattgtattttatcggaatataatacctattaagatatgttcaatcaaagattgaaaataaaggcaatgcagttatgaccacaatttctagttataatgataagttaaattgaagtagaatatttattgctcataaaatccgaagcactaataataatcacaatattaaaacacttttaagtacgctcttttgggttgcatatattttctcatattttttagtttgaaaatcgcgaaaccatttgccgacggcattcgatcaacacccatagaccttatgtctagaaacgcacctggaatccgctgcatgatctgctggcggtagatctcgtgggccagctgctgctgcatccgcatatccattagctcttgcatggaaagcatttcgaagcacttgcacggtgtatagcacttggtaaaatgtcttagtacgttctgataataactggtagtttggaattcttcactgttattcactcgctcgtaactgaagatgcgctctgaggttctttcacgctcgacgtttcgcaacgaactgatctcgagtagctccgctcgagtgctaactcgccgtgggtcgcagccagtttttcccgatgccaagcaggtagcagctacgcttggaaaaccggttctccgtgggcagcgcctgtgattggctggcggaagacgcctacgctatgtgggtactagtgttgtcccactctggcgaagatcggtggatcgacggtgggcgccattttgtgagcagcggaggagcgggaaaagcgaactgcgtgcagccgagtggcgaagttaacgcttagccctgttgattttcatcagccgcagtgtttttctgcgccactgccttcaagccgcattccctgtctccctctcgatcactgtcagttaggagacttggatatatgtatgcatgtatgtatatggatgtggatttagccgggctatggcgttgcttgtaattcagaagtgagattttccacagcgcgcctgtctgctgtcttcagctgccgttgccttttcttctcctctcggtttattctttttttttcttgtgtgtctgtttcgtttttatgtttttttgttggttttggcgctgtcggaaaatgtccgttgccatttccattgcagccgtcttccgtttgggcgctgtccctccgtcgtttgccatgcccccgtgtaattagctgggttccctatcttcgacattgtctggcatttctcgggtatttatgtactttgctgcagacaggtgaaacataaattttgttggctttgttaattgcccgttttggaatttcgatatgctatgccctcgctattgatttgcccaaaaaaaaaaaaaactgagaaatggaaaatcgaaattcatatagtttttgggctctggctcgagggcctattgattagtgcttgtcagcattggaaattgagggcttaagtgcctgcgggtggaagtagattgaaatgcacattcctatattcacaggaagtattataattgatacttagtgagccattgatcatttaaaacaca

SEQ ID NO: 10634 - DNA, 1519 bp, DROSOPHILA
atcagttcgttgcgaaacgtcgagcgtgaaagaacctcagagcgcatcttcagttacgagcgagtgaataacagtgaagaattccaaactaccagttattatcagaacgtactaagacattttaccaagtgctatacaccgtgcaagtgcttcgaaatgctttccatgcaagagctaatggatatgcggatgcagcagcagctggcccacgagatctaccgccagcagatcatgcagcggattccagatccctttccatcgatgttacctttcaacatgccccaccagcagccgcacatgatgctgcccagtcgtcccaccctgcccggcgtggaggccaagttggagaacaacgatttgtggcaacagttccataaaatcggcaccgagatgatcatcacaaagagcggccgacgcatgttcccctcgatgcgagtttccctcagcggactggaggaggaggccagctattgcgtactcctcgagatggtgcccattggcgattgccgctacaagttctccggttcccagtgggttccggccggaggagccgagccccagagtccgcagcgcatgtatctgcatccggacagtccggcgaccggtgcccattggcaatcccaggcattgctcttcaacaaggtcaaactgaccaacaatacactggacagcagcggacatatcgttttggccagcatgcataagtaccagccacgcctgcacatcatccgcagcagcgagctcacccaacttccatgggctcctcagcaggcgttcgttttcccggagacggagttcgtagctgtcacagcctatcagaacgatcgcatcaccaaattgaagatcgataacaatccgttcgctaagggtttccgcgagtcgggtcaatcccgctgcaaaaggaagctgaacagcagcggaaactcgacgctggagtcggaggatgatggctccagtgtgagcagctgcgattctccgcaggcgaagcgccagcgccaggattttgagcaggactcaacgggtagtgtttcgccagcttactatggagcaactcatccagttgccaatcctatgtcgccgtatctccgccatcacttgagctatggacccagtggagctgccggattgccgcccagcattgcagctgcctattttggtggagttcctccgcagattctgccaatgccaccagccacatatgcgccaactgtcgcgcctgttagtcctgtggcctcgcaacccgttggctccagcacacccacaacatcaccaaggccttcaacctcaacgaaaagaaatagcttcagcatttcagccattttggcctattgaaagaaatatttggtaaacatacttaagttggagtcatcttctgttgtgattagtgagaaacgtgtgcatatactttgtaagctaatctatgctacatataagatcgtttaagaaccaagctgcaatcatatacattgttaattcgttttaagagtctttggtcaaaataaacaaatcagacatcgaa

SEQ ID NO: 10635 - protein, 360 aa, DROSOPHILA
PFPSMLPFNMPHQQPHMMLPSRPTLPGVEAKLENNDLWQQFHKIGTEMIITKSGRRMFPSMRVSLSGLEEEASYCVLLEMVPIGDCRYKFSGSQWVPAGGAEPQSPQRMYLHPDSPATGAHWQSQALLFNKVKLTNNTLDSSGHIVLASMHKYQPRLHIIRSSELTQLPWAPQQAFVFPETEFVAVTAYQNDRITKLKIDNNPFAKGFRESGQSRCKRKLNSSGNSTLESEDDGSSVSSCDSPQAKRQRQDFEQDSTGSVSPAYYGATHPVANPMSPYLRHHLSYGPSGAAGLPPSIAAAYFGGVPPQILPMPPATYAPTVAPVSPVASQPVGSSTPTTSPRPSTSTKRNSFSISAILAY

SEQ ID NO: 10636 - DNA, 3505 bp, DROSOPHILA
gaggcaggacctccagcgataagcaaattggttggtgcttatggaggaccttctgactcggaagatgataatagtgccaatcagaaagcacttgaagctagcgttgggactaaacgagccattagcgatgaatctgactacgtggacttccaaaaacttacttgcctgctctgcatgcgtgccttccaatcgctggacatcttgcagaagcatttgaaaatgtcgaatctacacaaggagaatctggacaagcttaaacggaatcccgcagttgaggctggcacggatgagggtctatcgtaagtgggaatatgctgctagaatggagataaactcactaatttacttacccgtacttagctatcgtgatcgtgccaaggaacgcaggctgaagtacggtgagagcgatcctcctccaccaaataggagccgggagcgtttcgagcaagagataaagactttgcagtcgcgccagaaggattcttttggcgccactgcagccatgcccatcagttcgaccaacgtgggcagccgcctgatgcagaagatgggctggtcggagggccagggactgggcaaaaagaaccagggacgcaccgagatcatagaggtaggagtcgacgagggcgacgaatggcaaaatatggataattcaatgtcaatgtgtatccacaggctgatggtcgttctaacaacgtggggctgggcaacaacactggccatatggcgcctgggaacgactacaaatcctacatcaaaaagatgatgaagcagcgttatgagaacgcctgagactcttcttaaagtgtatgattttattccgcttgaatataggggcatttaagcattgttgtttacctcgattacacttcctccaccttgtcgcgttcatttagcattagttgcgaagttcaaattgtaaatagttcgtaaatacagtctcaaattaggtttaaatttaaattgtaaatgctttaagtatggaattgtgcaagggaatctaaatctcgtccatgtagccatgctcataggcgtgacgaacggtcttgaagatctcctggttcgcctcatcgccagcgatgtccaaggacaactggtggaaggcggggccgtgcatatccgtctcgaagaggcgggacaactcggcgcaatccttctcggtgccgagcagccagggaaggaagtgcatgcataccattggtccgtagaaggcatatcgtttgaagtgggcattgaagcgttcgaagctgtattcctgtagcaactggtccacccgatcgtcggtcaactcgttccggtttcggcgcagaaccagttccaacatttcgatcatgcttcgatggtacttgcgcaacaagtcggcgtagatctccttccttccttcggatggcgtgttcatgtacataaagaagctcaggtcaatggccgtagtgctgaagcgcagctcctggaaatcgatggctttgatagcgtccaccttatcttcagcgccgtagtggaacagcacgttgttcctgttgtagtcgccgtgcagaaaggtggcaaagtggctgtccggttgatcttcggcaaaggagctggtgcggattctctccagcaggagagttggctgcttgaagtacttctcccgcagtcgctcgatggcggccccgaatccggggtctgccccctggaggagctgctccttttgccggtcgtagaactcgtagaaccgatcgaaagccacgcgatagaggacatcaaagatgccctttcctgagctggacacgaagggcatgtccaccactccggcgcgcaaacgagcatgaacgttcggctggaggattttcgtggcgtagcccagagcatggaacggacccactagtcctaccatggcctccagctgatcccgtcgaagggttagccttggccccaattggtagccatcgcccttgagatgctttagggccagcaccgattccctaccattccctaaacctgcagaaaagtaaacattcgatgtagtcatggataaagtctttgtgggatgcgcaccttcaacgtggccaaacctggcgaagtagcaacagggaacccagttctttaccacttcgctttccaggtgactcgtccgaagcacattctcataggcgggcaggatctcggcgtaggcgaagatctcgttggaaaactggatgtacgagttgctgctctcccggaactcttccgttcccttcatgaatttgaccaggacgacctccgtccgcttgcgctcggcgatgaccacgtccagcgtaacggtgtacaaggcggacatgaagccgtccagtccattggagcactcaacgctgtgcgattccagcgaagcactcggaccaaagttcttgaagatgtcgtacaccaggtggcgctctatatagtctaactgctgctgttgcgtcgacatcgtgacctccacgcaggaatcaattgctatctgaatgggtaatcttaactgacaatatacgcaagtaggtgtatatttgtccgggcaaccaatcaaagtggtatcgatagccacgcgcaggattttggtatattcccggtttcagcgaagtggtcacacagaatcgcgattgaaacgtgcaccgccggcgtattgcgcgtaaacataagacatttcacggggaattttctggactttgctaactcaatgggtcccagccacattcctccgctgacctacaaggtcgtggccgagtgctccgtctccaaagcccgggcgggactgatgaccctaaggtgagcgtctgcaataagataggccttgaaaactgtgactaagccgcattaccaactctcctaaacaggcacagcgaggtaaacaccccggtctttatgcccgtgggcactcagggaaccttgaagggcatcgtgccggaccagctcatcgagctgaactgccagattctgctggggaacacctatcacctgggcctgaggcccggaatcgagacactgaagaaagccggtggtctgcacaagtttatgggctggcccagggccattctaacagattccggtggctttcagatggtttccctgctgcagctggccgagatcgatgagcacggtgtgaacttccggtcgccctttgacaacagccagtgcatgctgacgccggagcactccatcgaaatccagaacgccattggtggggatattatgatgcagctggatgatgtggtcaagaccacaacaactggcccccgggtggaggaggccatggagcggactattcgctgggtggatcgctgcatagaggcccatgcccgcgacgatgaccagtcgctgttccccatcgtccagggaggattggatgtgccgctgcgtcagcgttgcgtttccgctctcatggagcgccaggttcgaggcttcgccgtgggcgggctaagtggtggcgagagcaagcacgacttctggcgtatggtggacgtgtgcactggctatctgcccaaggacaagccgcgctacctgatgggcgtgg

SEQ ID NO: 10637 - DNA, 1448 bp, DROSOPHILA
acaaatatacacctacttgcgtatattgtcagttaagattacccattcagatagcaattgattcctgcgtggaggtcacgatgtcgacgcaacagcagcagttagactatatagagcgccacctggtgtacgacatcttcaagaactttggtccgagtgcttcgctggaatcgcacagcgttgagtgctccaatggactggacggcttcatgtccgccttgtacaccgttacgctggacgtggtcatcgccgagcgcaagcggacggaggtcgtcctggtcaaattcatgaagggaacggaagagttccgggagagcagcaactcgtacatccagttttccaacgagatcttcgcctacgccgagatcctgcccgcctatgagaatgtgcttcggacgagtcacctggaaagcgaagtggtaaagaactgggttccctgttgctacttcgccaggtttggccacgttgaaggtttagggaatggtagggaatcggtgctggccctaaagcatctcaagggcgatggctaccaattggggccaaggctaacccttcgacgggatcagctggaggccatggtaggactagtgggtccgttccatgctctgggctacgccacgaaaatcctccagccgaacgttcatgctcgtttgcgcgccggagtggtggacatgcccttcgtgtccagctcaggaaagggcatctttgatgtcctctatcgcgtggctttcgatcggttctacgagttctacgaccggcaaaaggagcagctcctccagggggcagaccccggattcggggccgccatcgagcgactgcgggagaagtacttcaagcagccaactctcctgctggagagaatccgcaccagctcctttgccgaagatcaaccggacagccactttgccacctttctgcacggcgactacaacaggaacaacgtgctgttccactacggcgctgaagataaggtggacgctatcaaagccatcgatttccaggagctgcgcttcagcactacggccattgacctgagcttctttatgtacatgaacacgccatccgaaggaaggaaggagatctacgccgacttgttgcgcaagtaccatcgaagcatgatcgaaatgttggaactggttctgcgccgaaaccggaacgagttgaccgacgatcgggtggaccagttgctacaggaatacagcttcgaacgcttcaatgcccacttcaaacgatatgccttctacggaccaatggtatgcatgcacttccttccctggctgctcggcaccgagaaggattgcgccgagttgtcccgcctcttcgagacggatatgcacggccccgccttccaccagttgtccttggacatcgctggcgatgaggcgaaccaggagatcttcaagaccgttcgtcacgcctatgagcatggctacatggacgagatttag

SEQ ID NO: 10638 - protein, 455 aa, DROSOPHILA
MSTQQQQLDYIERHLVYDIFKNFGPSASLESHSVECSNGLDGFMSALYTVTLDVVIAERKRTEVVLVKFMKGTEEFRESSNSYIQFSNEIFAYAEILPAYENVLRTSHLESEVVKNWVPCCYFARFGHVEGLGNGRESVLALKHLKGDGYQLGPRLTLRRDQLEAMVGLVGPFHALGYATKILQPNVHARLRAGVVDMPFVSSSGKGIFDVLYRVAFDRFYEFYDRQKEQLLQGADPGFGAAIERLREKYFKQPTLLLERIRTSSFAEDQPDSHFATFLHGDYNRNNVLFHYGAEDKVDAIKAIDFQELRFSTTAIDLSFFMYMNTPSEGRKEIYADLLRKYHRSMIEMLELVLRRNRNELTDDRVDQLLQEYSFERFNAHFKRYAFYGPMVCMHFLPWLLGTEKDCAELSRLFETDMHGPAFHQLSLDIAGDEANQEIFKTVRHAYEHGYMDEI

SEQ ID NO: 10639 - DNA, 4099 bp, DROSOPHILA
ataatatggaaaatctcaatttaaatttgttgttggctgttgctttgcttgttgttgctgccgctgctgttgttgttgttgttgaatttcacgcgaaagcaggcaagacaacaacataaaatcacaaacacttgcacgcacatacgtcacacacacccgcacacacacttggacagctgagacataaacacacggagagcaaatcgcagcgagaatgggagagagaaagagacagagagcgataacaaatttgttttctggtttttcttcacgattttattacacgcttttcgaatggctaaccatattttgattcacatttaattcgctccaatcacagtgtgttccgtgcgcttgctaattttcgattttccaccgcagaactccgcccgttttgctgctgttttggcaatcgtctctctcctggctaaaaacatatgatttcggttgacggaatcacgataaaaacacataaatgcgaacagggcgcgcgcaacaacttcccacgacaaactctcgcttcggaatttggaacgaaactgccacttttgcagcgaatcgcgcttaaatacccgtctaaagatgggaacgcatggcgaaccggttcgatagttcgtgagcgaacagccttcgcacagtggtatgcaatcaaactgagcagtagattaagtacttttgtttaacaaaccggatagctcgaactttgaaaataagttttggatcggcaggaattaagactgtgcacaattaatgcttttaatggtgactcaacactttgtgacgtcagtagtagcataagttcaaaataattaatttgagtatagcttttgtttaatgtattgtatagaataactagtaatactgcttttttgactgcgataaacatttacgtaataaaaactgcatatatttgctttgtgacaaccctattttattttgcgtgcgtcaccttacattttgctaccttgctgcatcagctgtttgtgttgtgcggcgaagaatggatttgacgctggacaaaaagctgcagggattccagttggtggcacaagaaaaggtataataatgaatcggaagagtgaaactattaactacctgcaattcgactgcagctttgttccatactatgtagcatacctggaaagaaggagttaattttggagcccgacttgataaagccactggaacatgttgtcactgcctcctggctgaagtaggtgtttaatccatattttatggatatttacgtcttatatataccccttaacaggttgaagggcatacaacggatctacaaacatgatgcggcacaatctttgccccgatccgccgatcaggtgcacatctacatgatccgcagtgttttgggtacatttcagacacttctcaagcaattgcaacccgtggcctcagaggaaatgcccgacatctccatgaaaatgtatcacatagtctgtgtgcccagttgttactcctattttcaaaccctgctggaacaggctggtttgtacggactggtgcaacttcatcactttaactgggacttcatctattttgatcagggagttctcagcttggagctgcccaatgtgagtagatgtacattgaacattcagaaaagagtcttttatactggatattcttattattcagctttacgagtgtctctacctgcagaagaacacatctccattgcctgcggtggcccagagcctgcgattgcttcagatgatttgcggacaaccgtctttgattctgagctttggccaccactcgtcgcagctaatgcaaatggcgaagactcttggcaaacttccggcgcccacaaatcctccagactatggcggctggctggtcatcgatcgggataaggattaccccgccagcttgctcactccggccatctatgcaggtcttctcttggaagttttcgagcatagttctggcgagattctggtagacaattccaagaacaagatccgcagccagcgtgtggagttactccagggaaagaaatccaagataggcgtaaactcagccagcaagccgtgttccattcgtcttaactccacatccgatgagatctacggcgataatcggtacaaacgatttgctcaggtcagcagtttgattcacgcacaagtaaaagccctgggcttggaactgcagaaactcaatgacatgcagctggacgagatgcatgactatgtggccaggaagctacccaaactaaccgagcttaagagcaaagtccttaggcatctgaatgccagcgagattgtgatccaaatgatgggtaacttcaggaagctccaaacgctggaggaggacatactaaacaatgattcaagaaagcgattgctaagcgagatcgacgagctgttgaccacagatggtcagagatttaatacactgcgactgctgtgcctcttgcatcattgcgttggcgtggcgcccgaggagctgcagatatttgcgcggaactactgcaatctgtttggacaccaggaattgggcgtgttccagcagttgtcgcaggcgggcttgttgccaccacttgtggtggagaaaaaggcgccaacgaaactgctctcaaatctacctctgcccaagttccagcaaacggagtttcaggccaatgctaatcggctaaagctgttgacctccagtggagatggtcaggatggaggttcctcctccaagagccaatccagtggcttgcagacctgtcccagttttgtgttcaatggcacctacataccattggtggctcagctctgctccattttgctgaaaatcaatagtgctgaggagttgtcctcgaagctgggcatgattgaggggctgcatctacacctggacagcggaaaaatcacgcccaaggcctatgccagccaagtgaagctaaacggagttgcagatcaggatatgttccccttgcgtctcaggaatctctttgtattcattgtgggtggtgccagttatgcggaaatcgccgcctgcgattttgtggcaaagctaacaggcgcccaaataaccgtggcatccgactctctaatggcgggcagtgatttgatcgccaccgccttcaaccgctgaccatgaagtaactaagaatctgtgtatcaaatgttttatatatttttatacaaaacaatgatgacaaagcttgtgattaacaattttcgaaatttacaatttaaacaatgctcttttcgaataaatattacctaaaagtggcatttgctatttatcaccactggctctggtcattccaggcactcggtagagcagctctccatcgtcatcgtaataggcatcctccacccggtaagtggctccttggcgatgcagtttccggggaataacaatgcgtgttttcacctgggttatttcatacttgcgctgatccgcggcactgatcacaatctcgctgctcgcaaacttgggcacgaaactgggcaggaatccggtgccactgggattctcgatgggccgcttcatttcctctggaactgcgggcgcagactcaacgagctgcaattccttaagctcctgcagccgcatcttctttttattacggattttgtccaacaaataggtttcatcttcggcagcagagggtggagcttcatagccggatgggatttgtggtgtaggcatctcctctgttgttttactactgctgcccagcagtttgcggaattcgttgccttgcggagtcggtagttgtgattttgtgggccaatcctggattttaagctcccgcagatcctgccaccttcgctcggcgaatttctgcagatgctggagaagagacggtgggatactgaagtcaccctttcccgtccctaaaagctgccagtttttaatgacggtttcatcgtgggagcgtatcctttgcacacttctcggtcgccacttggcccgcagaattttctgcacaatgtccggagtggcgggaaaactttcggccaatcgctcaacgctccattcctcgggatctcgctcgtgcagcaggcgcatctgctccttttcggcatgaagcaagagattgggcaacttggcgtctcggaaatacttgtgctttatcataaac

SEQ ID NO: 10640 - DNA, 1923 bp, DROSOPHILA
atggatttgacgctggacaaaaagctgcagggattccagttggtggcacaagaaaagctttgttccatactatgtagcatacctggaaagaaggagttaattttggagcccgacttgataaagccactggaacatgttgtcactgcctcctggctgaagttgaagggcatacaacggatctacaaacatgatgcggcacaatctttgccccgatccgccgatcaggtgcacatctacatgatccgcagtgttttgggtacatttcagacacttctcaagcaattgcaacccgtggcctcagaggaaatgcccgacatctccatgaaaatgtatcacatagtctgtgtgcccagttgttactcctattttcaaaccctgctggaacaggctggtttgtacggactggtgcaacttcatcactttaactgggacttcatctattttgatcagggagttctcagcttggagctgcccaatctttacgagtgtctctacctgcagaagaacacatctccattgcctgcggtggcccagagcctgcgattgcttcagatgatttgcggacaaccgtctttgattctgagctttggccaccactcgtcgcagctaatgcaaatggcgaagactcttggcaaacttccggcgcccacaaatcctccagactatggcggctggctggtcatcgatcgggataaggattaccccgccagcttgctcactccggccatctatgcaggtcttctcttggaagttttcgagcatagttctggcgagattctggtagacaattccaagaacaagatccgcagccagcgtgtggagttactccagggaaagaaatccaagataggcgtaaactcagccagcaagccgtgttccattcgtcttaactccacatccgatgagatctacggcgataatcggtacaaacgatttgctcaggtcagcagtttgattcacgcacaagtaaaagccctgggcttggaactgcagaaactcaatgacatgcagctggacgagatgcatgactatgtggccaggaagctacccaaactaaccgagcttaagagcaaagtccttaggcatctgaatgccagcgagattgtgatccaaatgatgggtaacttcaggaagctccaaacgctggaggaggacatactaaacaatgattcaagaaagcgattgctaagcgagatcgacgagctgttgaccacagatggtcagagatttaatacactgcgactgctgtgcctcttgcatcattgcgttggcgtggcgcccgaggagctgcagatatttgcgcggaactactgcaatctgtttggacaccaggaattgggcgtgttccagcagttgtcgcaggcgggcttgttgccaccacttgtggtggagaaaaaggcgccaacgaaactgctctcaaatctacctctgcccaagttccagcaaacggagtttcaggccaatgctaatcggctaaagctgttgacctccagtggagatggtcaggatggaggttcctcctccaagagccaatccagtggcttgcagacctgtcccagttttgtgttcaatggcacctacataccattggtggctcagctctgctccattttgctgaaaatcaatagtgctgaggagttgtcctcgaagctgggcatgattgaggggctgcatctacacctggacagcggaaaaatcacgcccaaggcctatgccagccaagtgaagctaaacggagttgcagatcaggatatgttccccttgcgtctcaggaatctctttgtattcattgtgggtggtgccagttatgcggaaatcgccgcctgcgattttgtggcaaagctaacaggcgcccaaataaccgtggcatccgactctctaatggcgggcagtgatttgatcgccaccgccttcaaccgctga

SEQ ID NO: 10641 - protein, 640 aa, DROSOPHILA
MDLTLDKKLQGFQLVAQEKLCSILCSIPGKKELILEPDLIKPLEHVVTASWLKLKGIQRIYKHDAAQSLPRSADQVHIYMIRSVLGTFQTLLKQLQPVASEEMPDISMKMYHIVCVPSCYSYFQTLLEQAGLYGLVQLHHFNWDFIYFDQGVLSLELPNLYECLYLQKNTSPLPAVAQSLRLLQMICGQPSLILSFGHHSSQLMQMAKTLGKLPAPTNPPDYGGWLVIDRDKDYPASLLTPAIYAGLLLEVFEHSSGEILVDNSKNKIRSQRVELLQGKKSKIGVNSASKPCSIRLNSTSDEIYGDNRYKRFAQVSSLIHAQVKALGLELQKLNDMQLDEMHDYVARKLPKLTELKSKVLRHLNASEIVIQMMGNFRKLQTLEEDILNNDSRKRLLSEIDELLTTDGQRFNTLRLLCLLHHCVGVAPEELQIFARNYCNLFGHQELGVFQQLSQAGLLPPLVVEKKAPTKLLSNLPLPKFQQTEFQANANRLKLLTSSGDGQDGGSSSKSQSSGLQTCPSFVFNGTYIPLVAQLCSILLKINSAEELSSKLGMIEGLHLHLDSGKITPKAYASQVKLNGVADQDMFPLRLRNLFVFIVGGASYAEIAACDFVAKLTGAQITVASDSLMAGSDLIATAFNR

SEQ ID NO: 10642 - DNA, 3375 bp, DROSOPHILA
tcgcgctgttgctccttaaagatttcaatggcttctgcctctagagcctcagcggtttgcttgagctgctccttttcggcgcgcagcagttcctgttccttgcgtcgttgatctagctcaaggcggcgcgcctctcgctcggccctcatctgcttgccacgggtaatcatctcctgtcgccgctcagctccacgtttgtgcagctccgctgcattccgcctttggacagccgccgctgctccgagttccaagcaggtattcgggcaaccgaccgtctctgactcgtcactgccatcgcagcagtcacagatgccgtcctgcacctgcgaactgggtatatttaccggctggtggcctttgttcacacaatggaactggccctgcggacaggccgcagtgccaggttcatcgcttccatccgcacagtcgcagtaatcgtcgttgatgtgggagaagggtatggtgcggctgccatccaagcaggtccaactgttttcgcccgcccgaggttggtacagtgaagccttggccagcggaacacccagcggacgtggaacttcgctggcagagcctacgttggtggccaccagggccagcaggagcggtattagcagcacttggctaagttgcaagctttgcattttggctgtgctcagtactactcctaattaatcttctaatttgagttgcctcccgagtgctgtaaatcttacgtggaatttgctatggttttttacgaatcgtaaaatgccggtgcagcactatcgatggcaatagagacaactatcgatagcaacgggcagtggcgggatttgaaatggccgaagggatttcgtttgtatgaccgacacggggaaattggtttgcttattttaatttgattaaattccttgaaaatttcacgtattatgttatgatgcagaattactttcgcgctggtttttagcacctgaccactgcactgctgaccaactgtcttttcggcagtgtggcaacgctgccaaatcagctgccggtttgttatttaacaaaagtggaggatcatagagcccataaaataatggagttcctgactaaagtgtgggccaaagaggcaacagcgcccgaggcaatagaagccatcaccggcgcagcgcaagaaaaacaaaatgcaaagactgaaaaagcatctgccagtaaggagacgagcaccgaagaaaccaccactgctcaaaaggattggggctacgacctttatccggagcgaaggggcgaaaccttcaagcccaaatggacacgagtcctgttcggcttggaggggcaggagaacattgatcgtttcaagtgcgaggagaatgtgtactggtgtgtcaaaaatggtccgctggtcaaactgatgatgggagcactgaaaagttccggttgtcccatcgatctgcgccgacacatctcatgcgaggtgtgcgaccccacagtcaccggcggttacgatcccaagctcaaccagatcgtggtctgccagaatatggccaggaacaagagcatggtccatggagtgctaacgcacgagatgattcacatgttcgactactgcaataacgacatggacttccgcaacgtggaccacctggcctgcacagagatcagggcggcaaacctggcgcattgctccttcttgagcgccatgttccaaggagatgcctcgccatttaatgtcaaggaagcgcatcaggtggctttcttatatatttttattaaccaaatgcttaagaaactgaatccaaatctattcttctttttttcagaactgcgtcaagtccaaagccctagcttccgtgctcgctgttcgcaatattagcaaagcagatgccgtcgctgctgtggaacgtgtctttcccaaatgctatgcagacttggagcccattggccggagaatccgtcgcaattccacggaccagcagaaggcttacatggaggcacccatgtatggctatgatgtatattaaattgctttatatatgccttttcttttttaagtacccacccccacacaatgttaaataaaactatgttttaagctcgggacattttgaatgtcacacggccagacggttttatatttaaacctaatcgcttggttatttattaaattatgtacgattagccatgaaatgtatcaagttcatgagataaattcaattagtactatatacccagcagctaaaacgtatataaaacatgctgttaagactgatgcttttagtttaagttgcaagagcagcaggagcaaaggcatggaggattgtgaaataattggaatgatattcgaaatcattggggatatgctgtttggcagtaagtgggaggacatgggagaagtggagctggataagtagtaaaaaaaaagcggacattatagtcaatttatcaataaataaagaggaaatcacttcatattattgcaggtgatacctcatcagatgatgattacgatgagtcgagcacctagattattattattttaataatccgcgaacctaatagaagttatcaaatggattaatccaaataaaccatacaaagtataattaacctttgaaataatgctataaatacaaaacgaaaattgtgaaactaccaaagtacaaccaacaatatggactgttgtgagctgccggaaatatttttgagcttcctcaacgaccttttcttctcagacataagtaatgaatttgtaatgctatcaaaacagggctttttaatcatattactattttattttcattttttgtttgtaaagctgatgcggagtacttgggcgattattacgacaactacaattgaaatagaccagcgatcgtgagcaaataaaaaatttgatatgagcatttacctttaaaagcttttcaatacacaaatgtgtactcgtatatttgtcccatttctgacccagatcatgcaatcatttctgattcgaattaagtccgaattggttgagcgtttttggtcatggctcattaaaggggtctgggtcaaaaccgatctcgagcggtaatgtcattgtacttcgttacaaaacgctgacaacaccggatcgaaaatgttttgggatctgcttggtggaattttcgagtttcttttcgggctcttgtttcctagtaagtttcgtagtgactcaatattaacttcaatggccatgtatttacctattatttacctatttttgccaccaggttctggtagtggggatgagccagactccgaggaggtcgaaaccacttgatggcctacatataagttaatatatttatatttcatgtttttgctttattatatctacgtaaaatgtgtatgtttaacataaattgcttcaacagttactacctcttcatagta

SEQ ID NO: 10643 - DNA, 1036 bp, DROSOPHILA
ccaaatcagctgccggtttgttatttaacaaaagtggaggatcatagagcccataaaataatggagttcctgactaaagtgtgggccaaagaggcaacagcgcccgaggcaatagaagccatcaccggcgcagcgcaagaaaaacaaaatgcaaagactgaaaaagcatctgccagtaaggagacgagcaccgaagaaaccaccactgctcaaaaggattggggctacgacctttatccggagcgaaggggcgaaaccttcaagcccaaatggacacgagtcctgttcggcttggaggggcaggagaacattgatcgtttcaagtgcgaggagaatgtgtactggtgtgtcaaaaatggtccgctggtcaaactgatgatgggagcactgaaaagttccggttgtcccatcgatctgcgccgacacatctcatgcgaggtgtgcgaccccacagtcaccggcggttacgatcccaagctcaaccagatcgtggtctgccagaatatggccaggaacaagagcatggtccatggagtgctaacgcacgagatgattcacatgttcgactactgcaataacgacatggacttccgcaacgtggaccacctggcctgcacagagatcagggcggcaaacctggcgcattgctccttcttgagcgccatgttccaaggagatgcctcgccatttaatgtcaaggaagcgcatcagaactgcgtcaagtccaaagccctagcttccgtgctcgctgttcgcaatattagcaaagcagatgccgtcgctgctgtggaacgtgtctttcccaaatgctatgcagacttggagcccattggccggagaatccgtcgcaattccacggaccagcagaaggcttacatggaggcacccatgtatggctatgattttaagttgcaagagcagcaggagcaaaggcatggaggattgtgaaataattggaatgatattcgaaatcattggggatatgctgtttggcagtaagtgggaggacatgggagaagtggagctggataagtag

SEQ ID NO: 10644 - protein, 295 aa, DROSOPHILA
MEFLTKVWAKEATAPEAIEAITGAAQEKQNAKTEKASASKETSTEETTTAQKDWGYDLYPERRGETFKPKWTRVLFGLEGQENIDRFKCEENVYWCVKNGPLVKLMMGALKSSGCPIDLRRHISCEVCDPTVTGGYDPKLNQIVVCQNMARNKSMVHGVLTHEMIHMFDYCNNDMDFRNVDHLACTEIRAANLAHCSFLSAMFQGDASPFNVKEAHQNCVKSKALASVLAVRNISKADAVAAVERVFPKCYADLEPIGRRIRRNSTDQQKAYMEAPMYGYDFKLQEQQEQRHGGL

SEQ ID NO: 10645 - DNA, 2785 bp, DROSOPHILA
tcgtcctcggttgaagtcacaccggccgctctcaccgagtgaagtgcgccgcctgcatgttttggctctttctagttttgtaaactaaagtatttttttttcaaattcttaaagataattggatgaatttattttgcgaccttctaatctaaagtggcatgtgccccaataaactatttcgtgtcccgttcttgtccactgtacattgtgctatatgccaaaccaaattctatattttgtttgttcactagacttaagacaaccgacgtcactgcagcatggatttcatttgtcttttcactgaataaacgcaggttgaaccagatgctacttgtgtacatgatattaaattatctctcgataaacttaaatagacacgactttataaattggaatcttaaattaaaatcttatagtttaagatgagtttaatgtctatgcaaactgaaaatgaaaacaaatttgctgacgcaaattacgttgaaagcgttgtaaatgcagacattaggttattatttgatttttttgtaaaacgatagtttcagaatgacaatctgaagttctcttttgtttttaagtgttaagataaaatggcaatgaataaggatttctttgtttcctaattaccttaataaaagcaatttcctattctacaaaaataaggttcattcaccgaagataatgttctggcttcaatgtttattcatctgtgtttactaaaatttatcttgccgcgtatatacaattgtagttaaacaagttaattactgaaccctagttctttttcttgctattaagctccttcttcactccctccagctcttggcgcacgttgttcttaaacatgttaacgaaggatctacaatttggaaaatgcatgtcagattggcggattcagccagatgattctggcgattctttcactcacttgaaacgctctggcgtcatctcgtgcagtccctgctcccgggccaagtcttttgtgcggtacatcagggaaacgaccaactgggcagcgcgtctcatgggatagctctccgccatgcgctggatgagctgctcgttgttggccaggtagcgcattagcagtcgcagcaccatcttgcccttttttttattttgctgccgcctagaactctgtgtccttgtatttgcgaattagctgctgcttaagcttcagctgatttcgcagtagttccagtctctgttgctgctcctccttattgaaatcgatcccggggagctggcggatttgctcgcgtgccgattcgaagcgtttttgaagttcaaagatctacaaatcaagtatatagcggtggcaacttatgacgaaccaaggactcaccttgtggttgcaatcctgggactcgcgcagcttaacggcgttctccagaggatccttttccacgctgaaagacacaaagacgccaggttatataaggtgcggcattaattgcgcacttgttgctaaaatccgccgattttcggcattgtccgtgcaggggcaatgacacccggaatccgcatccgcgatgaccactcaccagcgcacaatgtcgtagattatcggcagaatctcaatgtccaactggtcaaccgtcagatggcactggccgccgattccgttggatgtttgcgtctcctgcgatatggtcggctcgaagggggagttcgaagtctgaaccaggccgtcggcggttaggatgggttttctgtcctcgatctgattgtttggcgacaaatccatcataaaaaacacgaatcgaatttccagcgtcagaatcaataggaccttaccgacaacacgtaataataccaaagtaatgccctcacattctcttaattcgattaatatactaaagggaaaagtagtagatgcacaacctgctatcgaagtacgatagaccgatagagccaggcaaatgccgcctctgcttatcgataacaagcaacgaatcgtttagaatttataaagaagaaaaacataaagccaacatgagcgacagcggtgttttcgccttcgtaagtagctgcacaaataaaaaactcaatagattaaacctcgtttaatctatctaggagcttggcgatgacctagccacacgctgtggcaatacactcactggcgtctttgtgccgggctcacgaatcgcactcagcgcctaccggcatgtgacgcacagttcgcgggatgagcccacagagaatgctggacaggttccggtgctcatctacatggcgcaggagtcgacgctgttcgacgaacccgttctccgcagcgtactcgccgaggcgaatgccacgttcgccacgctgcaacagttgggttcgcgggccacacgtgccgagtatgtgaatatatcccgggcatacaggagcattgtgcgctcatgcctggagaagctggagcaggcaaaaaaatcgccggaggttcagacagatgaggcgcgcctgcaacgcttatgtgatgccatcgttgtgttctatgcggcagaatgcctgtggcatctcttcgagattctgtacattcagagcaatcagctggtggtgccgcagctgctcgactgggcgcgtttccactcgccgcacgcagaggacagagccacggatctactgctcatgggagaggaggccagcgaatctgatgactattggagcattgtcaaatcactcattatgctgggcgaaatagatgttacgagagcagttctctcgcagaatcgcaaagctggacaaacgagcttcaaggcggccgaacagatcctgaagtccatgccagtgtatc

SEQ ID NO: 10646 - DNA, 599 bp, DROSOPHILA
tgattctgacgctggaaattcgattcgtgttttttatgatggatttgtcgccaaacaatcagatcgaggacagaaaacccatcctaaccgccgacggcctggttcagacttcgaactcccccttcgagccgaccatatcgcaggagacgcaaacatccaacggaatcggcggccagtgccatctgacggttgaccagttggacattgagattctgccgataatctacgacattgtgcgctgcgtggaaaaggatcctctggagaacgccgttaagctgcgcgagtcccaggattgcaaccacaagatctttgaacttcaaaaacgcttcgaatcggcacgcgagcaaatccgccagctccccgggatcgatttcaataaggaggagcagcaacagagactggaactactgcgaaatcagctgaagcttaagcagcagctaattcgcaaatacaaggacacagagttctaggcggcagcaaaataaaaaaaagggcaagatggtgctgcgactgctaatgcgctacctggccaacaacgagcagctcatccagcgcatggcggagagctatcccatgagacgcgctgcccagttggtcgt

SEQ ID NO: 10647 - protein, 143 aa, DROSOPHILA
MDLSPNNQIEDRKPILTADGLVQTSNSPFEPTISQETQTSNGIGGQCHLTVDQLDIEILPIIYDIVRCVEKDPLENAVKLRESQDCNHKIFELQKRFESAREQIRQLPGIDFNKEEQQQRLELLRNQLKLKQQLIRKYKDTEF

SEQ ID NO: 10648 - DNA, 2591 bp, DROSOPHILA
aacaattcgttgcgattttccacttatttgctggaaaaccagaaaaggacgagcatacactgagcgaaaagtcggtgtgaaaaatgcatataaatgcactaagttaatcttgaagaaactgtttttgaatattggcagagatcaaacaaataactttcatagccaagtaaattctgttaaatattaaaaaaaagaaatacttagattcttcttgagtgtgcgcatagccagaattctatgaaaaaccccaaagtcgtaggccgaattgtggctgcggatgaggcagcaagaagttggctctgccattagcattggtgggcacgacgacgacgaggaggaggtggaggagaaggacgaggagcaggccgagtcaaaatcacagaaaatcatcgacaactggcaaatgtgtgaattgaattttcaaacaatttcgcccgtgcagggagtgcagtgctcgtcatcggattgctatcctggtttcggtttctgctcctggcgcttttcccctgcgcggcgcatttccccggctttcccgctggccacgatggaaacgtgcatgatttgagatttgatttgggcggcggccacattacagtcgctaaacctcggcttccgtcccgtcgtcctggcatcctgcgcttcaaaaggcgcgttttaaacatttcgctcacgtctcggatgtttatgccattagcgtttaagttgcccatacaaagtgcgactcgtaggtaagcaaacgttcctttgttttggcttccttgcctgtttttattgtcgagagacagaggtaatcgatgctcaggctagttattgaaaaaattatcgaggaaaacccgaggtacaactcaaataaattcaatgaaattgttactagccagcaaatagctgttgctgttcatttggacaagtacaatttatttattatcacataaaatgcttgctacaaactttgaagctttgtgaaagcccaaaaatatgctatatacaatcacgaacaaatttatctgcactctatgcaacacgctgagcagcagcagtggtaacattccatgtctggatacagatcctgttcctcaacctgttcctgatcctgttcctgctcctggtcgtacatcctcttccgcctggctgaccgatacagtcgccggatgagagctccatatggtttccgcgccatcaggtgagtggttgtcttgtgtatttcgtagacgcaattcgtttcgagacacacaaaaggctcctccacctgcaggatagtttccgatctgagattgggtactggcattggtagcagactcctctgtttcaagatattgatcttgctcttcttgaccaccctccttttcttggcaggattgggtgctgtaatggcaccttggatctccgcctcgaaggattcctggcgcctggaggccttgctcttcaaggccgaaaccgttttgtatcggttctggatatcggtaatgtttctcaaggtctgcttaaaagcaacctcgacttgctcgacttcctgcagcgtattccacagattcttttccataatttgttcacgagaaaattttatacaataaaaaatttgaatacaagaatgcacactcctcccacttcaaaagatcatacgaatatacaaatcctgttcgattgaaaaatcagggaagctagatgtgtgattttctcgttgcgttgtcatagggaaattccgatatgaccaccaagtactcaccttatcgcaaaacaggctgataaaatgttttaatgggaaaaccaatgcctccagcagtctttcgtcactatatatagcgtggaaatcggggtaatactttagttcagaacggaaatcgctttggaaacatgccaccaccaccgcaccagccccaccaaccgcacccaccgaagggtcctgcgcatcctggggatcaccaaccaggaccgcatccccctcaccacggagatccgaagccccatcacggacatcactaggcccatggacaaggactataaataagattcaattttatacagaacaaaacaagatggatactttttagggaacttagtttctaatagaaagtcttaaaaactcttcaaaccaaagaaataaaagcctgtacaaaatacatagctctactcttttctatatcttcaatgtttatgatcttgaattggtgatactgcttaatgcattctaagcttccattaatttgaacaaagcatacatatgatttgaagatctaaatgctttttaaattataatacacgtcctaagtgcaacgtactaagcttaagaatttgttgctgattgttgctgattgttgcttacaaaaataaaatattataacatctccatattgttgtacttatgaactacatgcaaagtcgtcattaacttattctttaagtcacatatagacatatcagtaaacaattcgcttgtttgttattactaatttcgaatgtcatacatttgtttttattgagcgaagtgttgttgtgggaaaacccgaaacttacttatcaaccgaactgggctcgtcttatctgaaatttagataagattacaacgtattcgaatcattttcctataaatggtt

SEQ ID NO: 10649 - DNA, 591 bp, DROSOPHILA
cattcttgtattcaaattttttattgtataaaattttctcgtgaacaaattatggaaaagaatctgtggaatacgctgcaggaagtcgagcaagtcgaggttgcttttaagcagaccttgagaaacattaccgatatccagaaccgatacaaaacggtttcggccttgaagagcaaggcctccaggcgccaggaatccttcgaggcggagatccaaggtgccattacagcacccaatcctgccaagaaaaggagggtggtcaagaagagcaagatcaatatcttgaaacagaggagtctgctaccaatgccagtacccaatctcagatcggaaactatcctgcaggtggaggagccttttgtgtgtctcgaaacgaattgcgtctacgaaatacacaagacaaccactcacctgatggcgcggaaaccatatggagctctcatccggcgactgtatcggtcagccaggcggaagaggatgtacgaccaggagcaggaacaggatcaggaacaggttgaggaacaggatctgtatccagacatggaatgttaccactgctgctgctcagcgtgttgcatagagtgcagataa

SEQ ID NO: 10650 - protein, 179 aa, DROSOPHILA
MEKNLWNTLQEVEQVEVAFKQTLRNITDIQNRYKTVSALKSKASRRQESFEAEIQGAITAPNPAKKRRVVKKSKINILKQRSLLPMPVPNLRSETILQVEEPFVCLETNCVYEIHKTTTHLMARKPYGALIRRLYRSARRKRMYDQEQEQDQEQVEEQDLYPDMECYHCCCSACCIECR

SEQ ID NO: 10651 - DNA, 3900 bp, DROSOPHILA
cttcatctatattcatcatcatatatttcattaggtattcttctacggctgcagtaattggaacactttagtgtcttatatcataactttaaagttaaaagtagcaaatgtataatagaaatttcaaaataatagcgaaaatttgaagaacttagcaatgctatcctagagcatttcgaatccgacttagaaatctacgattcaccgattctcaacgtattgtttacatctccgatgcccgatgttaagtacttaagcgactggggggcgagcaaaaaagagtcacttcaatttcgcttccacatcgatttgaatacgcttataatatacatattcgggtgtaagaaattcgtataaataaatatgcgcagtgttaataacgcagtcgacccgacagttgctcttaatcgcggcgcttttgcgcaatactaagccagtgcagaatatttaagatcgtttagtttgtgcactcaaaaaaaaaaaaaaaaagagaacaccagacagtggttatttgaagatgttaatgtaaaaatccaatactactgtgaatggactaatattataagagtcaaatgattttattcaaatactattcaccttttgacgggttcgcttatgaattgaaatagaatggtgttaaaagaaaagacataaaatgcacatcgataactaattttatttggcacttttatgtgacaattaatcatttagaccgcgcataatattacaaattgaaaaaacaaatgaatgatcacattttactgtgaatagtaaatgacagcttgtgagaaatatgtcgctgtacactattttttaaatttatacactgtgcaccgattcggtttgttttttcttgtgtaaattcgcttgttacccaacttttatgacccttgggtccggtgaccctttagtaaccgtctgatcttcgcgtctgtgttccgcttaaaacgcttgatgcgacgcttcaacgaggcagttgctctttagaacgtccgtcgcaatgttctggctgggattcggattgctgttgctcgcgttgtccctatacctgctatatgtcttcgagcggcagagcaggatcgaccggctcacccacaaatggccagccccaccggccctgccattcattggccatctgcacattctagccaaattggtgggaccgcatccacttcgacgagccaccgaaatgatcaacgaacatctacacgatcatcgagcaaaactatggatgggcactaagctctatctcgtggactgcaatcccaaggatatacaggctctgtgcagtgcccagcagctgctgcagaagaccaacgactatagggtcttcgagaactggctctgcgagggtctcttcaccagtggattcgagaagtggtcccatcgccggaagatcgtaatgccggccttcaactacaccatgatcaaacagtttgttgccgtctttgagaagcagtcgaggattcttttgacgaatgtcgctaaatttgccgagtccggggatcaaattgactttctgcaactgatcagctgcttcactttggacactatttgtgaaacggccctcggagtctctgtgggttcgcagtcgagcgccaagtcggaatacctcgatgctgttaaatcgtaagtaaactacacgtgtattacaagtcccttagagacaacttagtttgtatttaatcagcaactacggtgtgatgaatcataaaattttcgcacattaattaaacaaaacaaacagttgagaagatataaaagactcatccagcacgcttgttcaataaaaatttcgtaacccattatagatagcttaattgtttattagtcagaccttttttttatttacttacttggaagccatagaaaaaatacaagttacaggttacgttagtttttaatattgatattatacatcttcgtttgctcacagaatccttgtcatcatcgataagcgactgaagaacatcttctaccgcaactcgtttattttcaaacgcacatcgcattataagcgagaacaggagctgataaaaacgcttcacggattcacagagggcattatacagaaacgtattgatgaaatcaaccaggatgcagagaatcgcaactaccagagcagtgatgcggaattggacggagtgaagcggaccctatgctttctggacaccttgctactgtccaagggtcccgatggcaagcctttgacagtcaaggatattcgcgaggaagtggacaccatcatatttgggggattcgatctcacggccaccaccctcaactttttcatgtataacatgactcttcatccggagcaccagcagcgatgtcgcgaggaggtgtggtcggtatgcggcaaggacaaaagtgaacccatctccatagagcaggtgcgccaactggagttcctggaggcgtgtataaaggaaactctgcggatgtatccttcaggtccactcactgccagaaaagccacagccaactgcacaatcagtaagtacatattgttatttgttcctagttatatatatacaaatattttaaactttctagatgacttcttcataccgaagggtagcgatgtaatcatttcaccaatttacatgggacgttgcaaggacttctttccggatccgatggtcttcaagccagatcgctgggcaattggagcggagcccaaaattgaggccaccacttttataccctttatggcgggggctcggagttgcatgggccagcggtatgcgatggtcatgctcaaaatggtgctagctcacctgctgaggaacttcctgttcgagccccttggcgagcgacaggtgaagttgaagctcaactttgtgatcacgctgcataccgttgaaccctatctatgtagagctaaaaatctagattgaggctagccaaaagtttttcacttagccaatacgtttgtcaataaagttaggtattattgtaggtacattccgcttattctagtcttttgtgtattttttttccttcagttaagctgcttctacatggcccaaagattgcaggtattctttctgtaaattatgcctccttaattaattcaatcaaacagatagcacactctttttaaagcatttttatcagggattcttttaagaaagtttaatttacgaaggcttttcaacttcaaacttattatgaagcttttagaatagaccgctatcaattcgtttcacttggatcctttcaaagcgtttacgtttcattgcgacgcacaacatttccgtttttaatgatatactcgtttaaaaaaagaattctatacgatttgaagtattttttcgcctgctcatttttatgcgatttaagcagggcgcgttcgtctagaaaataatttctggctggcgtggatttttattgtggcaaccgagcagcggaaaatcaacaaacatttcctggcgctgtaataaataaaaatgcataaagcagccaccaaaccgtcgccagtcagtcactcggtctgcctgatcctgccacatcctgccttatcctggggaaaatacacacactcccactcccgccgaatcgccattatccaccagcatcatcatcgaattccggtgcaaattatgagcgttgcctgcttattattgcgacagccacgggggcgcaggataaggcggaatataaaatgcaatttatttaaataaaaatcaagtttaattcgcagtgtcgtaaatttttcttttatttttttttttatactcttcagctcgtcccgggcattgaatttcacgcttttgttaacaagcgcataaaagtttgttctatctgccaactgatacgattctggcattcagaagccccagcagaaggggttagaagactgttgaactcagtggctgattggtggtgtgagtttcg

SEQ ID NO: 10652 - DNA, 1533 bp, DROSOPHILA
atgttctggctgggattcggattgctgttgctcgcgttgtccctatacctgctatatgtcttcgagcggcagagcaggatcgaccggctcacccacaaatggccagccccaccggccctgccattcattggccatctgcacattctagccaaattggtgggaccgcatccacttcgacgagccaccgaaatgatcaacgaacatctacacgatcatcgagcaaaactatggatgggcactaagctctatctcgtggactgcaatcccaaggatatacaggctctgtgcagtgcccagcagctgctgcagaagaccaacgactatagggtcttcgagaactggctctgcgagggtctcttcaccagtggattcgagaagtggtcccatcgccggaagatcgtaatgccggccttcaactacaccatgatcaaacagtttgttgccgtctttgagaagcagtcgaggattcttttgacgaatgtcgctaaatttgccgagtccggggatcaaattgactttctgcaactgatcagctgcttcactttggacactatttgtgaaacggccctcggagtctctgtgggttcgcagtcgagcgccaagtcggaatacctcgatgctgttaaatcaatccttgtcatcatcgataagcgactgaagaacatcttctaccgcaactcgtttattttcaaacgcacatcgcattataagcgagaacaggagctgataaaaacgcttcacggattcacagagggcattatacagaaacgtattgatgaaatcaaccaggatgcagagaatcgcaactaccagagcagtgatgcggaattggacggagtgaagcggaccctatgctttctggacaccttgctactgtccaagggtcccgatggcaagcctttgacagtcaaggatattcgcgaggaagtggacaccatcatatttgggggattcgatctcacggccaccaccctcaactttttcatgtataacatgactcttcatccggagcaccagcagcgatgtcgcgaggaggtgtggtcggtatgcggcaaggacaaaagtgaacccatctccatagagcaggtgcgccaactggagttcctggaggcgtgtataaaggaaactctgcggatgtatccttcaggtccactcactgccagaaaagccacagccaactgcacaatcaatgacttcttcataccgaagggtagcgatgtaatcatttcaccaatttacatgggacgttgcaaggacttctttccggatccgatggtcttcaagccagatcgctgggcaattggagcggagcccaaaattgaggccaccacttttataccctttatggcgggggctcggagttgcatgggccagcggtatgcgatggtcatgctcaaaatggtgctagctcacctgctgaggaacttcctgttcgagccccttggcgagcgacaggtgaagttgaagctcaactttgtgatcacgctgcataccgttgaaccctatctatgtagagctaaaaatctagattga

SEQ ID NO: 10653 - protein, 510 aa, DROSOPHILA
MFWLGFGLLLLALSLYLLYVFERQSRIDRLTHKWPAPPALPFIGHLHILAKLVGPHPLRRATEMINEHLHDHRAKLWMGTKLYLVDCNPKDIQALCSAQQLLQKTNDYRVFENWLCEGLFTSGFEKWSHRRKIVMPAFNYTMIKQFVAVFEKQSRILLTNVAKFAESGDQIDFLQLISCFTLDTICETALGVSVGSQSSAKSEYLDAVKSILVIIDKRLKNIFYRNSFIFKRTSHYKREQELIKTLHGFTEGIIQKRIDEINQDAENRNYQSSDAELDGVKRTLCFLDTLLLSKGPDGKPLTVKDIREEVDTIIFGGFDLTATTLNFFMYNMTLHPEHQQRCREEVWSVCGKDKSEPISIEQVRQLEFLEACIKETLRMYPSGPLTARKATANCTINDFFIPKGSDVIISPIYMGRCKDFFPDPMVFKPDRWAIGAEPKIEATTFIPFMAGARSCMGQRYAMVMLKMVLAHLLRNFLFEPLGERQVKLKLNFVITLHTVEPYLCRAKNLD

SEQ ID NO: 10654 - DNA, 4525 bp, DROSOPHILA
ttatatcgctgccaagatttccagttcaccatgaaacgggacgcagctggcaccagagtctcatggtcgcgtttttgaaccattttcgccaagagctggagcacgagagcgggccaaaacccgttgtgcaacatttggtggccgccgtcgcatttggccagacggatgacggcaaagcaaccttgacccggttctacttctagaacctggtcaccacataacctccattcgcgcttgactactggccttttccatgctcccagttggctcggctatcagacagacacagaacctaattagcatttccgcacgttcgctgtcgtagttgtagttgtgagtgtgggatttccataggcgaaggatactgttgctccttgggaaacctaattaaaagtgctccttgaactcgccgcctgaaaggcttcagcacggattaatgcctccggttggcagcatccagttaacactttaagtcttccatcagcaagtcaaggagagggcgtaagctggcgaaggagcttgccatcaagatgctaaagttttcaattagaacattttctcatttacatttcaaatggatttgttgcgccacttgcgcccgtttggctcaatcttaattggtttttatggcagagttttggctaagcgatggatattgcttgaatttctgggtgttattttatgtggttccttaaacatgtcgaagtttaagactcgtaactaatatataaatatatatacaagatgaaatcatcaaaaaatataattataatatatatataattaattataattaactcaactcaactgttaactgtctgtgccaaccacccttatttccatgccgaacaaccaactgttgccggttgaccaaagaaaaaaacgttgccatgatacttgacggaaaacaaataagggtcgccatggaaacaccgacaagcgaccataacaaagggctttcaagtgtatttttcattcaccaacggaccgctcagcgaaaatgttgcatcagggaattatcctgcgtgaggggcatgtgacgaggacaatatataatctggtaaaccgtaacataattataattaaaatataaacactgaaggacgcggtgcttcagatcaaggacaagcgctacgaggatgtgatcgagtgcataaccagttttggtgaggcggccaacacgagggcgggtctatccaccctgggacattgttactaccacgcccagaaatacgaggaggcggccacctgctacgagcaattgtgccaactggcgcccaaggaagccaagtacaggtgaaacacagttcaagttggtccatctaacagtgtagttaatgaaaggtggactgggtctacgcatatcagttactaaagcaaatgccattccttttagattctactatgcccagtcactttatcaggctggcatctttgctgatgctctgcgggtgctcaagcaaatgggtgaccaggaggatgagctccgggagcagtgtttgcagctgcagagtgcgatcctctactccagcgaagatttcgcgggagcacagagcctgctgaatcagcgggcgggaggcactgcagataccctcaacgatgagggatgcttgctgttccaggctgatcagcacgaggcggcagtgcagcgatttcaggcggcgcttcaagtgggtggctttaacccattagtggcctacaatgtggcgctggcacattttcaaaagaaacagcgagcccaggcattggattacacatccgagattgtagagcgaggaatgcgcaatcatccagagcttggaataggcgcccagatggatattcccgatggcggtgccaggagcgtgggcaatcccatcaccatggccatttcgggcataactcaggcacttaatctcaaggcagccattgaatttcaagatggcaatgaggaagcagccagggacgccctcctggaccttcctccacgagccgaaagcgaactagatccggtcacattgcacaacatggccttaaccgatgtcgaaggtcctgtggcgggtctgaggaagctggcgtttctcctggaactgggtgcaccctcctgccccaaggagacgttcgccaacattctgctcatctgctgcaagaacgaactttacgaaactgctgcggatatcctggcggagcacacggacctcacctacaagtatctttcgcaatatctctatgagttattggactccctaataaccgcacaaacaagtgccgagttggccgagaagaaactaggtactctggcctccagtcttgctggtaaactgcgcagcttggccgcaaaagtgcaggaggtcagggccaccaatgagcaacaggcactcagggatgccctcaaggactacgaacaggcactggaactgtgagttaaccttaacgtgatatttattttctagaatttatttacatttcattaagtatgggtcgcgtctggatttgtgtttatcaaatgcaacagtatttaattttataatattacgctttttcaaacaaagttacttgcctgtggtgatggctcgagcctggatctcttggcgggatgatgacttcgtcggagctgaaagggaattccatgccagtgccgagttctgttcggagaactccatttggcgattgaatgcaggacatgtgctcttcatgcagggcgacaaatacaacgaagcggctgcgttttatgaacccatcgtgcgccagcattcggatgatgtgagattgaaacatttaagctattcacacagatatttactttttgaatgcccggtactcaaagtgaataagggagttataccaatagctaagaggtgtttgaaatatggcaatatcttagtaagggaaatatttataaaatccataaatcttagtagagagcagaatccctctcacaaaagtaccgggtatctaacagtcggtacagccgactttatcatatcaggtggcacccaattttaatctaccatcccccgtttcaaccagatcatgtccgtttctgcagcggtgctggccaacctgtgcgtctcctacatcatgacattccagaacgaggaggccgaggagctgatgcgtaaagtggaaaaggccgaggagatgaagggcaatctgggcaagcaataccaccacctgtgcattgtcaatctggtggtgggcacactgtactgcgccaaatccaactatgagttcggcctatcccgcatcgcccatgccctggagagtgggtctgggaaccggctgtatgccgacacctggctgcatgtgaagcactgtatcctggggcttctcaccggcatggccaagcagaacattatcctgccctatgccaccgtgcaggaggtcctcaactttctgcgcttttgcgagtcctacggcctctttacgccggccaacattttttcggccaccgaacaagtgccggaggagccacttaccattggcctggaggccaggaagttgaggctcctattgattaagctgagcgaatacgataacttttagattcggctttaactgtttaacaaatgtataagaaataaacatcaaataaaattaagaagaagttttgatatatgtcatatcctttaattgcactttcctgcaccttctttaaagaacttaatttaattgtgataagacaaatatgaaatttcagaaaaaaccttatcgattaatttgtctttgctctgtgacagctggtaatgccacaaaggactctggccgaagtgaataggcaaaacaaggtgggtaataaatataaattacaaaaaaaaaagacgatgaagagaaatctgtcataaatcacattaatggcagactttcatcaggcaggtaagcacaaccaggaagtggattgtatgccaatctattgacaaagaacccgggcagcacgtgctaaccggggtgaactgccttcccatttatcagctttttcccaaccccataagcgttctgctcggcgagcacgtgagcactcacgcgttcgatttgacaacgtgtttatgtcgcagctcaattccgtattgacagcctcatcgacatcatcatcatcatactcatccccatcaatgacacaaaaaattcgagcaagagcacccgactacaaaatacttggtagggaccttgcagaaatcaaattgcttacctaaagccgatttatcaacggccagtaccattaaacttaacttgagaaaaacagaaatcaatagaaaaatctttttgaaacatgattgaattgtaaatataatattcaatcccatatcatcatgaataatttatttatacatataaataatattattagaaagtggctatatatttatttgaatctaagtcaaatctttattacaagtttcctacacaaaatgcttgttttggtgcttcaccagttctattaagtactttctttgctcatactttttgaactccatacactctgctcccaatgaggtataaaaatggcgacaaaaaatcgctaacaagcactttaagctgcttctgg

SEQ ID NO: 10655 - DNA, 1959 bp, DROSOPHILA
atgttgcatcagggaattatcctgcgtgaggggcatgacgcggtgcttcagatcaaggacaagcgctacgaggatgtgatcgagtgcataaccagttttggtgaggcggccaacacgagggcgggtctatccaccctgggacattgttactaccacgcccagaaatacgaggaggcggccacctgctacgagcaattgtgccaactggcgcccaaggaagccaagtacagattctactatgcccagtcactttatcaggctggcatctttgctgatgctctgcgggtgctcaagcaaatgggtgaccaggaggatgagctccgggagcagtgtttgcagctgcagagtgcgatcctctactccagcgaagatttcgcgggagcacagagcctgctgaatcagcgggcgggaggcactgcagataccctcaacgatgagggatgcttgctgttccaggctgatcagcacgaggcggcagtgcagcgatttcaggcggcgcttcaagtgggtggctttaacccattagtggcctacaatgtggcgctggcacattttcaaaagaaacagcgagcccaggcattggattacacatccgagattgtagagcgaggaatgcgcaatcatccagagcttggaataggcgcccagatggatattcccgatggcggtgccaggagcgtgggcaatcccatcaccatggccatttcgggcataactcaggcacttaatctcaaggcagccattgaatttcaagatggcaatgaggaagcagccagggacgccctcctggaccttcctccacgagccgaaagcgaactagatccggtcacattgcacaacatggccttaaccgatgtcgaaggtcctgtggcgggtctgaggaagctggcgtttctcctggaactgggtgcaccctcctgccccaaggagacgttcgccaacattctgctcatctgctgcaagaacgaactttacgaaactgctgcggatatcctggcggagcacacggacctcacctacaagtatctttcgcaatatctctatgagttattggactccctaataaccgcacaaacaagtgccgagttggccgagaagaaactaggtactctggcctccagtcttgctggtaaactgcgcagcttggccgcaaaagtgcaggaggtcagggccaccaatgagcaacaggcactcagggatgccctcaaggactacgaacaggcactggaactttacttgcctgtggtgatggctcgagcctggatctcttggcgggatgatgacttcgtcggagctgaaagggaattccatgccagtgccgagttctgttcggagaactccatttggcgattgaatgcaggacatgtgctcttcatgcagggcgacaaatacaacgaagcggctgcgttttatgaacccatcgtgcgccagcattcggatgatatcatgtccgtttctgcagcggtgctggccaacctgtgcgtctcctacatcatgacattccagaacgaggaggccgaggagctgatgcgtaaagtggaaaaggccgaggagatgaagggcaatctgggcaagcaataccaccacctgtgcattgtcaatctggtggtgggcacactgtactgcgccaaatccaactatgagttcggcctatcccgcatcgcccatgccctggagagtgggtctgggaaccggctgtatgccgacacctggctgcatgtgaagcactgtatcctggggcttctcaccggcatggccaagcagaacattatcctgccctatgccaccgtgcaggaggtcctcaactttctgcgcttttgcgagtcctacggcctctttacgccggccaacattttttcggccaccgaacaagtgccggaggagccacttaccattggcctggaggccaggaagttgaggctcctattgattaagctgagcgaatacgataacttttag

SEQ ID NO: 10656 - protein, 652 aa, DROSOPHILA
MLHQGIILREGHDAVLQIKDKRYEDVIECITSFGEAANTRAGLSTLGHCYYHAQKYEEAATCYEQLCQLAPKEAKYRFYYAQSLYQAGIFADALRVLKQMGDQEDELREQCLQLQSAILYSSEDFAGAQSLLNQRAGGTADTLNDEGCLLFQADQHEAAVQRFQAALQVGGFNPLVAYNVALAHFQKKQRAQALDYTSEIVERGMRNHPELGIGAQMDIPDGGARSVGNPITMAISGITQALNLKAAIEFQDGNEEAARDALLDLPPRAESELDPVTLHNMALTDVEGPVAGLRKLAFLLELGAPSCPKETFANILLICCKNELYETAADILAEHTDLTYKYLSQYLYELLDSLITAQTSAELAEKKLGTLASSLAGKLRSLAAKVQEVRATNEQQALRDALKDYEQALELYLPVVMARAWISWRDDDFVGAEREFHASAEFCSENSIWRLNAGHVLFMQGDKYNEAAAFYEPIVRQHSDDIMSVSAAVLANLCVSYIMTFQNEEAEELMRKVEKAEEMKGNLGKQYHHLCIVNLVVGTLYCAKSNYEFGLSRIAHALESGSGNRLYADTWLHVKHCILGLLTGMAKQNIILPYATVQEVLNFLRFCESYGLFTPANIFSATEQVPEEPLTIGLEARKLRLLLIKLSEYDNF

SEQ ID NO: 10657 - DNA, 3730 bp, DROSOPHILA
tgaaccgccagaatatcatgaatacctccgcactcaaactcatgaagccccttttagggaaagggaaggaccgcctggtgcgtgaactgaccgccgtcttccgcttcctagtgctggatgatgacattcgcgttgagtttggatgcgcccacgagcacgcccgccaaatagcaggcgaggtgctcatcaccttggtggaacttttgccggcctatcaggatcctaatgttctggctgatcttctgctgaccattggaacactggctgtgcgtcaggaactctgtacagctatcgacgaggctggtggactgaagtccgtcttcgagatcatgagttcgaatttggatgaggtgcgtctaaatagagaggccttaaagttgctacgtgccctggctggccaagactccgtgaagtcacatatagtacagcagggcgtggctcctataataaagcaattgctagagacgcaccagtccaatgaaaacatcgttgccgccgctttggcctgcgtgactactctgacactccgagtgcaggaacacagtgccgcctttttcgataccggcatcgccgaagtaatcgtggaggctcttcgcgcccatcccaaacacaagatagtccagcgaaacggagcgtgggccatccgcaatatggtgtcacggtcgcggaaccagtgtgaaacctggatctccttcggcgttgaggatctactaaatatggcaatgaaggagcaccccagtgtggagcaggacatcaaggcggcgttgcgcgacctcggctgtagtgtccacttgcgcgaggaatggacgggcacggcggagaaaaaaattgccgcctaatcgcacacacatatgccttttgtatttttatatatttactgctaaattattactattgcttaattcatgcattggctaactaacaaaatcggcaatcctcaataccaatcgcgtgctaatacccaactggggcagtctcttatgatcacatggctgtggacttatttgcccaggttaaagttgcgcagcgagccggctttaagacgctggttgacattccgggaaagggcggtcgaggatctgattgtggaaagaccctcttcctcggcgcgctgcgcaaaggggtcaaccttctcagaaccgcccattccattgtagacaaaatttgagcccgtcgtggccgtcaacgcagaactacttgaacttcccagcagcagtcttggcttcttgaagattgaatactgggggaatatacggaatttttaaatggttaagtggaattcggcaaaattattgcgtttaccttttcactgagatcactgctggttttccgtatggttccgctggtcatagacacaccgccaccgactcccttgatgggcgatattttagacttggccagcccaatgttacccttagtattaagaagatgcgccaacccgacgctgctggatttaatgttgagatatggggaggtggattcttcgatgcgcttaatattctccttctgtagggcagcaaaatattagtagcttatattttcgtttattcgtgtctactcacaactgtaggggaaatagtggtacgcctttcctcccttttaagggccaaaatgttgctgttcagaccacaagaggcatttggtgagtccaagtaagcggtcttgttctcaaaagcttgtagctgaaaagataatagtatgtttaatcgaaattgtgttaaagaaggctcagcaaaccttctcctgcgcctggtaaaggtcgctctccaggtgtgaaacacgctcttccagcttgctgcaatcgaatgagcacatatcaattataaaaaccacgtttggaatgttgtgagcataccgctttagttcgatctcctttcgcagatcattctgcaccaccttcactacattcctgagctccgtctttttgctctcgcattgtcgcaactccctcttgagagtggacacccagttggctaggacatgtggatcagcctcgttcttgagcaagcggtcggcatccgccgagccagccgccagaatagccgatatgccttccatactctggatctgtgatttcaatgttttgttttccttgcgcaacccatcaacgacatgggcatcactcttgaggacgccaatttgctcgacatagctgctgatgagaaaatccttcttttgcaccttctgctccaaaccggctatggttttgctgcaaatgagaaatgcatcagtctggtacttaaggcaatgtgtatacaaaagcatacaggcacttcttttgtgtttccttcagatcccgaatctgctgttcatccttgttgcgctctttttcgaccattttcatggacaacatcgcattgtccagctgctcctgcagtgaaccaacatcgatgtggctcacatccaagttggccagattgaaatagaccctaaatatgttgcgggtagtgcacttattccggcactgaggacaggtctttgatctgcgaaagatatttgattttattgtcgggaatcagaaatatccttatgcgttgtttaccgatcgagccattgatttagacagttgtggtggaacatatgaccacaaactgtggcaaaaacctcgtcggcctggccaaacaattcggcgcatatcacgcagtttaagttcaacatttttggcacaaataactacataaaaatagttattacaaaagaacaacaaataaacgcacgccgaacagtttgcgcgcccaacgaaacacagctgactgatggcgattttacgatgctccaatgagcggaattcaccacaccagtatttgtcaagaatcgattgtagacaataactgttagctgatagatatttccacgacaaactaattgctaactaacttggcttaagtcgaaacaacaaataatgtttacaaatacgcttactcagccactgaaactaaaattcatcctaaattttagaaagatatgtatgtgtggatactttttaaaccctacttcttaagatatactgtggatataaatttcatattttattctgccaatccatcttaaatccagctacttatgctccgtactttagccccatggtggtcttatcgataacagcgggagcactgtggcgctatttacgaaagcacaccgtgtgctttcgatatcgcgacaatgctatctagaggtggagaaacatcgatgttttaaagaacacaacacatcgatgtttttccacctcttttaaaagtcgtcaaatagcaataataaataggaatagttataaatttgtgcatttaatttcgttcgttatttgcgtttcaatcgaccgtgggtcccagtgagctaactgcacctgcacccaaagcggaagctgagcgaaaaggtgtttcatttggcgtgcgcatttcgacacctttgtcaacgctgattcttatttggtggaccgacgactcacacacacgcgcgtaccaatataacagacactgaagtgtgtgtggaagggacagacaaacaaccgtgcgataacaacaacaaacggcagtgatcgcggcgagaaatggaaatggccaacaacatggtcagcagcagcaacagtggcggcggtggcagcagcaacaccacctcctacggcaacaacagctacaacaacagtgcggtggacagtggtcacagttcgcacagtggtgtcggtagcgggggcggtggtgagggaacgggagcgcgcctccgggatgtttgt

SEQ ID NO: 10658 - DNA, 1440 bp, DROSOPHILA
caaactgttcggcgtgcgtttatttgttgttcttttgtaataactatttttatgtagttatttgtgccaaaaatgttgaacttaaactgcgtgatatgcgccgaattgtttggccaggccgacgaggtttttgccacagtttgtggtcatatgttccaccacaactgtctaaatcaatggctcgatcgatcaaagacctgtcctcagtgccggaataagtgcactacccgcaacatatttagggtctatttcaatctggccaacttggatgtgagccacatcgatgttggttcactgcaggagcagctggacaatgcgatgttgtccatgaaaatggtcgaaaaagagcgcaacaaggatgaacagcagattcgggatctgaaggaaacacaaaagaagtgcctcaaaaccatagccggtttggagcagaaggtgcaaaagaaggattttctcatcagcagctatgtcgagcaaattggcgtcctcaagagtgatgcccatgtcgttgatgggttgcgcaaggaaaacaaaacattgaaatcacagatccagagtatggaaggcatatcggctattctggcggctggctcggcggatgccgaccgcttgctcaagaacgaggctgatccacatgtcctagccaactgggtgtccactctcaagagggagttgcgacaatgcgagagcaaaaagacggagctcaggaatgtagtgaaggtggtgcagaatgatctgcgaaaggagatcgaactaaagcggtatgctcacaacattccaaacgtggtttttataattgatatgtgctcattcgattgcagcaagctggaagagcgtgtttcacacctggagagcgacctttaccaggcgcaggagaagctacaagcttttgagaacaagaccgcttacttggactcaccaaatgcctcttgtggtctgaacagcaacattttggcccttaaaagggaggaaaggcgtaccactatttcccctacagttaaggagaatattaagcgcatcgaagaatccacctccccatatctcaacattaaatccagcagcgtcgggttggcgcatcttcttaatactaagggtaacattgggctggccaagtctaaaatatcgcccatcaagggagtcggtggcggtgtgtctatgaccagcggaaccatacggaaaaccagcagtgatctcagtgaaaagtattcaatcttcaagaagccaagactgctgctgggaagttcaagtagttctgcgttgacggccacgacgggctcaaattttgtctacaatggaatgggcggttctgagaaggttgacccctttgcgcagcgcgccgaggaagagggtctttccacaatcagatcctcgaccgccctttcccggaatgtcaaccagcgtcttaaagccggctcgctgcgcaactttaacctgggcaaataa

SEQ ID NO: 10659 - protein, 455 aa, DROSOPHILA
MLNLNCVICAELFGQADEVFATVCGHMFHHNCLNQWLDRSKTCPQCRNKCTTRNIFRVYFNLANLDVSHIDVGSLQEQLDNAMLSMKMVEKERNKDEQQIRDLKETQKKCLKTIAGLEQKVQKKDFLISSYVEQIGVLKSDAHVVDGLRKENKTLKSQIQSMEGISAILAAGSADADRLLKNEADPHVLANWVSTLKRELRQCESKKTELRNVVKVVQNDLRKEIELKRYAHNIPNVVFIIDMCSFDCSKLEERVSHLESDLYQAQEKLQAFENKTAYLDSPNASCGLNSNILALKREERRTTISPTVKENIKRIEESTSPYLNIKSSSVGLAHLLNTKGNIGLAKSKISPIKGVGGGVSMTSGTIRKTSSDLSEKYSIFKKPRLLLGSSSSSALTATTGSNFVYNGMGGSEKVDPFAQRAEEEGLSTIRSSTALSRNVNQRLKAGSLRNFNLGK

SEQ ID NO: 10660 - DNA, 5102 bp, DROSOPHILA
catctgcccacctttaagtcggatgccagcaaggtggtgtccaagggtatgggcctgaagaaggcctacattggcaagcagaaccagttcagcatcagcgccaccgatgcgggtgagtaatattcatacccattttaaacttgatgttataatatatcctgcttttgttaaaaggcaacaacatcctgtacgtgggcatgtacggaccaaagggaccctgcgaggagttccacgtgaagcacgctggccacaacaactataatgtgcagtatctggtgcgcgatcgcggccagtacgtgctcctaatcaagtggggcgaggagcatatacccggctccccattccagatcgatgtgtagggcgctatatagccggccaggcatatgtgtacgtgtagatatatgcttcgcatgtgtatgtgtgtgggcgcgcatgttccagggtcaaaagtcgtgtgtttcttgttttcatcataacgctctttgtttaattttaatttcttgatttatcatcatattttaggtaagtttttgttatttgtacatacatggaaggaagaagcttctgtttttcgacgcgccattttcactctttaaattgatcttacgttttatttgttttcttgtgaatacataaaattaacaattgccgatatgaattttgatagacttcatggaaacgaactaaagcacaacttcgacacacaagaattactattgcaatgcgaataaatctcttaaacaattatttaatacttaagcgaaaaatttatgatgattaaaatgattatgacgtattatgttttctattatcactatcgatcatgtaatttacgtgaaataaatcaaaacacaaaaaaatgaactaaatacaacttttcttatataatttcttttgcaaggacgtgtttaacaccaccaagaaatccgtcatgtacaaccaaaacatgaacctaatatatttaaaaaataggtctgaaatatgaaacctaactacttaattacttgtcaccggaattattctcgagtatgctgtacaccgttccatatcgattgatttgctcgaagatgtcatcatcgcttgcacttgagcccgagatgttcccgatgttctgcgcatcctgcggtgcactgagagctgcggcgagttggggagtcggctgatagtaaaccgagtgtcggctatcaaagctccgactgccgatgtggtacttcaggtacttgcgggcccaacgttctccaataatctttccgagtccctgctcggtcagtgtgaagctggcgccttccggcgcggaagggctgtgcagcagaatgccgcgcttggtgatcttgatggtcgctggaatctcttgtcgttcacttgcaggcggttcgcagccagtggtagatgtaactacagtgcagtcaggatccccgcctgtggggctgcccatctcttccaaactgctcgttggggagctcgagctgttcgtcgctgtcttctcctccgtagtgctaacagcggctgccctcttgactcctcgtctcttgggaagcacgcggtagcaagccgtgtcgttggccagagctgtggagttgcacgctacgctttgattgttgaataccgtcattgatttctctgcaggtgattggggctgcttattagatggctcccttttcgtttttttgcgcttctgttgttcctccttgtaggtggccttcgacatagccagggctatttgcagatcatcctccgagtttgatgccccatcaccaccttgctttaaaatgcttgccgtagttgaacattgtggtttaggttttgccagtacttctgatgatacatcggactcctcttccctgacttgctctaacttcgaagtcgaagtcacagaagaagttgttttcgttttttctgactttttcaatctcgaagtagacggttttccggtcgcacctgtctttctaactgactgcttttttgccttagctgcaacttgtttttcagataaggtttcagtgctgtttttttccaggatttcgttgttagtaataatactctttggaatttcggactttttaccagaaacccttttctgtttggtagacttttcaacggcagtcttagtcgatgagttctccatgtgcatgaaatccttatttctgtcgtcgaaagattctcttccaatacaattatccactttttccataagactcgatgccttttcgtcagctatagggattgttgatatcagctgctgtaattcatttccgttgagtggtgaagtttccctaatacccctcttaggcgctttctttgctggagattcaaatgttgcagatgtaccacttgatccgtcaatagatacgcttttcatatgagcaactggaagatacgtggattcaattggagagttcgttgcagtcggcccttcttcttgtatttgtgccaaaccattgggacgcgcttcttttcttatagccttcttcgccgaggaagtaggatgggtaatcttaccagcggcatttggagttggaaatgtcattcctttttttttatccgaacagcatagcaatccttttttagccaaggcgttatcttcatcggaagactcactatcaaacatttgcatatacttttctttcgataagaccaatttggaaacagaggtagctttcgaactcagtggcttttgttcgtgacctttggagcataccggttgatgactaactttcctggcatccatcggttggtgcttttgcttcctagtcttttcctgtgtctcctgggtcaaatgattacttctgttctccaccacccactcttcggttgagctattggcaatgtgaatgacattggagcataggcggtcactattgcagcaactacactcgttctctggcagccttggtctcaagtccatttccatatcgaaggtgtgttggcggcgcatggtgtgcatggttcgagatgccatctgacggtggtgatactcgcgttgacctctgccgtacgggcaggactggtagacacttctagacagagcgtaatgcctccggcaggagtggcagtcgcagccgccgaatgatgtatcctcctcgctgctggatgccgagtcaaacatccaggagtttatgcgccgcttacgcagattcttgcgtctcatatgatggccgctggagtagacgcattgcatcggcgtagacgccagatatgcaagctggcgctccctctcacgtcggcgaagcaacacggcctgcatgtggtgacgatgctcctgctcgtcaccataggcgtactttgcccgcaactcgtctcgtttgtgagagtgtttacggtacatcttaatggtggtcatgttcttgttggtcatgtgagcattgcgccgacgactctgctggatgtagcgagccgtgtcgatggagtgcatcgattcgtcgctttcgtctgagattgagttgtggtgcggtggaaggtactttggtggtgaggcctccaggtagacgctgttgtgccttcgcatccagcggcccacatggtgttcgatctgcttttcatcaaaagtgtccagaatgcgatccagtcccgcctcccgccacttgcgcttgtgctcctcgaccaccggcaccgtttgattaaggatttcctcgatctccgcctttgcctcgttatcctcattggcgcaaagtataagtgtcagttctgtaacgctggtggcgttgatatggcccatttcaagctttgcctcgtcgggcacattgtcctccacagcctcctttgccacgtcatccaggtcggggtcctcgtcctcgccgtggaacaagttgtcgaactcggccacatctatttccatgccgtcttccaggctggcaaaatcctataaaacaatatcgtccatcaagaagagacgccacttgggtttctacggactcaccgccattttactggaccaggccttagagcgctcgtagaccattgcctccagtgtttcctcgtccaccaccgcattcgccatggttatgtagttatcagttcacggaatacttgattaaaatttataaaaactaaaagaaatcttaaaacacaaaaataaagagtcaacaaaaatggcgttgccactggtgttaccgtctccaaggcgccaaaaaatacaccaaaacgcgacttaactaaacacgtcccatttttatttatataaaacaaatagaaaacttgggttcctcatttccaataaggtcgttttgatgttctatttgcacggctttttgattataattattatttatttaacgatatcctgtttattcaatttatttatttttttatttactgcatttttcgctagcgtccagcgttgccagatcaaatgaatactcggagtcaccaatgatgccaagttcgcattagcgcgccaaaatcgaattgtttatttttgtggggtttttattttgaagttatatatgttttacattagattaatattgcagataaacaaacgaatacatattatatgcttaaataactgttcaattgaaatacatgtacatcgctcccggtcctctgttggccactaaatgtcggaatatgtctgctccagcgtttcagtttgtgttgtctcggtgtcgttaataaagttgtgtatatattaaaataggctgcttggaatcggaatttgctacggcttcgccagctacttgcggttgcgtatggcgcggtccatgatcgtattgattcgcgtctccgagtaaccaggaacgagcatgtggatcagctctttcataaataggtcgctcactcccggactggaacgttcggccagctcgaacacagacttcaggtcgccgatgtcgctgccgacgcctatgttacggccgcctgatcctccgcttcctgcagatcctccgccggagtactttcgctggatgtcgctcagcacggggaagaggaagttgttcagacaggcgctgttcgtttggactaggcgttgtcccgccccagagtgcttgacatggctggcatggttggtggccacatgctcctcgtggctgtggttgttgctactgctgctgcagctggcaaccagcgcggcgttatttgcatggaatgattcacgttggctg

SEQ ID NO: 10661 - DNA, 3045 bp, DROSOPHILA
agtggcaacgccatttttgttgactctttatttttgtgttttaagatttcttttagtttttataaattttaatcaagtattccgtgaactgataactacataaccatggcgaatgcggtggtggacgaggaaacactggaggcaatggtctacgagcgctctaaggcctggtccagtaaaatggcggattttgccagcctggaagacggcatggaaatagatgtggccgagttcgacaacttgttccacggcgaggacgaggaccccgacctggatgacgtggcaaaggaggctgtggaggacaatgtgcccgacgaggcaaagcttgaaatgggccatatcaacgccaccagcgttacagaactgacacttatactttgcgccaatgaggataacgaggcaaaggcggagatcgaggaaatccttaatcaaacggtgccggtggtcgaggagcacaagcgcaagtggcgggaggcgggactggatcgcattctggacacttttgatgaaaagcagatcgaacaccatgtgggccgctggatgcgaaggcacaacagcgtctacctggaggcctcaccaccaaagtaccttccaccgcaccacaactcaatctcagacgaaagcgacgaatcgatgcactccatcgacacggctcgctacatccagcagagtcgtcggcgcaatgctcacatgaccaacaagaacatgaccaccattaagatgtaccgtaaacactctcacaaacgagacgagttgcgggcaaagtacgcctatggtgacgagcaggagcatcgtcaccacatgcaggccgtgttgcttcgccgacgtgagagggagcgccagcttgcatatctggcgtctacgccgatgcaatgcgtctactccagcggccatcatatgagacgcaagaatctgcgtaagcggcgcataaactcctggatgtttgactcggcatccagcagcgaggaggatacatcattcggcggctgcgactgccactcctgccggaggcattacgctctgtctagaagtgtctaccagtcctgcccgtacggcagaggtcaacgcgagtatcaccaccgtcagatggcatctcgaaccatgcacaccatgcgccgccaacacaccttcgatatggaaatggacttgagaccaaggctgccagagaacgagtgtagttgctgcaatagtgaccgcctatgctccaatgtcattcacattgccaatagctcaaccgaagagtgggtggtggagaacagaagtaatcatttgacccaggagacacaggaaaagactaggaagcaaaagcaccaaccgatggatgccaggaaagttagtcatcaaccggtatgctccaaaggtcacgaacaaaagccactgagttcgaaagctacctctgtttccaaattggtcttatcgaaagaaaagtatatgcaaatgtttgatagtgagtcttccgatgaagataacgccttggctaaaaaaggattgctatgctgttcggataaaaaaaaaggaatgacatttccaactccaaatgccgctggtaagattacccatcctacttcctcggcgaagaaggctataagaaaagaagcgcgtcccaatggtttggcacaaatacaagaagaagggccgactgcaacgaactctccaattgaatccacgtatcttccagttgctcatatgaaaagcgtatctattgacggatcaagtggtacatctgcaacatttgaatctccagcaaagaaagcgcctaagaggggtattagggaaacttcaccactcaacggaaatgaattacagcagctgatatcaacaatccctatagctgacgaaaaggcatcgagtcttatggaaaaagtggataattgtattggaagagaatctttcgacgacagaaataaggatttcatgcacatggagaactcatcgactaagactgccgttgaaaagtctaccaaacagaaaagggtttctggtaaaaagtccgaaattccaaagagtattattactaacaacgaaatcctggaaaaaaacagcactgaaaccttatctgaaaaacaagttgcagctaaggcaaaaaagcagtcagttagaaagacaggtgcgaccggaaaaccgtctacttcgagattgaaaaagtcagaaaaaacgaaaacaacttcttctgtgacttcgacttcgaagttagagcaagtcagggaagaggagtccgatgtatcatcagaagtactggcaaaacctaaaccacaatgttcaactacggcaagcattttaaagcaaggtggtgatggggcatcaaactcggaggatgatctgcaaatagccctggctatgtcgaaggccacctacaaggaggaacaacagaagcgcaaaaaaacgaaaagggagccatctaataagcagccccaatcacctgcagagaaatcaatgacggtattcaacaatcaaagcgtagcgtgcaactccacagctctggccaacgacacggcttgctaccgcgtgcttcccaagagacgaggagtcaagagggcagccgctgttagcactacggaggagaagacagcgacgaacagctcgagctccccaacgagcagtttggaagagatgggcagccccacaggcggggatcctgactgcactgtagttacatctaccactggctgcgaaccgcctgcaagtgaacgacaagagattccagcgaccatcaagatcaccaagcgcggcattctgctgcacagcccttccgcgccggaaggcgccagcttcacactgaccgagcagggactcggaaagattattggagaacgttgggcccgcaagtacctgaagtaccacatcggcagtcggagctttgatagccgacactcggtttactatcagccgactccccaactcgccgcagctctcagtgcaccgcaggatgcgcagaacatcgggaacatctcgggctcaagtgcaagcgatgatgacatcttcgagcaaatcaatcgatatggaacggtgtacagcatactcgagaataattccggtgacaagtaa

SEQ ID NO: 10662 - protein, 979 aa, DROSOPHILA
MANAVVDEETLEAMVYERSKAWSSKMADFASLEDGMEIDVAEFDNLFHGEDEDPDLDDVAKEAVEDNVPDEAKLEMGHINATSVTELTLILCANEDNEAKAEIEEILNQTVPVVEEHKRKWREAGLDRILDTFDEKQIEHHVGRWMRRHNSVYLEASPPKYLPPHHNSISDESDESMHSIDTARYIQQSRRRNAHMTNKNMTTIKMYRKHSHKRDELRAKYAYGDEQEHRHHMQAVLLRRRERERQLAYLASTPMQCVYSSGHHMRRKNLRKRRINSWMFDSASSSEEDTSFGGCDCHSCRRHYALSRSVYQSCPYGRGQREYHHRQMASRTMHTMRRQHTFDMEMDLRPRLPENECSCCNSDRLCSNVIHIANSSTEEWVVENRSNHLTQETQEKTRKQKHQPMDARKVSHQPVCSKGHEQKPLSSKATSVSKLVLSKEKYMQMFDSESSDEDNALAKKGLLCCSDKKKGMTFPTPNAAGKITHPTSSAKKAIRKEARPNGLAQIQEEGPTATNSPIESTYLPVAHMKSVSIDGSSGTSATFESPAKKAPKRGIRETSPLNGNELQQLISTIPIADEKASSLMEKVDNCIGRESFDDRNKDFMHMENSSTKTAVEKSTKQKRVSGKKSEIPKSIITNNEILEKNSTETLSEKQVAAKAKKQSVRKTGATGKPSTSRLKKSEKTKTTSSVTSTSKLEQVREEESDVSSEVLAKPKPQCSTTASILKQGGDGASNSEDDLQIALAMSKATYKEEQQKRKKTKREPSNKQPQSPAEKSMTVFNNQSVACNSTALANDTACYRVLPKRRGVKRAAAVSTTEEKTATNSSSSPTSSLEEMGSPTGGDPDCTVVTSTTGCEPPASERQEIPATIKITKRGILLHSPSAPEGASFTLTEQGLGKIIGERWARKYLKYHIGSRSFDSRHSVYYQPTPQLAAALSAPQDAQNIGNISGSSASDDDIFEQINRYGTVYSILENNSGDK

SEQ ID NO: 10663 - DNA, 2892 bp, DROSOPHILA
gtagcacagattggggtagtcgtaggcagctccatatcggttcttgcagccggtggttgccttctctcccggagtgtagacaggctgacccacaatgttcgatgtggcgaagttgcaggtgagtacgaagtggttgtaaaagtcccgggagaagcgcacggccgcacatcccacatgggtgttcttctcggccaccgcgatggtgaacttggtcaccgccttgttgggaagctcctccgggaagctggcgaggatctcgggagatgcattcgagcgctcagcaaaccagttctcgatctgctcctttattatttccgcatcggtgtactctgtctcggctccgctgtactggaacaaggcgttgttctggccggcgtaggcgaatctctcggtgctgcgacatttatctggcagggactcacaggtctttacgttcagcaaggccagatgggagagctcctcgcaccaggacatcttggccatgcgaacagccttgggtagtccttctattttgcctccagccacgttgttgcgcagctcgttgaagagattgaggatgagtttgtgatgcggctcgatcttcacctcacgcacggtccttgggacaattttcactgaaattctgggcgagaatgggtgagcaccagcaggttttggccagctatcactacttactcccttgttgttgcaggctatgtgcttgtccaggcacgtgggcagagcacaatagtccgctgcaaggcttattcccagcagggaagtaagcaaaatcagacacttaatggccatcttcagcgttggttttggactgaggcttagctacccaaagtaccctatttataggatagctgtggcaatcgaaccgcagttgcaacatgttttccagtattttcgcagctgagtttccaagaatgtctggccaggaacaagtggctgagctcagttcgaatgccatataaaagcagacccatctgctgtccaatccagtagccaagaactagcatcatggcgttcaccaaggttctccaattgattctcctagctgtggttgccatttcctctgccgtcgactattgtgctctccccacctgtctggacaagcatgtggcctgtaacaacaagggagtaagttcttatgtaaaccaaattcacaggagttcgtattggtaatgtcctaaatccccatccagaacttcagtgaaaattgtcccaaggacgtgcgtgaggtgaagatcgagccgcatcacaaactcatcctcaatctcttcaacgagctgcgcaacaatgtggctggaggcaaaatagaaggactacccaaggctgttcgcatggccaagatgtcctggtgcgaggagctctcccatctggccttgctgaacgtaaagacctgtgagtccctgccggataagtgccgcagcaccgagagattcgcctacgccggccagaacaacgccttgttccagtacagcggagccgagacggagtacaccgatgcggaaataataaaggaggagatcgagaactggtttgctgagcgctcgaatgcatctcccgagatcctcgccagcttcccggaggagcttcccaacaaagcgggtgaccaagttcaccatcgcggtggccgagaagaacacacatgtgggatgtgccgcggtgcgcttctcccgggacttttacaaccacttcgtactcacctgcaacttcgccacatcgaacattgtgggtcagcctgtctacactccgggagagaaggcaaccaccggctgcaagaaccgatatggagctgcctacgattaccccaatctgtgctacgccaaggagatctacgacaacgagaaggtcatcgagaacacacagacgatgtaaatgctttttcgattcttagtccataattaagttggcaaataaaagctaaaagagcttatcatttgaaatctcggccgttgattttatagttttaggatgggtttaaaaatgttggcccggatagtaaaaaaaacgtatgggtggtttcttttagtctaaattgatttatttaagtatatcatatcatgcgagaggtatttatcatcttgtcgtctgcttcgacagctttcgtttggatgttcaacttgtacattaaaacacacaatatcacaatcttacgcaggtttacaaaactgtatctaatgttgtgggcttgaacgctcgggaatacttgcgagagtcctgccctccagtgattctatccaagtggatcggtatgaaccatgatgatgcaataaatagagggtctgattgcttatgtgtaagtgatctagccgatgtcatcttgtgatttttagagagggacgccgagcaatcagatggtctttagttagtcaatgactttgtgctaaaattaagagtaaatcaaataggggaaataaataaatcaaaacgtatgaaaactaaatagacagtcatgaatatgggaatatgcgtttcagtgaatgttaatagacatgtggaaaccgaaagcatttggaaatagacataaatatgaaacaattgtattggggattcaattgggattgggattcaggattctttctgtacgcggttaaaacaacttaagctacagctagtattaactaagtaggaactgtccattacttttccttgggcgccttgtcgaacaggtactccttggccatgctgtaggccagtccgagggtcagacatccgacgacggttccctgggcggcgactcgcagctgcatcaggaagacgctggtgctcatcgttccgcggttccggtacttgtacgctccaatcaatccggcggccacgaatccggtaatacctgtgagtgaaggtgcgaatcaccgattagtttctattgtccatgcggcggattgcttgttgttgcta

SEQ ID NO: 10664 - DNA, 827 bp, DROSOPHILA
gcatcatggcgttcaccaaggttctccaattgattctcctagctgtggttgccatttcctctgccgtcgactattgtgctctccccacctgtctggacaagcatgtggcctgtaacaacaagggaaacttcagtgaaaattgtcccaaggacgtgcgtgaggtgaagatcgagccgcatcacaaactcatcctcaatctcttcaacgagctgcgcaacaatgtggctggaggcaaaatagaaggactacccaaggctgttcgcatggccaagatgtcctggtgcgaggagctctcccatctggccttgctgaacgtaaagacctgtgagtccctgccggataagtgccgcagcaccgagagattcgcctacgccggccagaacaacgccttgttccagtacagcggagccgagacggagtacaccgatgcggaaataataaaggaggagatcgagaactggtttgctgagcgctcgaatgcatctcccgagatcctcgccagcttcccggaggagcttcccaacaaagcgggtgaccaagttcaccatcgcggtggccgagaagaacacacatgtgggatgtgccgcggtgcgcttctcccgggacttttacaaccacttcgtactcacctgcaacttcgccacatcgaacattgtgggtcagcctgtctacactccgggagagaaggcaaccaccggctgcaagaaccgatatggagctgcctacgattaccccaatctgtgctacgccaaggagatctacgacaacgagaaggtcatcgagaacacacagacgatgtaaatgctttttcgattcttagtccataa

SEQ ID NO: 10665 - protein, 273 aa, DROSOPHILA
MAFTKVLQLILLAVVAISSAVDYCALPTCLDKHVACNNKGNFSENCPKDVREVKIEPHHKLILNLFNELRNNVAGGKIEGLPKAVRMAKMSWCEELSHLALLNVKTCESLPDKCRSTERFAYAGQNNALFQYSGAETEYTDAEIIKEEIENWFAERSNASPEILASFPEELPNKAGDQVHHRGGREEHTCGMCRGALLPGLLQPLRTHLQLRHIEHCGSACLHSGREGNHRLQEPIWSCLRLPQSVLRQGDLRQREGHREHTDDVNAFSILSP

SEQ ID NO: 10666 - DNA, 3636 bp, DROSOPHILA
tcacccgacattattagcaaggatcggcgcggaagtctgacttgaacctggtcatctcctcggcggaagtccattaccacgtcggattgcagggacagcgaaagaatgggatccaagaaagcactatgtgtgtccacatgcgggggaattccatgaccgggttcgtattcattcactgtcagctggtcaggagaactccagtcccaggtggaagcgaagctatttagtcgtggccatagaatatcacatgctgatggtatcgactgttccagaggcttcgagggatccacattattggtgccgtaaagaaactcaaagccgaagtgcttgacgtttcgatgctttagagatcccgtgacttcggaggttctgccatcctcgccaatggccctcaacagcgttgactcctcctcttcggtgacaaagtcagcaattatgtgaaggcctctgggaagaggcttgttccactcactttttcccgcaagtgccggtagttgccttatatagctaaggtaggctacagctccctgttgtccaatggtcgatatattgtgcattccctcatagatgagctgggagtcttccaagctggcacaaataaaaaaacagtacgatttgcccggcaacatgaccacttggatgacttttccaccggtcgcggcagcctccgtgagcaaacactcctccgtgagtccattgctgagtcccacgttgagaaccgccaggtaaggggtgggttcagcgcttggagacacctcgcagtcacttttgatgattgccagacatcttcgctgctttttatccgcctttttggccttgtttaccttttgctgtgtttcctcaacgtgcatctcgcggccagtgtgtacaccccttttcaatgtttttctttttgttctaatacttaagtcgattgtgaataccctttcttgcaacttcaagtaattgtagaaactttgaataaagaataataagaagcagagaaacataatgtaggtatatttggagcaagcgctaatgcaaatgccaatatttttattgtacactaacctaataacctaacgctagttgaaggtgagaaactattagtcgggtgcgtacacctctggcagtctaccaaacccggtcaatcatactgttgtcctggggcttctggttcatggtggtcagttgctggtgatagttgcgcatctggttgctgcggcgtggctgcgccaggtactcgaacatgctctgcaggtgctgggacagcatcttgctcaagtcgctgggcatgggatccgtccagaagaagtcgtgattcagagctgtgtccgcatcgatgcgtttcttgggatcaagggtcagcaatttgtccaatagatcacagccggtttgatccttgacatacggacgcaggcgctccttgactcgacgcttctggttctttggcagctcgatggatttgtacagctccagctcctccactcccggccacacgtccggcgtaaaggagccgcatagctgcgagataaaggttagctgctgctgctccgtattgccttgcatgatgggcgagcgtgtccacatctcggccattatgcagccggctccccacatgtccacgggtggaccatagttgcggtcaccaagtagcagctcaggcggccggtaccacaaggttactacgcgattggtatagcgattcttactctcgttctttggaatgctaaaagcacgggccaagccaaagtcagccagctttaagatgccatgcttggtaatcagcacgttggcagctttcatgtctcggtgcaggatctagtaatgcaaatgaaaacagatacatacaatgtaaaaccaaaactttgcttaatgacatgactcaccttgttgctgtggatgtaatacaaaccgtttaaaagctgctgcataaccttcttaatctcgcccagactgaacttgacgttcatgttggacagaagacctgccaaatcgtgttcgcagaaatcaaagaccaaatagaaggtggatctgtaaccattcgtggcggtggccttggtgcggcagatctcgatcagattcaccacgttctcgtgctttagcagctgcaggatgcggatctctcgcagagccgtgatgggaaactaggggagcacatatataaataaggaattcgtctcttaagatgttgcttttcacgcacgccctccttttcgttgtccatcagcaccttcttcatggccacaaacttcttgttgccctttttctcgcgagccttaaaaacctctctgtaatcaaaggggtcgtatgttttagtttaaagttagttttcaccaatttggagacttacccgaaggtgccttggccaattttcgccaccttttcgtatttgttgctctcgtcgcagtagggaaagtcgtagtcctcgatgtacttttgtttctccatcagggacatcgtgcgcgatgagctggagcccacgttggagggcgtcgaccccgaaggctgctggagcatgtgggacatgtgcgccatggttaaatttgcctctatttgtacaattttcacaatcacagtttcgcgagaagccgacagtcgaaaagaaagaaatcggcaacaattggtgtttctacagctgttgactaaagaaataccggtgtgcacacactgtcaaggcctatcgataagaaatcgatgggtcaaacagctgggtagtaataacttttcgattgttggtatacactggccaagtgatataacctagccaaaatttgtccaacaaataaaagccgaattaatgaataaactgttgaatatagcccaggcagggcatcggcagtttgtccgggaatatgcattcaagtcggacctgaaaatcaaatggatgcgccccgagaagatcgcgtgctataagcccgaaaagagcggcgatttagccaagctgcctcctctgaaagccgacgaactgctgccggaatacagggactgcaaggagttggataagtatgttgcagtattctctcaatataatagtttatttacatcatctcaccattttgtagagccgacgagtcagttaaatccttgttcaaactgagcaacaacgctagttacctgaccacaaaattctatcgcgatgagatggtcaaggaggtgcaaagacatgcccaggatttcggctcaatggaggccaaatgtatgtatctttgcaaagtgcacatatagcagttccccccaaatttgcccttcttttagtggcaaaaatgactgcagttatccgccgctaccaggagcacatggacaagcatccgcgcgacaagatgatcaaggtgcgtctcaaggagctcatcgacaaacgcaagaagttcctcaagtacttgagacgttgggattatccccgcttcgagtggattctcgagaaactcgacctggtgtacaagccaccgcccacacatttccactggatcacccgcaaggaatccctccaaaagttgaccgacatatactgcgaaaacctaaaggaagagcggctagaggcttaccataagcagctgcaggcccagcaaatacccttccttgaggaggccatcaagaagatgcagttcgtgcggcaggaacagatttcctgcgatgtccccgtgaccgtgacagaag

SEQ ID NO: 10667 - DNA, 1447 bp, DROSOPHILA
gtatttctttagtcaacagctgtagaaacaccaattgttgccgatttctttcttttcgactgtcggcttctcgcgaaactgtgattgtgaaaattgtacaaatagaggcaaatttaaccatggcgcacatgtcccacatgctccagcagccttcggggtcgacgccctccaacgtgggctccagctcatcgcgcacgatgtccctgatggagaaacaaaagtacatcgaggactacgactttccctactgcgacgagagcaacaaatacgaaaaggtggcgaaaattggccaaggcaccttcggagaggtttttaaggctcgcgagaaaaagggcaacaagaagtttgtggccatgaagaaggtgctgatggacaacgaaaaggagggctttcccatcacggctctgcgagagatccgcatcctgcagctgctaaagcacgagaacgtggtgaatctgatcgagatctgccgcaccaaggccaccgccacgaatggttacagatccaccttctatttggtctttgatttctgcgaacacgatttggcaggtcttctgtccaacatgaacgtcaagttcagtctgggcgagattaagaaggttatgcagcagcttttaaacggtttgtattacatccacagcaacaagatcctgcaccgagacatgaaagctgccaacgtgctgattaccaagcatggcatcttaaagctggctgactttggcttggcccgtgcttttagcattccaaagaacgagagtaagaatcgctataccaatcgcgtagtaaccttgtggtaccggccgcctgagctgctacttggtgaccgcaactatggtccacccgtggacatgtggggagccggctgcataatggccgagatgtggacacgctcgcccatcatgcaaggcaatacggagcagcagcagctaacctttatctcgcagctatgcggctcctttacgccggacgtgtggccgggagtggaggagctggagctgtacaaatccatcgagctgccaaagaaccagaagcgtcgagtcaaggagcgcctgcgtccgtatgtcaaggatcaaaccggctgtgatctattggacaaattgctgacccttgatcccaagaaacgcatcgatgcggacacagctctgaatcacgacttcttctggacggatcccatgcccagcgacttgagcaagatgctgtcccagcacctgcagagcatgttcgagtacctggcgcagccacgccgcagcaaccagatgcgcaactatcaccagcaactgaccaccatgaaccagaagccccaggacaacagtatgattgaccgggtttggtagactgccagaggtgtacgcacccgactaatagtttctcaccttcaactagcgttaggttattaggttagtgtacaataaaaatattggcatttgcattagcgcttgctccaaat

SEQ ID NO: 10668 - protein, 404 aa, DROSOPHILA
MAHMSHMLQQPSGSTPSNVGSSSSRTMSLMEKQKYIEDYDFPYCDESNKYEKVAKIGQGTFGEVFKAREKKGNKKFVAMKKVLMDNEKEGFPITALREIRILQLLKHENVVNLIEICRTKATATNGYRSTFYLVFDFCEHDLAGLLSNMNVKFSLGEIKKVMQQLLNGLYYIHSNKILHRDMKAANVLITKHGILKLADFGLARAFSIPKNESKNRYTNRVVTLWYRPPELLLGDRNYGPPVDMWGAGCIMAEMWTRSPIMQGNTEQQQLTFISQLCGSFTPDVWPGVEELELYKSIELPKNQKRRVKERLRPYVKDQTGCDLLDKLLTLDPKKRIDADTALNHDFFWTDPMPSDLSKMLSQHLQSMFEYLAQPRRSNQMRNYHQQLTTMNQKPQDNSMIDRVW

SEQ ID NO: 10669 - DNA, 3167 bp, DROSOPHILA
cgcatcatctccatgcagcagggtggtgatctgggccagatctacaagcgtctggtgaccgccgtcaacgaaatcgagaagcgtgtgccattcagccacgacgaccgtctcggtttcctgaccttctgccccaccaacctgggcaccaccatccgtgcctccgtgcacatcaaggtgcccaagctggcatccaacaaggccaagctggaggaggttgccgccaagtacaacctgcaggtgcgcggaacccgcggtgagcacaccgaggctgagggtggtgtctacgacatctccaacaagcgtcgcatgggtctgaccgagttcgaggccgtcaaggagatgtacgatggcatcaccgagctgatcaagctcgagaagagcctgtaaattgcccgccaaccgccgagcatcgtccccccggctggaggtgcatcgcctccggagttaacatctatccacgggtgccaccagttcggggcatacgcaacaatcaagaacaacaacagcaacacttagaaatcttcggctcgtccgccttgtcgcttttgggcggttcgaactgcaaatatgtctagtttgtagctatggtgtggagctgctgtcccagtccggcaaccttcggcattttcgtatactttgagggtcgcgggcgcaggcagggatcccatcttgcaacaccatcaacacctacagcagcagcagcaacaacggataactatttgacaaaaacatttgcttaattacaaccaaacaatgtaaaacattttgacatctgtgtcaagcaaaaacaaaaaaaggaactttaaatacttttatttaagtcttaagtttataaaagaattaaaattattaaaaaaaaaataaaaaaaaaacttaaaactcaatgaatgttttgtattcaatggatatagaggacatatagggtatacaaatatttagtttattatttatttagagttcatcacggcctttaaccttttgtacacttcacgctttacaactaagctgactttgccttacactcggcttctatgagacccttgattccatcgtgcatctctttgatgatttcgtattcggttagtcccatcctgcgttggttggatatatcgtgcactccgcccttggcctctgagtgctcgcccgaggttcctctgatttgtagacgatacttgtcggccagctttttcatctcgtcgggatcacacattagattgggcagcttgatgtgcaccgaggcgcgaatagaagtgcccagattggtgggacagaaggttaaaaagccaagtcgttcatccctgttgaattgcagctgcttgccgagagcctccacgccgccaaccatgcgatcgtagaccttgcccaggtcgccacccttctccatcgagatgatgcgtatgtggtcctcctcgttgcaccagaccagaaagttcttggcgctattcagaaagatgccccttcccgttggccaatatcgagaggctccagcggaagccagaaatcgatcgccctccttgaacagatagtgatcctctatgagctgctcctgtatgcatttatccattccagtcaatggcatgtatttacccttgtactctccggtgaggctagtcactgccccacaaatcttactctccagctccatgtagtcagcctccgttaagcagggattgaaggggtatcctttgacggctcttccgcaacggacacgcgtggatacgatgaaatggccatcgggatctaggttttcaaaatccgcgcctttgccgaaagcagtcgccggctgtttgtccgtcttcttgaagcacttatggtattcctcgatgacgggatcaaagagatcggcaaacaccttatatgcctccggatcgggggcgtagagcccaacgccggagtcatgattgcacattcccgaactgatgcagtgcagcagtgtggagttgaacgagggtgtagtcttcgtctttagcttctcgaagatctccttggtgagatgcttcttcagcagggacttggatttcgactcggccaacttcttgtagcccttctccatttgctccatcacctccttgtccacatttcctttgctggcatggcgattgattactagctgcgcacagcggcctagtaattgaagttcaagccggagttttaaatgtaacagcatttttaggtgttgaatttggaatgacaccggccaggctgaccctaagttagaaagtgacattaaaccaaatggctagaataaatctagtaaaacgccatttagtacgaacaaaaaacagacggttgaaaactccactttaatagatatcggaaaggagattgctaagcaaagactcaatctatgtacaagtaaatttgaaataaataaagtataaagtaaattttgatatacttgagttcctcatggatttaaaaattgttttcacaactatggttttgcgctaaagtaaagaaatcattttcattgatacttttttaaagaaccgttatatgatattcacttaatggtttttaaaaatacaataatgcatttaagaaacaattttgtttgatagtgtactcatatagcacggctccaaaccattgtaaaatacatggcaaatgtaaaatattatgtgtaaaataatgcgtaaaatatgtaaaatacagggaaatgcttaagaaatgtatacaaaacccatcgaaaattggtagctcaaatactggttttaaaacactcagttcttctgtttaaatgtagactttctaagatatatattactaatgtaattatataatatgtttaatacgggtgtagaagccatcaaaaccaaaaactatgttttatttccttttgactttttttatttcaataaaatacttagaacattatagaaaaaggtgtgttaattatgattagttttcacaatccacctcgacctgttctcgttcgcacaatttaattgaatatttgcaagctgttggctcgtaaaacagagaatgcgaacatttttatagcttaaagcttaaataccaaatcaaatatattataattagcaataaagaacaacaaaagcggcagcggcaacaacaatatgctaacatgtggcgcaaataaaattcagatccgaacggcaacacctcctcaataaagcatcgttatcctcattatcattatcaac

SEQ ID NO: 10670 - DNA, 1167 bp, DROSOPHILA
atgctgttacatttaaaactccggcttgaacttcaattactaggccgctgtgcgcagctagtaatcaatcgccatgccagcaaaggaaatgtggacaaggaggtgatggagcaaatggagaagggctacaagaagttggccgagtcgaaatccaagtccctgctgaagaagcatctcaccaaggagatcttcgagaagctaaagacgaagactacaccctcgttcaactccacactgctgcactgcatcagttcgggaatgtgcaatcatgactccggcgttgggctctacgcccccgatccggaggcatataaggtgtttgccgatctctttgatcccgtcatcgaggaataccataagtgcttcaagaagacggacaaacagccggcgactgctttcggcaaaggcgcggattttgaaaacctagatcccgatggccatttcatcgtatccacgcgtgtccgttgcggaagagccgtcaaaggataccccttcaatccctgcttaacggaggctgactacatggagctggagagtaagatttgtggggcagtgactagcctcaccggagagtacaagggtaaatacatgccattgactggaatggataaatgcatacaggagcagctcatagaggatcactatctgttcaaggagggcgatcgatttctggcttccgctggagcctctcgatattggccaacgggaaggggcatctttctgaatagcgccaagaactttctggtctggtgcaacgaggaggaccacatacgcatcatctcgatggagaagggtggcgacctgggcaaggtctacgatcgcatggttggcggcgtggaggctctcggcaagcagctgcaattcaacagggatgaacgacttggctttttaaccttctgtcccaccaatctgggcacttctattcgcgcctcggtgcacatcaagctgcccaatctaatgtgtgatcccgacgagatgaaaaagctggccgacaagtatcgtctacaaatcagaggaacctcgggcgagcactcagaggccaagggcggagtgcacgatatatccaaccaacgcaggatgggactaaccgaatacgaaatcatcaaagagatgcacgatggaatcaagggtctcatagaagccgagtgtaaggcaaagtcagcttag

SEQ ID NO: 10671 - protein, 388 aa, DROSOPHILA
MLLHLKLRLELQLLGRCAQLVINRHASKGNVDKEVMEQMEKGYKKLAESKSKSLLKKHLTKEIFEKLKTKTTPSFNSTLLHCISSGMCNHDSGVGLYAPDPEAYKVFADLFDPVIEEYHKCFKKTDKQPATAFGKGADFENLDPDGHFIVSTRVRCGRAVKGYPFNPCLTEADYMELESKICGAVTSLTGEYKGKYMPLTGMDKCIQEQLIEDHYLFKEGDRFLASAGASRYWPTGRGIFLNSAKNFLVWCNEEDHIRIISMEKGGDLGKVYDRMVGGVEALGKQLQFNRDERLGFLTFCPTNLGTSIRASVHIKLPNLMCDPDEMKKLADKYRLQIRGTSGEHSEAKGGVHDISNQRRMGLTEYEIIKEMHDGIKGLIEAECKAKSA

SEQ ID NO: 10672 - DNA, 9803 bp, DROSOPHILA
acaatggttgtaattgtgattgccactatcggcacaaaggattatttatttacggtctgcgaatttctggaaagaatcacattgggcagttcgattacttgaaatcaaacgtactcgtgctactcgattatgaaacacttcatggcttcgatggtgtaccatgaacccacttacagggtacagggtacctacctaacgtgtcaatcaatccctacgatgggtttctttttttttatcgaactgctgtccgcctacatttgccggctcgctcgcacccactgcgccccgattgcgcatgtgtgcttgtatcacttaagtcgtctgctatctagtctagacgcatatgtacacacatatagccgtagccatagccgtagccatacgacgtacggcgtgtccgctggccatccgtccgtagacgtagacattgcacggggtctttctacagggcgaaatcatcgcgagagagagccgagaacggtgcgcaccttgtagatacggattgaaatacgtgcgggtcggtatcggtatctacggaatacaaaatacgacagttgcacgtcgtttgctcttttttgtttcattgttatttggtcggtgctgtgggccgcgttcgttttgtttcgtttatttatagtaattaaaggcgttcgtgagtgggaataagttatttaaattgtacaacaaacaagccgaaaattaaaaacaaattgtgtagttacaagtgagtggatgggcgatcgagtgttgcgttcttgcatgaatataaagaaattttgattgtctgcaaatatatacgacgtatgaagtacattacaaattgaagaattaaaagatggaattttagcataaacaaaataaagcataagaagagaattttaatattacttacttactttagtttataacttatttctagagagagtaaatggcagtcttagcgaaagaaaatgagattactacttacttatgtatgcatatgtatgcgttcagccgataaatgcacatgaatggcgcccaactaatatttattttccgcttggcaatcgttttaggtcgtttgttgctaatcgccattagtttatccgtgtgcctggcctgtggcagtgtgttggtggccgcgattgccctgcgccgttcggccaacgcaacagcagcattagcagcaacactagcggcagcatcagcagcagcgacatcagcatcagctggagctggagcagcagcagcagcaacatctgcagcaacattagaagcggcaacaacgcgcaggatacgccacaagcgtcgctcgtcgcaacgacggcgcagcaccaacaacaacgcggtgctgtcatctgggatcgggaccggcatcgggatcgggatcgggcctggactggaaaccaactcggctctggccctgccactggcaaccgcaccaccaacatcggtctccacagcagcggatcagacagctatagccgccgctaccgccaccgccgcctccgctgcagcagaagcagcagtagcgacaacaacagcagcagcagccgcaacagcatcgacagccgcagcaacagttacaacaacacttttgccaaccgagccggaacattctgtacccgtaagtacttaccctacgctaaacaaacgtgaaaagagaagaaaagaaaagccagaaaatacgggtgagagagaggaaaggcaagaaaaggcaagacaaggaaaggaaaagaaaaagttttgcaacagccgatgggcgggaaagtgggtgggcatgtctgtctcaaaactgcactgggcaaaatagcagatgaagttctaaagtttgaaaaagcttaccgtgagacaaaatatattacaaattttgttgcatacttttaggtcacatggcgtcattgagttgttgagttaatacaattttttcttgagaatgcgtcatcttcttaccaaaataaatcttaagcaattatttgtcgccatttttatatgtattccgcttacttttcaacatttaaattgaagtacggttgacaaagattacaaaaaaaagattagggcgaaaatatttttattggctttacgtgctggcgctgttcattattaccaattacctttttgacccaatttaaatgtgtacacacttttctctcagtacagccgtaaaagcaagggagacacgtgtcgcaagtttcctttttcattatatctgcactccctttttgcctttttccttcgctcttgcccatatcctatgcatcattcccttttggggcgaaacagaaacagacagcggcagacgggaaaaatggtggggaaaagcgagagagacccgtctctctgtcagtgcagtaaaagtccttgaaaaggggctgtttgctgggcggggaaagtgggaggcagacaggcctaaattgctctcgtcggcgccaacgcaaaagttcttatgtaactgcgcctacaccgatttatacatacgccacaattgcccagtccaattttttcgtgtgtattccgagtgttatgcaacgtttgtggaatgcacagcacgtccttctctttcttcttctttttctttttgttgtttttttctttctttttttttggaagtgaatggtggcatggaatctccattttgtgtctggcacttgtgcgcgtctttattttaatggacaagacaaattcaatttctccatcggcactttactttgtccatttgcccgactttaaatgcctgccatttgtctatatattttattcatctgcgcatttgcttattgaatttgcactagacaccggcattaaccttgaggccatgcgatttactccagcgacgaaaggcgacaatcttcttcccaacgaattagacgcccacacacgtgtgtattctcatctcgtgggctctatggaaccaaaagttgttaatgcggcttttcagattgtggctttaagatttcccattaatggttagcgaggggaatggtggaattaggggtgtaggggagtgccgcccattacaagagattaaagtcggcaactttgacaaattgttactcgctgtgctgacatcttccagtgcgcatttgctcatttgttcattttcattcttcacatcgagattcttgtttcatattttttcccctgcttaatttgcccacgcaaaattcagcattatgaatgaaacacatcggatacggtgggcactcaataaatgggcacaggttggggttaaactaataggcattttatttatcaaaatttatatatactgtacttgttattggattaggttattttacgattattggacattcaaagccatgagttatagtgataaaaatctaaatatataatgagattatacaaggattaaggttttatctgcaaagattcaaatagaaagcgatgtgtgtttccactgtagtgagaacataataaatgaatgcttctcaacatgcccctccaagacgtgggcaaaaacccatttggagcccaagattcggatggcaatgtggaaatggttacgtttatagatgtggatgttgatgtagacggtggggacatacatacgtatgtatgtaagtgcgtgggcgggatggttggcgcgcgaaatgtgaaacacaattgccgctaataacccaaggcgtttagcagaatcagaagcagcgacgtcggcagcggcgttctgttttaatcgaattttatttgccgccgttagccaatgaataattcaaattgattattaaaatgttcgctcgcatgtgcgccagtgttggagtgtgtgaacttcggtgggcgttaacattaacagcattaggatgtggatgttaatgtgcatgtggatgtgtgagagcgggctttcattaaaaccgttatctatgccagacgcacgcaccagacgcagacgtgcataaattaattacaattacagcggagagagaaacagagaggcacgcacacacagacagctgttcatgttttggaattttttggcggcccggaaaaatgatttgtacacatctagtggaaaaaccacctttaaaacaaataccgtttgtaaatgttctatcccaaatgattacaatatattaaaacgtaaatatttagttaaaataacttttgaatacattcgattaaaggcctgttacaatttaaaattacagtagtattgaaaaagggtgaaagtcttaaagtcctattacaatttcaaattacagtaggattgaaatacgacaacagtataatgaaaatttgtttctgtgcgccagtttgaacattcaaacattaaatgttttgggaacttttttgggtaccctaagcaaacgcagagaaagtcggaaacttccaaggattgaaacaaggccaaaagcaaacaagcggggacaagaacaaaaaacaagggtttaccccaaatattatgtcacattattggccataaaaaaaaacgccagcaaaaagataaacaacaacatgcgacagatgcagagcagtcggggaaagtatgttaacttatggctgggcttaggccaacaaaaacaacaacgacgaacaaaaacaaaggcagacatttctcttacgtcagagagtctggcccacacgcacacatgcacacatgcagacaggcacacgcacactagtgcacaaacggaaaatgaggttattgccaatcccgtctgcaatgctcgagtaaacattttaacctaattttttgccacgggagcgggacgatttgggggctatacattcacatatgtatgtatgtagtatatatgtatgtttgcgaacggagacgccccagacaatgtgatgcgatattttctggtgcctcagattacccaaaacgaagggaaatattgcaaaaacaccgaaacagtgaggcgtcaataatgcaaactttgcatctgaaaaactaaattgaaccctttagttcaaatatcattgggaacttaagcttttgaaagaaacagaagtaaatgtatctgaagattatacaaagtaattaaaaaatcccgggcacatttatttcggattattagtcccataagcttattcacagcaagtttatagattaacttaaaatggcaccacaaaaaacatccattaaaaatactaactgctgttaaagttcacatgtaccaactttatgggccgccttaaaatggtaataagagaaaatagtttctattaaaactgggaaatttcgcgccagcataaaaacattattagtatagttatgtggtaactctgagtgtaagtacaccttacgaaaaaaaaagaaaatttgtacattaacttttgaatataacactatgaatatgtatgtgtgtgtcttggcaaaagcaacgattagaaaaagtgtgaaacctgaaaataaattcaagttaaatactttggcttgtacaatcaaattataaggaacatgcttgcccacagagctcttaccacatagtttcacaagtttttaatttacaaaattgcatttgcatatttgtataatttacaaagtacgcggcccccgacgtcgacgaaaatattcgtgctcttttatttgttgttgccagcgcagagatttgtcatttctttcattctcgcttgcacacatcaatcgccaggtggtgtggtggggcattagggggttaagacacacgaaaaaataaaaataaaaagtaatgcaaaaaaaactttgaagaaggtggccaacggaatgtggagcatgctgagttatgcgaattgtctgtgcagaaaacatacggtgcataaatcgtgcagataggatataccaaattgttactgaacataacatggatgcaaataaaaaaatacgtttttttaaatttacataaaaaaaataagaatctaacgcgccagttatatcaatttttttaaaacttacccactattttgcactaaatagattgaaatggagctgggcacactaatatattccatatatcgcttttacaaatgatgcaggcaaaatattacagttgcttataagacatttctactaaggaatcctaacatcttacgtaaaatatctttagtgaatcctataggatattatttgaccagttctacaaaggtcgcatcacgacattatgtttattaatcaacgtcctaaaagtgacgtcacaaactttttctctgcgccaccttcccaatcggcttcatctttcccacttggaaagttacttcatttcgctggggaacttagttaccttatttattctctcttaatatactgcaatgcctagtaagaagagtaaaaatgtactcaatcgaaagaaacctgtaaaactaagtctggccgagtttcacaatcagctggatgaaatgcaaactgcaaagacttgtgaaaagacgagcgcggagaactggaaacattttttctcgaatggcagtggaatagccaatggaactcgtggtcgtggcgtttgttgtgaaaagctttcaatagttgaccaaatcgagggacgtgctatagttcagaatggagcgactaccaaagcgagagggatatttgaaagtacattgaatagtgtggcagagcgaaagaaacattcagaaaagttggataattccaagagtgcaaatcaaaccgtaaaacccgaaaatagcgatatcaaaatatcattactgcagagacctaatccccaggatgctacccaagcacggagcaaaacgcgagttcgatccgctggccgaattcccgcgccgccaagaaaggtgcccaaagaactggaggatctggatcgcatgacttcagcggatttccgacacgataccgccgctcgtctggatgtaatgcgaaaccggcagaaggatcaggcacacatgtacttctttcaatctgtcatccatcaccaacggcatctcatcaaggatcgcacaatcctggtactctgctgtggcactggaacactggcccttatggcagcccaaatgggagcaaaaagggtgtacgccgtggactactccaaggtgactggctatacaaccttggtggtgcggcaaaatggctatgaaggtgtgatcacggtcatgaatggtcgcatgaaggatcttaaactcccgacgaaagtagatggcatcatatgcaactggatgggttactgtttgctctacgaatcggagatattggaggtgctcgaggcgcgtgatcgctggctaaagaaaggcggctttattctacccgatctggcagctctttatctggttgcatccgaggaacacaaactgaagagcgaaagatgcaatcattggcgcaatgtctacggatttaatatgaatgccatacgtcgatatgcgctggctgaaccttgtgtggccctaacgaccggcaaaaaacttctgacgatggctcattgcgttctcagactagatttgaaaagagccagaagagaggatctgtttatagatcgaaacattagactaagtgtcaatagagagggatatctcgagtgctttcttctctttttcgaagtgcagtttagtaatagcttaaactttaagctgagctgtaatccctgcttaaagtcgcctttcaaatcgctttggatgcaatcggtactctttgtggagcagccctttgtaatgcgaaaaaatattcactacacgggtaacctgaagttcaagacactaaaaccgaataaattcaacgaaatggagatatgtattgagttttacgagggtagagagtacgattacgatttggtcatgtgcacccttcgggtggccaaaagatggctcatgctggagggctttcagactttgagtgatgtggagagctgtcaggacgagcagggggagactggtggcctgtacctttaggtctctctcaatatatattattgttaagcccttcagttgactttatgctaattgtggtttcactttattacagatgctatcggtacagacggccggctgcgcgggaatggagcggctcggcgttccgacccgcacatctttgagcacaccacccgatgataggtatgtcgaagtcgaagtactccctattgcaaagcagaaaattcttataatagcttaaatgaaatcctttctaatacctatatacatacaaatccatgctaatttaatttcactttaattgtagggatcaatttagatgtagaatgcgcgtggatgcgctccaggcacgtgagcttctggctgtacgtggcgagactgtgattcgcggcgccggcaacaatcagcatcagcagcaacaccatctccatcacagcagcagtagcagcaacaagcaacaacattcccaccaccagcaacaacgcatgacaactccaagcacgcacaactccagtggcggcagcggcggaggaggaggagcagcagcaggcggtgaccaccaacaccaccatcagcaacaccagctgggcaacagcagcagcagcaacaacaacaatagtattagcagtaatgtggcgcgcggcggcatagaagccaccacgctgaagtacggaaacacgggcagcgggagcggtagtggttgctacaagggcgactgcggcaactcctcaaccggatcctcgtgcagttcgctgcagagccatagcaacgaccaccaccaacattaccagtaccagctgcagcagcagcaaactccccgctgtccccatcacgtaccactgccggacagcgagtacggacaagatcgacacctgcagatcaggagcagctatcaggtaggttaccttaaatacaccttacagccatatactaactaatcggctttgatcccaaacagcaatcggagatcaccagatcatacacgaagccgccgcccaacaagacagtgcgggatgtgcccgagcagatctcggcgggcggctgtggcgtctccagctccagctaccgtctcaccacgctccaggccgcctcctcaacgtacacgccagcgggcgtgtcagtgtccgcctcctcatcgtccagcaaatcgaagccgaatgccataaccaagttcttctcgcggatcagttcgcccaagtcgccgccgagctgtacaatgacctcggtcgccacagcttccccagcatcctccgtctccatgtcgtcgtccgcctcctcgcttgcttcctccgcctgtgtgtccacctcgtcgtcagcctcctcactggctgctgcgcctacgctgccggtgtccaatgcatccctgttgaaaagcacggcctgtggctatggcacaaatcccagcgggatctatgcaggcctgggaccgagcacgcaactgcttacgagcctgggaaccggaacaagcggcaactgcagtcccgaacggatacccacaccaccgttgtccgtctccgtgccaatcggagctggcctacagccgctgagaagtagcagcagcgggagtagcagcagtaccgccagcctagccgccgtcgagacaaccacaactacagccaccactcagtcttcctttgccgccggagcgacgggggatctcccgctgaccacgatgagccgcaataattccaactctagcatgatgagctaccactgcagctgcaatggccgaaattgcagccactgtgcggccaactcataactgagctcgtgttaagtttaactacattaaacaaatctggtggtgcggaaaccactggagattttagaacattagttaagtttcaacagttcactagccgatttgaacttctcaaaccgtaagactttgcatggtatttgatcataatttgtaaacttaccgcaggtcttgtgtctaaaaagctttacttgaggtaaaatattgccaaatttagtgaaatacttatcttttgttgcgaatctccagagat

SEQ ID NO: 10673 - DNA, 2088 bp, DROSOPHILA
atgcacatgaatggcgcccaactaatatttattttccgcttggcaatcgttttaggtcgtttgttgctaatcgccattagtttatccgtgtgcctggcctgtggcagtgtgttggtggccgcgattgccctgcgccgttcggccaacgcaacagcagcattagcagcaacactagcggcagcatcagcagcagcgacatcagcatcagctggagctggagcagcagcagcagcaacatctgcagcaacattagaagcggcaacaacgcgcaggatacgccacaagcgtcgctcgtcgcaacgacggcgcagcaccaacaacaacgcggtgctgtcatctgggatcgggaccggcatcgggatcgggatcgggcctggactggaaaccaactcggctctggccctgccactggcaaccgcaccaccaacatcggtctccacagcagcggatcagacagctatagccgccgctaccgccaccgccgcctccgctgcagcagaagcagcagtagcgacaacaacagcagcagcagccgcaacagcatcgacagccgcagcaacagttacaacaacacttttgccaaccgagccggaacattctgtacccatgctatcggtacagacggccggctgcgcgggaatggagcggctcggcgttccgacccgcacatctttgagcacaccacccgatgatagggatcaatttagatgtagaatgcgcgtggatgcgctccaggcacgtgagcttctggctgtacgtggcgagactgtgattcgcggcgccggcaacaatcagcatcagcagcaacaccatctccatcacagcagcagtagcagcaacaagcaacaacattcccaccaccagcaacaacgcatgacaactccaagcacgcacaactccagtggcggcagcggcggaggaggaggagcagcagcaggcggtgaccaccaacaccaccatcagcaacaccagctgggcaacagcagcagcagcaacaacaacaatagtattagcagtaatgtggcgcgcggcggcatagaagccaccacgctgaagtacggaaacacgggcagcgggagcggtagtggttgctacaagggcgactgcggcaactcctcaaccggatcctcgtgcagttcgctgcagagccatagcaacgaccaccaccaacattaccagtaccagctgcagcagcagcaaactccccgctgtccccatcacgtaccactgccggacagcgagtacggacaagatcgacacctgcagatcaggagcagctatcagcaatcggagatcaccagatcatacacgaagccgccgcccaacaagacagtgcgggatgtgcccgagcagatctcggcgggcggctgtggcgtctccagctccagctaccgtctcaccacgctccaggccgcctcctcaacgtacacgccagcgggcgtgtcagtgtccgcctcctcatcgtccagcaaatcgaagccgaatgccataaccaagttcttctcgcggatcagttcgcccaagtcgccgccgagctgtacaatgacctcggtcgccacagcttccccagcatcctccgtctccatgtcgtcgtccgcctcctcgcttgcttcctccgcctgtgtgtccacctcgtcgtcagcctcctcactggctgctgcgcctacgctgccggtgtccaatgcatccctgttgaaaagcacggcctgtggctatggcacaaatcccagcgggatctatgcaggcctgggaccgagcacgcaactgcttacgagcctgggaaccggaacaagcggcaactgcagtcccgaacggatacccacaccaccgttgtccgtctccgtgccaatcggagctggcctacagccgctgagaagtagcagcagcgggagtagcagcagtaccgccagcctagccgccgtcgagacaaccacaactacagccaccactcagtcttcctttgccgccggagcgacgggggatctcccgctgaccacgatgagccgcaataattccaactctagcatgatgagctaccactgcagctgcaatggccgaaattgcagccactgtgcggccaactcataa

SEQ ID NO: 10674 - protein, 693 aa, DROSOPHILA
MNGAQLIFIFRLAIVLGRLLLIAISLSVCLACGSVLVAAIALRRSANATAALAATLAAASAAATSASAGAGAAAAATSAATLEAATTRRIRHKRRSSQRRRSTNNNAVLSSGIGTGIGIGIGPGLETNSALALPLATAPPTSVSTAADQTAIAAATATAASAAAEAAVATTTAAAAATASTAAATVTTTLLPTEPEHSVPMLSVQTAGCAGMERLGVPTRTSLSTPPDDRDQFRCRMRVDALQARELLAVRGETVIRGAGNNQHQQQHHLHHSSSSSNKQQHSHHQQQRMTTPSTHNSSGGSGGGGGAAAGGDHQHHHQQHQLGNSSSSNNNNSISSNVARGGIEATTLKYGNTGSGSGSGCYKGDCGNSSTGSSCSSLQSHSNDHHQHYQYQLQQQQTPRCPHHVPLPDSEYGQDRHLQIRSSYQQSEITRSYTKPPPNKTVRDVPEQISAGGCGVSSSSYRLTTLQAASSTYTPAGVSVSASSSSSKSKPNAITKFFSRISSPKSPPSCTMTSVATASPASSVSMSSSASSLASSACVSTSSSASSLAAAPTLPVSNASLLKSTACGYGTNPSGIYAGLGPSTQLLTSLGTGTSGNCSPERIPTPPLSVSVPIGAGLQPLRSSSSGSSSSTASLAAVETTTTTATTQSSFAAGATGDLPLTTMSRNNSNSSMMSYHCSCNGRNCSHCAANS

SEQ ID NO: 10675 - DNA, 3697 bp, DROSOPHILA
agacttgatctcattgcgttccttactgtcgcccaaattcttttccagctgcgcgttttcccgcttaagggcttcaatcctatccatgagaaactttagctgatgctcctgctggcgggattgcgtggcattgatggtcgtcgtggtcgtggttttctgctgaacacttatgctgctggtagttatcctacttgtgctggtcttcggctccggcatcttttgtggctcactgtccatgagggtaacggccagaaaatcgaaatcatcatcatccgcgaaaatcgcatccatatccagggaagtaggcttcttttgtggcggcggtggcggcggaaacatttgctgtgtgctggttgagccctgaaaagtgggtgcaaattcgctgaaggtgacctcgctgttgccgatgtccacctctgttccgcccttctttttccgctcctccgcctcgatttccgcctccgccagctgggtggccatcaggatgacatcgtcatcgtcgtcccagagaatcccatcgaaattgttcctcggtggactgggtcgcgctgatccgcgggtaacgctaacatccaggcgcggtttcttgcaccgcgcgaagtctttcatggcagaaaagcgcttggccatggttcctccagtttccgctatatttcgttactttttggccatggaaagtcgtagattattttgccggtttgctttgtttataaaatgtagagctcaactagcgttgccagatggatttgatcgcaacgatggatttgcccaaccaaaatagagattatgtttcgaatccatgttgcatagaaaaatactacattaggatttactgcaacaaaaagccagttttgtaatatcgctctttgttattatgctggttttttttaagcgccgatagaaacccgctacaatcacagtttcaaaatccgattaatattgagcaaaaccaaagtcatctggctacactcaagtctatcgactgcggtgtatcggcatgtggtgtatcgactcagctttcccattaacctcaaaggaaaatcaaagaattctgcggaaattctagcccaaaactaaaggacttacggggaaaccagaacccagcgacttcggtcgaattttcgaggtgacgggcggcgcgaatggaacgccatgccagcgaagaggatgacggtcaccacagcagcagcttcgaccatcagtggagccagtgggtccaccacgaataatggtcagtctggtggcggtgcacgcccactggagacgctaaacggaatgaccaggctgacccccgcccgcgacttgacccttggtgggcgcggcgctgggacagccagcaaaaaggtctttgctcccaatttgaatgctgtgcgcaataaaaatgcgtgagttgtggaatggcccagggggagtcattcttttcatcatctcatttgattcacagcaatgtcaagacatccaaggacaccacgcagccaaggagcggccgcagaggtggacgtggcaacggcactggagcaacacgtggtcgaggtggaaattccgctggcgggggcaactccacgctcatccaaacccagggactcttctccgaaggagcaggcgatgttcatgtgcgaaggtccacaggaaatggaacggcatatgcacggggcggtgaggaggtgtccgtgaccaggaaacgggtggatcgcaaggacgacaagagccaggccgagcggatcaaggagctcttgggcgagtcggacgccagtggcggcgagctcagcgaagaggaggctaacaagactgagatggcactcaggcccatcctgctaaaagagggtacgttttacaagcactttttgatgcacacgggcagaagaaattcatgctttatttgtttataaacgttaggactctgggtcacccagaagacaccgattgcgaagcaagaaatcgccagttcaacctcaacacttaagggtaaggcgctaagctttaaaaatggcataatctaatttgatttcgctcctagacactttggcagtggcccagcatttgcaacagctgcatgtggctgcccaggcagccagtttagaggaacctccgctgcagtacggtcgctacccacgcaccattggtaactttctggactccagcgaagcgcagatctttctcatgcaactgccagatgtgttgccatgtgtgggcgacgattccgaagatccggaaccgtctaaaggagatcatcaggccaccagtgaatcggaaccagcaagtcctgcagacaaatgctcaaacggacccaagggcagtgtactacggcagctggaagaagggcagatcggcaagattctgaggtacaaatccggtcgcgttaaactccaattgggggacacacgctttgacttggatatgggtctcgatccgggttttctgcaggaactcatgtctgtaaccgccaatcgcgagcaacgtagtggaaacatgatcaacttgggacccattcaagccaaactaaaggccactccagattgggtgcaccttttccagcagcaggatgcggcatccaagcgaacgaatccagtaccgggcacgtagcacccacttccccatggtagatatgtaatatagtaaataggctgcgcctaagcttaagttattcctattctaaatgccgtatataaaagttaaatatagaaatttttataatacaaatgcttttcaaaaggttattaacaattgtactcgaatatggaacataaaagagactccaagaaagatgggcttggaacttggggatatgtaacgtaaattaagccatcaatacttaatgcaatgacccaagattaatttttaggttaatggattgttgatatattatatgttcaaattaagtgattattataatttcaaatacggtcttaaaatttgaaaagtattctagttctagcaaatcgctttacaatagctaggttatccaattcctattcttttgcgcaaatcaaatatacttaagtgtgttgtttattgtgcagaaaaataaaaaaaaacacggactttcaactttggttagaaacctataaaaagcattttaatgtaacaacaaactaagacactgcattaattaattactcaaaacttgctggttgggttcgggagtggcgtccgggagctgagaggtgcttcgtccgtggtaaagattaccggccatatcgatggcgaaattgtggtccacgggattggccaacgctgtctcaatggctgcatccaagttttccctagtgatatagttcttggaacgctcaatctcgagcagcacccgctggttggcctgctccttgcgctcctcctcgcgcagctgttgtgcctccaatcgctcctgaatataggccaccttttcctcacgcttcttggccaatcgctgatcacgctccttggctatggcagcgttccaggcagcattggcatccaggcatttctggaactcggcctcctcctgctcgggagtgagcacgatgtgatctgctgtggatgtttcctcgtggcggacgacttcctcccttagaaactgacgcactgagcgaagctgcgttctgaaatcaaggcgtagattgttttgtataacgtcttttgaaaccgattacaaattatctttgaccagagacagaatctggcgctggtgcacgcacttgtactggttgtgtagcctcat

SEQ ID NO: 10676 - DNA, 1514 bp, DROSOPHILA
tggtgtatcgactcagctttcccattaacctcaaaggaaaatcaaagaattctgcggaaattctagcccaaaactaaaggacttacggggaaaccagaacccagcgacttcggtcgaattttcgaggtgacgggcggcgcgaatggaacgccatgccagcgaagaggatgacggtcaccacagcagcagcttcgaccatcagtggagccagtgggtccaccacgaataatggtcagtctggtggcggtgcacgcccactggagacgctaaacggaatgaccaggctgacccccgcccgcgacttgacccttggtgggcgcggcgctgggacagccagcaaaaaggtctttgctcccaatttgaatgctgtgcgcaataaaaatgccaatgtcaagacatccaaggacaccacgcagccaaggagcggccgcagaggtggacgtggcaacggcactggagcaacacgtggtcgaggtggaaattccgctggcgggggcaactccacgctcatccaaacccagggactcttctccgaaggagcaggcgatgttcatgtgcgaaggtccacaggaaatggaacggcatatgcacggggcggtgaggaggtgtccgtgaccaggaaacgggtggatcgcaaggacgacaagagccaggccgagcggatcaaggagctcttgggcgagtcggacgccagtggcggcgagctcagcgaagaggaggctaacaagactgagatggcactcaggcccatcctgctaaaagagggactctgggtcacccagaagacaccgattgcgaagcaagaaatcgccagttcaacctcaacacttaaggacactttggcagtggcccagcatttgcaacagctgcatgtggctgcccaggcagccagtttagaggaacctccgctgcagtacggtcgctacccacgcaccattggtaactttctggactccagcgaagcgcagatctttctcatgcaactgccagatgtgttgccatgtgtgggcgacgattccgaagatccggaaccgtctaaaggagatcatcaggccaccagtgaatcggaaccagcaagtcctgcagacaaatgctcaaacggacccaagggcagtgtactacggcagctggaagaagggcagatcggcaagattctgaggtacaaatccggtcgcgttaaactccaattgggggacacacgctttgacttggatatgggtctcgatccgggttttctgcaggaactcatgtctgtaaccgccaatcgcgagcaacgtagtggaaacatgatcaacttgggacccattcaagccaaactaaaggccactccagattgggtgcaccttttccagcagcaggatgcggcatccaagcgaacgaatccagtaccgggcacgtagcacccacttccccatggtagatatgtaatatagtaaataggctgcgcctaagcttaagttattcctattctaaatgccgtatataaaagttaaatatagaaatttttataatac

SEQ ID NO: 10677 - protein, 410 aa, DROSOPHILA
MTVTTAAASTISGASGSTTNNGQSGGGARPLETLNGMTRLTPARDLTLGGRGAGTASKKVFAPNLNAVRNKNANVKTSKDTTQPRSGRRGGRGNGTGATRGRGGNSAGGGNSTLIQTQGLFSEGAGDVHVRRSTGNGTAYARGGEEVSVTRKRVDRKDDKSQAERIKELLGESDASGGELSEEEANKTEMALRPILLKEGLWVTQKTPIAKQEIASSTSTLKDTLAVAQHLQQLHVAAQAASLEEPPLQYGRYPRTIGNFLDSSEAQIFLMQLPDVLPCVGDDSEDPEPSKGDHQATSESEPASPADKCSNGPKGSVLRQLEEGQIGKILRYKSGRVKLQLGDTRFDLDMGLDPGFLQELMSVTANREQRSGNMINLGPIQAKLKATPDWVHLFQQQDAASKRTNPVPGT

SEQ ID NO: 10678 - DNA, 5331 bp, DROSOPHILA
tgactttaacaatcgccgcggatcggacagtggtgaccaacacacgttccagccgcccaagctacgctcgacaggtcgccggtaccaagacgatgagggctataattcatcatcgggaaactatggtgtgtctaggaagtttggccagcagcagagggctccgaccttgagacaatctccagccagcgtgggtcgcagcttcgaagatagcaatgctagatccttcgaggaggcaggatcctatgtagaagaggagattgcacctggaatcactctttcaggctatgccgtcgatatctaaaactagtgattaagagtaaaaatattaaaattaattgttatgcaaaccataagacaatttagctaaaacccacctaaaattccaaaataatgattgaagttttcttcatcactttctcaaaaacgtttcacacaatggaataaataaaatgtcttgggataaatcgttatttaaattttcacttttttcttaccgcatttcatttttctatctctataaaccacttaattatttaggttatttgtaggtaaatgctaccttggcatactcaaacatttaactttaaagacattgatataaattcagcaattaatttgcattttattgacgtaggataaaaatgggaaaaattcgacgaattaacattgcttattatgcttgcttctttgttacatcatttaaatgatttacttttctcactttaagatctaaaacgcaacaacaatactctcagtatttcataaactatatccattatacattgtatatataaacattaatacctaaacaaaaacgtttataggaatggattgaacaaatactcttttgttcgcaggactttttttgtgtgttcgatagggattgcaaaaaagctaaggaaactgaattgaatcattaactgcacacccatatcgggcatggtctcacaaattctcgatgataaaacaaaactttttccttaaatagtttcacataatatcaatcatccatgttgggctcacgcaatccatccgagtgcattttcttgcccgcaatttccaacatggcccgatcttccaaattgccatccagcacagaacgtttctatgggttaaagatatgattatttatttaatataatattgagtttaatttgacatacgtgaccgtcgccttcttcgtcttcttctttaactggtaagtctcctacggcccaaacttccatgtttcgtattttgaactgtttccgtttacttgggtacgataaataattggtagattaaccacaattgtttaaaataatgttgaattaaaatatagaatctagtggtctgtaaggtgaaacataatcaagattttaatttacactcacctcaactgcacgtagtctcgatatgtagtgcaactttcaacgctttgtccatcgccgaaactgcagtcaatccaaaggccccaaaaatcaaactgaccgcccatgccctgtatacgaaaaatataaacatttagcaaagcaatcaatcaattagctataaacattactcaccaggccattcggcatagtctgctgattcaaattcaaatactgatagtgattgttataagttgtggccgaaaagcaccgcatggcagggcttaaggtgtagagcaatgagctgtcatcgcctccaaattgcggtttcacggaccacgtttcggacgcgtagccgccaaatatatattgatcctcgtcctcaataaagaacagcgttggtcctttgtccagcacttttcccaacatcgtcgagaagctttccccgttgattttcgatgagaatagaaagcgccatttgtgccgatgttcgcggggcagctgagcattgatatacaggacgtgaggtagttcgatgatagggcgataatgactattttgcggagcatctggaaaataggaaaaaagttataaacgattttaataaatttaaaaattttctttgtcctaccacacagtgctggcagaattggaatttccatttccttgattatgttgcgtttgctgccaccatggcgacaatacagctggctaaagacctcgcgccaaatctgcaaaaactgcggagtgacgtgtaaccaacgttccagggcatcgttgggcatagtgtgctctagctccttgcccagatttctcataaggcccttggcaaatgtggcggcggacctttccgtggtgttaaagccaagatcgtgccactccttgatgccagagtttttcgctgtactttccaagtgcacgtagctcttgatcaccgagtagatatactggggaattataaaattgattaattcgcgagcaaaagataaaagaattaaataaacaagttgttcatatgacagctaagaaaataaacgtggaaatctagttttcaggataaacataaatggagagctaaacctaattcaataacaaacatgttatgaatcctaatgaggctcggctgacagaagttataaatattatttccgcgatctgatgacaatgactacttatttatagactcacttgctccaattgcttgctgttgaaggtgtcatttccacttctctccattgagcccaggagcatttgcattttctggtcaatagtaccgcgttccatgatgtagtagggctctccaaatttcttcagctgaaggttgacacattgctgacctggcttcgtgggcgtaaatagatactgagccgtactttcggccagggatctttcgatggtttgcgaccaagtttcctattttcgaaacaaaacaacagatacatgtatatgtgtgtacataaacaaaatgcgcgccggatacgtaaacataattttcccgctgctgtcagcaaattcttgcagggaacgaaggtctgggaagcgctgacacagattaacccattgaaggacgtacaatgaataataatttggtttgactgaaaacaaagtctctcaagttttatgaaaataaatactacttcaatgtatgtaaagtttcaatttagagagtttccgcttaaattactctatatgaatgcaagtcttataatttcctcattctaaaaatcaactatttcacatgccatgctgtaaacgggttaagcatatggtttatttttaattcaattgggtttggccctaattgacgaccccagtcattgaaatcacgactaattcgttagcaagcaaattcaacaaagcaaaagacaaacagtgaaatgcggcagcaaacaaattagacaaattatggacacgttcgcactggcccaggaattatcaattcgaaactgataacgcccgagttgaagatatcgaattttgctataccctaggaagcgctgtgataatcaaacacgagctataaatagatggaaatattataaggaaaaatcatcatctggttacaaacaaacattttttgagtggttgcatttccgtcatctgtgctgtgataaaaataaaacacaaatctggggccttgaacccgcatcggaaaaattatagcataaattgtgtatgatcagattgatttaactaaatgggttaaaataacaattttggaaagttacgtgtacatttaatctaaataggactgactagtttagaaaattacatttttaaacaagttgaataatttactttttataaactctgttaaatttcctggtttgcactttaaatcgaaaaagaactgtattaaaataaggtttagaaactttgaacttttgtataatgccggataatgttgcgactcactctcttatataactaagcttctttttcggaacatagtactatgattaacttcaatgtttaatcctcgaaataggagttagtgacaacaacaaattaatgccctaaaggatatacccattcaagtgaagggtggccatcgcagcaggtggatggacggccgtttgtcatgcactcgaaagtcccgatttctctttttttgccgaagaaagttcactccgcgcgtccttgaacttgtgaccctgacccttccgcaaatgcagaatgcagttgccattgattttcgcagtgcacacgtggcacggtaactggatttacttgacttaccaccaatctgtcttgggtcaacttctcaagtgctccgccagaggcgtttttgtacgcggattccagcatgcgtagctcttccgaattgtagagattatccgtctcccgcttgccactcgcatttcccatctcaggacacgaaattcagttggctggtgctacgacggctggtaaacaaacaatgcagctgcagctgcggatgatcgcggattttaattgaaaataaaaaacaaacaacacaagctggtgatggaatggcagtcgatttccctgcgataccctcgatagtttcggaaacgggtaaatttcgcggtggtcgtctgcactatgaatggttattgtctgtgctaagtcaggtcgatgtatttgctaaacggttaattttaaccgctaagcgaattcaacgaaggccaagcgaataaaataaattttaaatgccttggatagctgtagttaaaaatttattaaaataaaaaaaaacttacaagtttgagctaagatacctttgccctagcccggtatttttgaaattatctcagttaccttagcaacacgccttattaaatcaattgcctggcctaataaagttctcccacacaaaaacacaataaattccgatacaaaactgaagaaagctggcataccgacagatatttccggaatacgattggccaaatctgtgagtaatccaacgcgaaaggatgattggcactagcagcggaacgtcccacaatcggagtcgaaagaagaaagaacagtgcggatcctgtcccaacagattctcaaaggataagcgccaggtggccgccgaggactcggataccacggaggtggaatcgtctacggatgaggaggaacgctggaaggaagtggcgcgagccgctgagattccggctgactattataatatccaaaaactggtgaaatacatcaaggcgggcaatcagacagccactatagtatcgttgtgctgcttgaaggactacgatctgagcacccagatcaatcagttcgccatctcggacatcggcggactcgatgtcttggttaacatcctggagtgcagcgacaccaagtgctgtttgggcgccctcaaagttctctcagatatcacactgaacatcgatattaggaagaccatcgtagatctggatggcattcccctcattgtggacatcctaaactcttccatgaaggacctaaaaaccatggccgccgagacattggccaatgtgtgcaaggt

SEQ ID NO: 10679 - DNA, 1461 bp, DROSOPHILA
cttgtgttgtttgttttttattttcaattaaaatccgcgatcatccgcagctgcagctgcattgtttgtttaccagccgtcgtagcaccagccaactgaatttcgtgtcctgagatgggaaatgcgagtggcaagcgggagacggataatctctacaattcggaagagctacgcatgctggaatccgcgtacaaaaacgcctctggcggagcacttgagaagttgacccaagacagattggtggaaacttggtcgcaaaccatcgaaagatccctggccgaaagtacggctcagtatctatttacgcccacgaagccaggtcagcaatgtgtcaaccttcagctgaagaaatttggagagccctactacatcatggaacgcggtactattgaccagaaaatgcaaatgctcctgggctcaatggagagaagtggaaatgacaccttcaacagcaagcaattggagcaatatatctactcggtgatcaagagctacgtgcacttggaaagtacagcgaaaaactctggcatcaaggagtggcacgatcttggctttaacaccacggaaaggtccgccgccacatttgccaagggccttatgagaaatctgggcaaggagctagagcacactatgcccaacgatgccctggaacgttggttacacgtcactccgcagtttttgcagatttggcgcgaggtctttagccagctgtattgtcgccatggtggcagcaaacgcaacataatcaaggaaatggaaattccaattctgccagcactgtgtgatgctccgcaaaatagtcattatcgccctatcatcgaactacctcacgtcctgtatatcaatgctcagctgccccgcgaacatcggcacaaatggcgctttctattctcatcgaaaatcaacggggaaagcttctcgacgatgttgggaaaagtgctggacaaaggaccaacgctgttctttattgaggacgaggatcaatatatatttggcggctacgcgtccgaaacgtggtccgtgaaaccgcaatttggaggcgatgacagctcattgctctacaccttaagccctgccatgcggtgcttttcggccacaacttataacaatcactatcagtatttgaatttgaatcagcagactatgccgaatggcctgggcatgggcggtcagtttgatttttggggcctttggattgactgcagtttcggcgatggacaaagcgttgaaagttgcactacatatcgagactacgtgcagttgagtaaacggaaacagttcaaaatacgaaacatggaagtttgggccgtaggagacttaccagttaaagaagaagacgaagaaggcgacggtcacaaacgttctgtgctggatggcaatttggaagatcgggccatgttggaaattgcgggcaagaaaatgcactcggatggattgcgtgagcccaacatggatgattga

SEQ ID NO: 10680 - protein, 448 aa, DROSOPHILA
MGNASGKRETDNLYNSEELRMLESAYKNASGGALEKLTQDRLVETWSQTIERSLAESTAQYLFTPTKPGQQCVNLQLKKFGEPYYIMERGTIDQKMQMLLGSMERSGNDTFNSKQLEQYIYSVIKSYVHLESTAKNSGIKEWHDLGFNTTERSAATFAKGLMRNLGKELEHTMPNDALERWLHVTPQFLQIWREVFSQLYCRHGGSKRNIIKEMEIPILPALCDAPQNSHYRPIIELPHVLYINAQLPREHRHKWRFLFSSKINGESFSTMLGKVLDKGPTLFFIEDEDQYIFGGYASETWSVKPQFGGDDSSLLYTLSPAMRCFSATTYNNHYQYLNLNQQTMPNGLGMGGQFDFWGLWIDCSFGDGQSVESCTTYRDYVQLSKRKQFKIRNMEVWAVGDLPVKEEDEEGDGHKRSVLDGNLEDRAMLEIAGKKMHSDGLREPNMDD

SEQ ID NO: 10681 - DNA, 3554 bp, DROSOPHILA
tttgattgaggcttaataaaacgtgttgaaaacgttttagcttattatggtgctttgtcatcattacactttcgtttgaaatacttagacatatactttgaggaaatgttttctttctgtactgtacaagcttagaaaaaacgcctaaaattaaattgattcttgtttagttcataattattatagcttattattaataaataataattatacccatttgaagcttatagttagaatcgttagtaacacttgatttaatctaagaatttagccatttttgttaaacataaatctatttataggaatgtcaccctatctttaatttgccttcacgtgaacaattgagtcgtaaactattatatagctagtcgatgactgagtgctgtttaaaatagatctagattagccaagtctaattggccatcaagatctctctacgataagccgagagagcttttcaattggctgtagataagctgggtcgcggccaatcggattcgttcggcagttcaccacgcaatgccgttcggttccacttaccgtgctcttggtcatcggctagatcactccgggcctggatgaccaggagagcgaagaagcacaagatcaggcaactctttaccattttggggtaggggcggtaactttaaactgaggaatgctccgtttgggagtaaccgcgagactggccaaaactgacgaaatggcccggttatatagcctccgatttatcgaagcggtcttcctgtaatatacatacgcgttatgggtgattgtttttgtgatttgagcaatctaaagtggcgatcgattaattatctcgagtgcctaaaaacgtgagtatcacggtctggctaagaaggtgtcgtaaattacccgatccccaccaaactgccctatcgactcctcacacgagctgcacctgatggtatattaatgggtcgcatggaactacggagtacagtattcacttggctggcacggtgaaagtatctcgaaaatgctgagtcttaagttctggattcgcctcggtctgctgaccgtcgtttggggtgcagcggttcctggaagagcccccgtggacgaggagcgaatgcatccacatctgcccactagtcccaggctgcgtacgatttccggcgaggaaacccaggagttctggcactcggccagcaaaaaactcatccgcgaaaagttggagttcgtgaggaacaccaagaaggccaagaacattatactgtttttgggcgatggcatgggactggctactctggctgctgccaggagttacattggaggcgaggagttgaagctctccttcgaagaattcccctttaccggactatcgaaaacctattcggtggacaaaatagtccccgatagcgcctgtacctcaacctcatatctctgcggagtgaaggcgaactacggaaccatcggcgtaaatgcgcatgtgaagcgaggcgactgtgcggcgatggccaatgaaacgaaccatgtcttctccctgggtaaatgggccatggatgcgggcaaagctgctggactagtgaccaccacccgagtgacccacgcctcgccatccggagtctacgcccatgtcgccgatcgtgaatgggagaataacgctgttctcgaggaggcctgcggtgagttgtcagatggactccaggacatagctgtccagttgattcacggcgaggtgggcagcaaactcaaggtcatgctgggtggaggcaagcgaagcttctatagtccggaacactacgacaagggccggcgcactgatggtcgtaatctcgtcgaggaattcgaagccttggacgcgggcaacacctttgtgaaaacgcagaagaagctgctcaatgtgaacgccactgaaaccggtagattgttgggcctgttcagcaagagccacatgcactatcatctggagcaactggccgatccggacaacaatgagcccaccttggaggagatgacacagaaggccattgaagtgctggaaaccgaagagcagggatacttccttttcgttgaaggaggtaaaatcgacatcagccaccacgaaacaatggcacgaattgctttggatgagaccgctgaactctcgaaggcggtgaagaaggctagggagatgaccaacccggaggagaccctcattgtggtgacctcggatcactcgcacaccttcagcgtttcgggatatcaaccacgaggaagcgacatctttggagctgccaaggcgaatggcaaggatggcaaaccgtatctggccttgagctatgccaacggcaagagtttccaggactactacaatacggagacccacgagcgcgtggatcccaccagtctgcccacaatcggagacttcgatcagctcttccccgcgatggtgccccttgaatcggagacccatggcggcgaggatgtgggtgtcttcgcctcgggaccctgggcacatctcttcactggcgtctacgaacagaacaccattcctcacatgatggcattcgctgcctgtgtgggcgatggactaaccgcttgcgattaggaatcccaatccggcgatgattgacggacagaaggactcttaattagcgcatccactagacgattctcacgtacgctttatcgttttaaatgaatactcaacatttgacaggtgctggaacacgcggctctcgagaaaagaaattcgatcggggattactaaaatcaatacttcaataaacgttttcctatcaatgttaaaaaaccaaatgtacttatagtgtctgattataagcagacaatagctggccgattaaatatgattatattaataagaacaatttatatttgcgactttttctaactgacagtggtgtgattgaaaaatgagaaaggaatttgtttttttttttttgtatttttatctaacaacttaccattttttcgaatgggtacttttccattcgtagattctaagatcttgatagtaggacttgtggagccaaatgaatacgcattggactttgctatgcatggggcattccttccaagaaaaaccacatttaacaaaatatgtacttctgattaaatataaacgttaatgggtgataagtggcttatttttttttttttttgactttgtacagacaaatgacgcaaaaggatggactttaataaaacgactaagaacatgcaatttttacgtctcaaaagaaaatcgaaattcgttacaaagttccattctgtaaaacatattatgtggggtactagtatacaaaacactttttatgcagagctgatcttaaataattaaaaagataaaaaaggattgtttaaatataagagttaatctgattgacaaagttcaaattcttagaaattaaattatcgcttttctgtactgaaaagtgtatccaatgacgttaaacgaattaactctaaaattgtttacccaccgcttcgaaggaattttatttttacaataccaatgacaagttaaatttaatttaagtctatcaaaaattgattaactgtgttatgactgcaactaaattaaaatc

SEQ ID NO: 10682 - DNA, 1554 bp, DROSOPHILA
atgctgagtcttaagttctggattcgcctcggtctgctgaccgtcgtttggggtgcagcggttcctggaagagcccccgtggacgaggagcgaatgcatccacatctgcccactagtcccaggctgcgtacgatttccggcgaggaaacccaggagttctggcactcggccagcaaaaaactcatccgcgaaaagttggagttcgtgaggaacaccaagaaggccaagaacattatactgtttttgggcgatggcatgggactggctactctggctgctgccaggagttacattggaggcgaggagttgaagctctccttcgaagaattcccctttaccggactatcgaaaacctattcggtggacaaaatagtccccgatagcgcctgtacctcaacctcatatctctgcggagtgaaggcgaactacggaaccatcggcgtaaatgcgcatgtgaagcgaggcgactgtgcggcgatggccaatgaaacgaaccatgtcttctccctgggtaaatgggccatggatgcgggcaaagctgctggactagtgaccaccacccgagtgacccacgcctcgccatccggagtctacgcccatgtcgccgatcgtgaatgggagaataacgctgttctcgaggaggcctgcggtgagttgtcagatggactccaggacatagctgtccagttgattcacggcgaggtgggcagcaaactcaaggtcatgctgggtggaggcaagcgaagcttctatagtccggaacactacgacaagggccggcgcactgatggtcgtaatctcgtcgaggaattcgaagccttggacgcgggcaacacctttgtgaaaacgcagaagaagctgctcaatgtgaacgccactgaaaccggtagattgttgggcctgttcagcaagagccacatgcactatcatctggagcaactggccgatccggacaacaatgagcccaccttggaggagatgacacagaaggccattgaagtgctggaaaccgaagagcagggatacttccttttcgttgaaggaggtaaaatcgacatcagccaccacgaaacaatggcacgaattgctttggatgagaccgctgaactctcgaaggcggtgaagaaggctagggagatgaccaacccggaggagaccctcattgtggtgacctcggatcactcgcacaccttcagcgtttcgggatatcaaccacgaggaagcgacatctttggagctgccaaggcgaatggcaaggatggcaaaccgtatctggccttgagctatgccaacggcaagagtttccaggactactacaatacggagacccacgagcgcgtggatcccaccagtctgcccacaatcggagacttcgatcagctcttccccgcgatggtgccccttgaatcggagacccatggcggcgaggatgtgggtgtcttcgcctcgggaccctgggcacatctcttcactggcgtctacgaacagaacaccattcctcacatgatggcattcgctgcctgtgtgggcgatggactaaccgcttgcgattag

SEQ ID NO: 10683 - protein, 517 aa, DROSOPHILA
MLSLKFWIRLGLLTVVWGAAVPGRAPVDEERMHPHLPTSPRLRTISGEETQEFWHSASKKLIREKLEFVRNTKKAKNIILFLGDGMGLATLAAARSYIGGEELKLSFEEFPFTGLSKTYSVDKIVPDSACTSTSYLCGVKANYGTIGVNAHVKRGDCAAMANETNHVFSLGKWAMDAGKAAGLVTTTRVTHASPSGVYAHVADREWENNAVLEEACGELSDGLQDIAVQLIHGEVGSKLKVMLGGGKRSFYSPEHYDKGRRTDGRNLVEEFEALDAGNTFVKTQKKLLNVNATETGRLLGLFSKSHMHYHLEQLADPDNNEPTLEEMTQKAIEVLETEEQGYFLFVEGGKIDISHHETMARIALDETAELSKAVKKAREMTNPEETLIVVTSDHSHTFSVSGYQPRGSDIFGAAKANGKDGKPYLALSYANGKSFQDYYNTETHERVDPTSLPTIGDFDQLFPAMVPLESETHGGEDVGVFASGPWAHLFTGVYEQNTIPHMMAFAACVGDGLTACD

SEQ ID NO: 10684 - DNA, 2780 bp, DROSOPHILA
gaggttggcttgaatgcgaaatcgtatttagtatatgcgaatatatgtaaatatgtaccatatcgatttatttatttactttaatgtatgtattttttgtttttcgtcattccgctcgtctgacattgctcaacattcggttgtgttttgatttataaatgtaattttagtgtatttcaatttagttttcaatatattttaaatatatacatataatatatgtatgtttatgtttatgttcggtttagtttagcttatgtgtttgctttatcttctcataaatcttcttttctctatcgttcctcgtctcttttttggtttttatttataaactggtcagcaacagtagcaaatttaacaatgtgcgttaacaaataattgtaaatataatgtatgtatataatatatttcttctcctcgcttacttgtatttgtataatatatgtgtgttcagtatctatgtgatgggtgtgtattgcatctgtgtatatatgtgtgtgtgtgtggtcttgtattatagagctttatccttttagtgggttaatggagttgcagtcacctaaaccggcaggcaatttgttaaataattttacaacaatttatctgggcttttctgtggctttgttttttttgtaatttttttggttttttttttttgtggcccggctgtttggccgatgctgctgttgtccgtcggtcactcataatattttcattaatttaattaataaaaaatattaccattagtattagtactattagtcatatcatatcatatcatttcatatcaacgagaacaacaacatatgcattggcctacagttcggaaccgggtatgggttttaactttagcattggtttgtctgttcatcattatcatttttgtgttttactttatattagcttagtaatcgtaatcaatagcaataatcataatcataatagtaataataagactaatctacgaataatataacaggaccctatagaatgaccggggttatttgccaaagccgaacccgaattttccgaagaggtctttgcctttcgacaggacatcgccgccgggcgccgctgccgcgatgcccttgagcccgcccagcaatccggcgcccggtcctggaggcggcgcctgggcttgcggtggcacttgttgtggctgctgctgctgctgctgcattccgggctgcataccctgctgcatgccctgctgcatcccctgctgcatcccttgctgcatcccttgctgcataccctgctgcatgccctgctgcatgccctgctgcattccggactgcattcccccctgctgctgcatgcccatgccaggctgctgggcaccaaaggcgtttgcttgttgctgcgctggctgcacaccaccttgtggttgcattggatccgtcttgggcggttgcttcgacccaaatagaccaccggtggcagccgaggtagcaccagagagcaggctagtcgcgccggagaatagtccgcccgtttgcgcctgtgtcgtcggcggctgctgctgctgtcccatctgctgctgtcccatctgctgctgacccatctgacccatttgacccatctgtcccatttgctgacccatcggctgacccatttgctgacccatcattccaggttgtcccatttgctgctgttgctgctgctgctgtcccatctgcgtctgttgctgaccgtactgctgctgctgttggagttgctgctgctgctgctgctgttgctgttgctgctgcaggccaacattaccaacgcgaccgatcatcccctgcaaggtggcgttggtccaaggaccacaaaagacacgttagtcggacttccaatcgggaatcaggtgggcgcattaaacgaatggcaaactaattgttaagaatatatatatatatatatatggtacgtatatttatgggggtatcttaatattttcatggatttcttcaatgttcaatgtcaagtatgttttttattttttttagctggggtaatcggttagtttagcgaggtcctcgagcatttgccgccgagttgctattgatggattggttgtgtttttaataatggcagctacgtttcattaactacggaaagaggctagtcaaaaaaactgaactcgaatcctcgtgggatccgctctagatgaaacatactccgagtgccatcatctccgcatggagcgagagtagcaggaggcttgatttctagccctcaattgaaacgagtaacagtagcattacgtgatttgattctttatacacttcctttgttcggaacaaaacgaaaaatatgtagaactagcaacgtttctcaaaactttttctcaactgaaatcaataaaaacaagcctaaggccaaaggcgaacgaaaacttgcatggcaaaaataaaatgtatatgtatttccaaaaagatacgcattttgacaaaaaaaaaataaacttcggacagtgcgaaaggactctggatgtgtccctcttcaaaccggacttctatggttctagaactctatgtatttacactattttgatgaaataatgtcgtaggtggtgtttggtgaacgtgtctagataattggtgaaatcaaaaatcatcagcggatctttagcatccagaatgagtttgtgtcgatgaactaaacgaatcaaatcaaaacattgtgttttaactcatcgttttgctatatatttcacttcggtgtttgagcattggtaaaaaaaaaaagtaaaagctaaatgcaaatctagttggttaacttatacttgacgaagg

SEQ ID NO: 10685 - DNA, 780 bp, DROSOPHILA
atgatcggtcgcgttggtaatgttggcctgcagcagcaacagcaacagcagcagcagcagcagcaactccaacagcagcagcagtacggtcagcaacagacgcagatgggacagcagcagcagcaacagcagcaaatgggacaacctggaatgatgggtcagcaaatgggtcagccgatgggtcagcaaatgggacagatgggtcaaatgggtcagatgggtcagcagcagatgggacagcagcagatgggacagcagcagcagccgccgacgacacaggcgcaaacgggcggactattctccggcgcgactagcctgctctctggtgctacctcggctgccaccggtggtctatttgggtcgaagcaaccgcccaagacggatccaatgcaaccacaaggtggtgtgcagccagcgcagcaacaagcaaacgcctttggtgcccagcagcctggcatgggcatgcagcagcaggggggaatgcagtccggaatgcagcagggcatgcagcagggcatgcagcagggtatgcagcaagggatgcagcaagggatgcagcaggggatgcagcagggcatgcagcagggtatgcagcccggaatgcagcagcagcagcagcagccacaacaagtgccaccgcaagcccaggcgccgcctccaggaccgggcgccggattgctgggcgggctcaagggcatcgcggcagcggcgcccggcggcgatgtcctgtcgaaaggcaaagacctcttcggaaaattcgggttcggctttggcaaataa

SEQ ID NO: 10686 - protein, 259 aa, DROSOPHILA
MIGRVGNVGLQQQQQQQQQQQQLQQQQQYGQQQTQMGQQQQQQQQMGQPGMMGQQMGQPMGQQMGQMGQMGQMGQQQMGQQQMGQQQQPPTTQAQTGGLFSGATSLLSGATSAATGGLFGSKQPPKTDPMQPQGGVQPAQQQANAFGAQQPGMGMQQQGGMQSGMQQGMQQGMQQGMQQGMQQGMQQGMQQGMQQGMQPGMQQQQQQPQQVPPQAQAPPPGPGAGLLGGLKGIAAAAPGGDVLSKGKDLFGKFGFGFGK

SEQ ID NO: 10687 - DNA, 3487 bp, DROSOPHILA
tacaaattcgatacaatttctcgattttaatttgatttcaaataaccctttatgatacttaagtgatattttgttatgttcaaaacgaatgaagccatatctcgttgtcacaaagtaaattatccaagggactgacaaacaagcaattgaacctggttttcccaaaaaaaaaaaaattttcaaagcaaaagcagcaacttaccactgatcccatcccctgacagttgacccttccatttccatcaaatgacatggcagtcaacacatttagcccctgccgtcacgtgagcaaaattgctaatcaactgggggatgaaggacatggacttggacatggacatggacatggccatccatgtatgagtggtggtcgtggtggtggtgacccccagttattgtggcccgctcctggggagtgacgacaactcatcattccgtcgttgaagtcgagggctttaatgtgcttaagcgttacgagcatgaacaaacattattgtcctgtgggaatcgataaattggtgctgagtgcagggtcttcggattggcattgaagttgtggaagtgacactttgataacccaaaccactcattccgaccacccactttttactttgagagatactaatgtgtgagtgagtgggtgtttggtggatgtttgtttgccagtttgtggcaaatgtgtggatggataatggagggtggttaagtagctctgtccaaatgaaattcgaaatctttcattccaaataattgtacagatgcatatctgtggtttaaaagggttatgttctatgtatctttgaaatttattgaattctttttagctagaaatatttaattaggttgcacaactcaaaagtatgcaatgaaattaggttcatttacattaaatttttcatataataatctataatttttaccaataaaagcaccgtcttatcagcgcttctttcgtttgatgttcatcaaaacaaagcgtcgtcccagattagttgtgaatctaacttgaagctaagcgttactaccgtgcatgatgtggattcaaaagaacccatttttagggttattgctctgcagttttttggcatttttccagagtacatatgcagaggttggaaaactggtgtgcttctacgatgcgcagagttttgtgcgtgaaggtgagttttgtcagattttaatcaaccaagtggatcaggggttatcttcatctcaggccccgcccaaatgtcgctggctgaactggagcccgctctacagttttgcaactttctggtctacggctatgcgggcattgatgccgtaacctataagatcaagagtttggatccttcgttgaccaatgatcgtcagcattatcgacacattaccgctctgcgcaaaaaatatccgcatgttcgcttcctgctttcggtgggcggcgatcgggatgtgaacagcgagggcgtggcagatagtgacaagtatctaagattactggaacagtcggagcatcggaaaagctttcaggcaagcgttttggcggaactgaacaacaacggcttcgatggcatcgatctcgcctggcagtttcccaaaaataggcccaaactgcagcagggcgtgtttaagagggtatggggatcgttacgtggctggtttagttcctcatcggtggacgagaagtccgaggagcatcgtgagcagtttgccacacttctcgaagagctgcaatccgatttgcgacgcggtggccaactgctaaccgtcagtatgttgccacatgtttcagcggaacgtgagtataatcattgaaaccattgagaatctcgccaatattaaccattacttttactatccctagtctttattgatgttccaaaggttctaagtaacgtggacttcgtcaacctgggcacctatgacttccaaacgccggaacgcgatcccaaagttgcagatctgcccacgccattgtatgccatgtacgatcgggatcccagtcacaatgtgcagtaccaggtgcagtattggatgaaccagacatccgaaatcagtgtccacaaactgcacgtgggagtgaccagttatggtcgagcttggaatatgacccgaaactccggcatcaccggctatccaccaattccggcggcaaatggagctgcaccgccgggaaggcaaactgttacgccaggattgcttagctggccggagatttgtgatttgctgcagcagcaaccacaggatcgcgaggttccccatctgcgcaaagtgggcgatcccaccaagcgttttggcatctatgcgtaccgggcagcggatgatcaaggggagaatggcctatgggtgggctacgaggatcccttgacggcggccattaaggccggatttgtgcatgcccaaggattgggcggagtggccttccacgacctgtccatggatgattttcgtggtcagtgtgctggcgaaaaatttcccattctgcgaagcatcaagtttaagctataaaaagaatagctatttgctttgaatttaaaatttactagctttcacaattatccttctacttttttagtgtatttttgtgaaatatgcatggattgcaataaatttcatttaaaatagtaaacgagctttcaaatggcttccgagtattatattttctttagaaatataagaatcagcttgttcatttaatgaaaactaggataaattgagatgcgagaacggtgagcaaaataaaaaaaaaaaaataaaaagcaggaaataaaccggccaagtggaatcctgtagaagcgaaaaagaaaaagtaaaagcgtcctgaagtggcaggcggagcgtaaagcaaagcaaacttctcaaatgccactgacacgatgggtggaattttcggggagccatgctggcaaggatgtgggggttggttggtggacggggcgagatggggtgagtttggggtaagtaggggtggcatgctgactggttgggccaaagtaaaagttgaaattaaaccaattagtttgcctgccaccactttctcgtcgccgttgcaatgaggcgcataaaacgcggcgacacaaggtaagttcctgagatgcccacaaagtagtcacgagtttctaaaaacgttaaagcttatgattttttttcttttctttggggcttaaataggaagggaatgctttaaaaaaatttgtgttttaaggccaacaaaggtttataagtagggaagaaattgaaaataagtaagaaacaaatggaaaattcatgtactttttatagatttccatacatctgcaaaataaaaacaaaaagttttggaatttttgcttcataagaaatatcttcggattgcgtgactccaatttccgctcacgttagcatctcctgcaggacttccgtggggcttggaaacggacttcacccagcaggtatttagacttggctccttttttaagagtattttaaacgacggcgcgtcctttttgtggacttggagcaagcgaag

SEQ ID NO: 10688 - DNA, 1365 bp, DROSOPHILA
ctaacttgaagctaagcgttactaccgtgcatgatgtggattcaaaagaacccatttttagggttattgctctgcagttttttggcatttttccagagtacatatgcagaggttggaaaactggtgtgcttctacgatgcgcagagttttgtgcgtgaaggccccgcccaaatgtcgctggctgaactggagcccgctctacagttttgcaactttctggtctacggctatgcgggcattgatgccgtaacctataagatcaagagtttggatccttcgttgaccaatgatcgtcagcattatcgacacattaccgctctgcgcaaaaaatatccgcatgttcgcttcctgctttcggtgggcggcgatcgggatgtgaacagcgagggcgtggcagatagtgacaagtatctaagattactggaacagtcggagcatcggaaaagctttcaggcaagcgttttggcggaactgaacaacaacggcttcgatggcatcgatctcgcctggcagtttcccaaaaataggcccaaactgcagcagggcgtgtttaagagggtatggggatcgttacgtggctggtttagttcctcatcggtggacgagaagtccgaggagcatcgtgagcagtttgccacacttctcgaagagctgcaatccgatttgcgacgcggtggccaactgctaaccgtcagtatgttgccacatgtttcagcggaactctttattgatgttccaaaggttctaagtaacgtggacttcgtcaacctgggcacctatgacttccaaacgccggaacgcgatcccaaagttgcagatctgcccacgccattgtatgccatgtacgatcgggatcccagtcacaatgtgcagtaccaggtgcagtattggatgaaccagacatccgaaatcagtgtccacaaactgcacgtgggagtgaccagttatggtcgagcttggaatatgacccgaaactccggcatcaccggctatccaccaattccggcggcaaatggagctgcaccgccgggaaggcaaactgttacgccaggattgcttagctggccggagatttgtgatttgctgcagcagcaaccacaggatcgcgaggttccccatctgcgcaaagtgggcgatcccaccaagcgttttggcatctatgcgtaccgggcagcggatgatcaaggggagaatggcctatgggtgggctacgaggatcccttgacggcggccattaaggccggatttgtgcatgcccaaggattgggcggagtggccttccacgacctgtccatggatgattttcgtggtcagtgtgctggcgaaaaatttcccattctgcgaagcatcaagtttaagctataa

SEQ ID NO: 10689 - protein, 443 aa, DROSOPHILA
MWIQKNPFLGLLLCSFLAFFQSTYAEVGKLVCFYDAQSFVREGPAQMSLAELEPALQFCNFLVYGYAGIDAVTYKIKSLDPSLTNDRQHYRHITALRKKYPHVRFLLSVGGDRDVNSEGVADSDKYLRLLEQSEHRKSFQASVLAELNNNGFDGIDLAWQFPKNRPKLQQGVFKRVWGSLRGWFSSSSVDEKSEEHREQFATLLEELQSDLRRGGQLLTVSMLPHVSAELFIDVPKVLSNVDFVNLGTYDFQTPERDPKVADLPTPLYAMYDRDPSHNVQYQVQYWMNQTSEISVHKLHVGVTSYGRAWNMTRNSGITGYPPIPAANGAAPPGRQTVTPGLLSWPEICDLLQQQPQDREVPHLRKVGDPTKRFGIYAYRAADDQGENGLWVGYEDPLTAAIKAGFVHAQGLGGVAFHDLSMDDFRGQCAGEKFPILRSIKFKL

SEQ ID NO: 10690 - DNA, 3167 bp, DROSOPHILA
atgctttaagctaagtcagcatccccacgctggccgctggccatatatgcgcataagctctctctctctctctcttatacatatatatatacgctgctcttctgccgctgtcgacggcggcgcagtcgcagtatttaggtaagattagacactctgtagaggttaagcgggcagaaccgtttctgctactcgaagagataagaagaaataaaaaggtggcctgacggctgcacccaactgcaaggaaaacacgtgttctcaattggtggcatatattggtttattacaccagaatgcgtttttagaaaaagctttgggcgagcgaactataaaactaattactttaactttgatgagtttttcaacctaatgaaaatttatttcatattgtttttaggtcaattctcatcttattgtgcatcgtcgttttgctggctacaattttggactatagctgtggtaaagaaattggaattactcataactcaggctctgatattcattcatttgtttcttccaaaagtttccaacaagctgctgagctccttttcccttcgcaaaaatgtaccccagttgcttaagacctcgaacacaccatcgcctcgagtgattccatgtttgaatggcattcgttgcttgaccatcatctggatcatacttggtcacggctacatgtaccttctactggcgcccaccattaatgcttacgatatcgtggcctgggctcagatgcccttctccatgatcctccagagcggcactacgtctgtggacaccttcttcctgctcagtggactgcttctggttctgtccgccctgcgtgagatggatcggtgagtttccataatgtttatcgaggcttccatattcaattcgaatgttcttagctccaagggtcgtctgcatgtgccactgatgtatctgcaccgtctggttcgcctgactcctgttttggccctggccgtgctcatctttatgacccttttcccccgactggacagtggtcctctgtggaatcagttcaccagctcatcggagctctgcagcgacacctggtgggcaactctgctctacgtgcaaaattatgctgctcctggtaggatggtacgtaatacttaagagcctccttgtgcgacgtttaacctatttaattaatttagtgtctgggtcattcgtggtatctggctgtggatatgcaactgtatattatatccccactccttctgatcgccctttacaaatggggcaaaaaggctatcgcaggaattgtcctgctgatccttctgctgtccgggtgcgtctttggcatagttatgctgcgggatctgaaagtgtttgatcgctatgggtaagtaaagctttatatagaaatcagatatgatagctaataaaaataacttccatcatagaaaccttggtggtgacagcaccgagatgcgcctcatctactacaccacccatgccagagccactccctggttgattggattgctttttggttactttctgcaccaccagaatgtacggaagacacgcctgcccaagtggctggctttggtgctctggattctgagtctttccatgctggccactgtaatcttcgccgtatatccttatacccagagtggggcaggggacatttccgcaatggctggagctttctatctttgttgcagtcggattgcctggcctttggccttgtgctggataatctgggcgtgccaaaatggactggcccccattgtgaatgagtttctgagctggtccttttggcagccactttcaaagttgtcctactgcctgtatatatggcatctgctggtggaaacggttcatatagcgcggatcaagacgagtctgcacttttcggactacgacgctgtaagtacaccctacattttagcaaaaacttacaaagtatttacgtatatgttgaatatttttctagattctccgcttctggtcggactttggcattaccttgtttgtatccatgttcatgcacctttgtgttgaggtgccattggggcgcctcgagatggaactgctaaaaaggtgtcaaaagaaagaggacagtccagaaagtccaagagtagacccctccactgaaccaactgaagtaattccagcgactagcatttcccgccagaacttagtcgacccctaaacaaagtttttataattgttatgtgtatttaactcaagcaagttaaatcgcaagtctaatctgtgaatagcgctcttaaataagcatacattttttataatgtgtgatatatctacaaaaacaatttttacattcatattgcatacactttacttgtacatatatatgtatacttgtatatatatatatacaaaacttaaatgaaaacccccgaaagtatgcaagatgaacactaaatgacaagacaagtaagagaaatctttgtaaatgtctcgaacagtttttgttagcttagctaattaactgacataaataaatatcatttaaaaccaaactcagatatttctactcacgttctccgtacatgtaatgtaagatggatgtgctataaagtttaggcccacatcacgtatgagcaatgtgccccactcatatatcacaatcctttcaatcagctccaaaagagcaagttctgaccaattttcccccggcacagccatatcttcatagtagacccatttcccacaacaattaccctttaacatacacaaattccacatcacgtatacgcctcgtgggccgcccattcgttcgaaaattggtcgttgggtttttcgggtgttcgccgtgccatcaaacaccgaaaaagtgtcgggggcggacatctatgcaaagctaaacgtgcagcaactaacaactaaatttcattaaaccgcagcgcacaaattgaactacaacaaacccaccgccaaaacaccatcctcatcaacatcaacggcaaaaacaaatgccgccggagggaaatttaagtgccttcggcgaccaaacgaaccaattttgtagcggccatttcagggagccaaagctccaaaaaagtccggaaaaaaaaatgctcaacaaaatgaagcggcatgaagttaatgccgcagactctgcacggccatgtgcttcacgagacagcggatgccaaaaagcagcaggcaggacaacaactcgtgca

SEQ ID NO: 10691 - DNA, 1257 bp, DROSOPHILA
atgtaccttctactggcgcccaccattaatgcttacgatatcgtggcctgggctcagatgcccttctccatgatcctccagagcggcactacgtctgtggacaccttcttcctgctcagtggactgcttctggttctgtccgccctgcgtgagatggatcgctccaagggtcgtctgcatgtgccactgatgtatctgcaccgtctggttcgcctgactcctgttttggccctggccgtgctcatctttatgacccttttcccccgactggacagtggtcctctgtggaatcagttcaccagctcatcggagctctgcagcgacacctggtgggcaactctgctctacgtgcaaaattatgctgctcctggtaggatgtgtctgggtcattcgtggtatctggctgtggatatgcaactgtatattatatccccactccttctgatcgccctttacaaatggggcaaaaaggctatcgcaggaattgtcctgctgatccttctgctgtccgggtgcgtctttggcatagttatgctgcgggatctgaaagtgtttgatcgctatggaaaccttggtggtgacagcaccgagatgcgcctcatctactacaccacccatgccagagccactccctggttgattggattgctttttggttactttctgcaccaccagaatgtacggaagacacgcctgcccaagtggctggctttggtgctctggattctgagtctttccatgctggccactgtaatcttcgccgtatatccttatacccagagtggggcaggggacatttccgcaatggctggagctttctatctttgttgcagtcggattgcctggcctttggccttgtgctggataatctgggcgtgccaaaatggactggcccccattgtgaatgagtttctgagctggtccttttggcagccactttcaaagttgtcctactgcctgtatatatggcatctgctggtggaaacggttcatatagcgcggatcaagacgagtctgcacttttcggactacgacgctattctccgcttctggtcggactttggcattaccttgtttgtatccatgttcatgcacctttgtgttgaggtgccattggggcgcctcgagatggaactgctaaaaaggtgtcaaaagaaagaggacagtccagaaagtccaagagtagacccctccactgaaccaactgaagtaattccagcgactagcatttcccgccagaacttagtcgacccctaa

SEQ ID NO: 10692 - protein, 418 aa, DROSOPHILA
MYLLLAPTINAYDIVAWAQMPFSMILQSGTTSVDTFFLLSGLLLVLSALREMDRSKGRLHVPLMYLHRLVRLTPVLALAVLIFMTLFPRLDSGPLWNQFTSSSELCSDTWWATLLYVQNYAAPGRMCLGHSWYLAVDMQLYIISPLLLIALYKWGKKAIAGIVLLILLLSGCVFGIVMLRDLKVFDRYGNLGGDSTEMRLIYYTTHARATPWLIGLLFGYFLHHQNVRKTRLPKWLALVLWILSLSMLATVIFAVYPYTQSGAGDISAMAGAFYLCCSRIAWPLALCWIIWACQNGLAPIVNEFLSWSFWQPLSKLSYCLYIWHLLVETVHIARIKTSLHFSDYDAILRFWSDFGITLFVSMFMHLCVEVPLGRLEMELLKRCQKKEDSPESPRVDPSTEPTEVIPATSISRQNLVDP

SEQ ID NO: 10693 - DNA, 3759 bp, DROSOPHILA
cactcagatttgccgacagcagaaatattttagggttgtatcttagaggtggagaaacatcgatgccaacatcgatgtcatcgatgttttcgaaaaatcaaaaacgtcgatgtttttcgaggaatcgtcgatgttttcagcgcatagaaacagcaaagtgtgtaaattgtaagtctaaattaatttccatattttctaatacaattattaatagcatattgcatatttattgtgactcgccggtggtgtaggctggtgtcttggaagacatggataaatatctgaaatgtaagttttttttttaaagatcaatttatttgttttttgccaaagacatcgaaaacatggatgttcgccaacatcgatgtttctccacttctaatgccaacgaaaacgtgactgggaacgtatcgatgggaaaaacgttacaaaaataccaactatcgcatagcggaatcaccttggcgggctattcgaatgtatctcacaaatagtttttaaggaacctacagtcagtaccaaatacttaaaattccatttatattttattttatgctacagaaaactgataagctgcattacttttgaaaagttaaaaattgtgttttttaaatgatttatttatataaataagcttatgtaatactattgttaatatgtaaaaaaaaaagaataaaagaaaaagaatagtttacctaagcagttgcttgaataatacatacataatttaagttttatacataatttatcaaccctcgctcagtaggaaaaaaagatggctcagaaatgagcaacgaattggaatgtccgataagccttttttatcaaaataataatttttacattcccttttcataacgctttcccagttagtttgtgccaatcgtaaaacagcatccgcaaagtgaagtcgctgctattttgtagtaccactacattcttatttatttaagtaatatttaaagaatgtccagctaactatatgattgctagttcaaaaatgttactttctgcatcgatcctaatatatttcttgctgaatctgcaatcttcgagtgctgagattgccgactgcagtttctatgataccgttgatatctcggaaggccagaggctctcgaatggatcatacctctacgagggattacttattcccgcccatttgacggccaagtatgaattcaagcttctggcgaatggagataaggagcaggtgccaagtcacgtgagaggatgtgtgtgcaagctaaggacttgcgtcaggttttgctgcccacatgaccacataatggatatgggcgaatgctacgccaacatgacgacggaggagaacgaattactggaccccatgctaaatgtgaccctggacgacggatcagtggtgcaaaggcactataagaaggagctcatggtgcagtgggatctgccaaagccctgcgatgatatgttttacctagacaaccgggatataatggatgagtacaccttgttcgaggtatggctgctcgaaaaataagcatttttgggcaggatttatttatgctttggctctctgcagaatggaagattgctgcgccactacgatcaagtgtatttggacaagtcggagtactgtctgcagcaccgaacattcggcgaaggtaacaacaactccattcgcattataccccacaactgcttgatactgccatccagaacgggacagaccgttggtaagatgatgcccattgcttgcatggtagctcccagttctatatctttcctatttccatagtgatgatcacatcgttgatatgcttggttcttaccatcgccgtgtacctgtgcgttaagaagctaatgaatttggagggcaagtgtttcatctgttacatgatgtgcctatttttcggatacctgttcctactccttgatctgtgggagttatcgctcgatttctgtaaagcagcaggttagcttagaggggatgcatttcaacacaacttgacaaaccattgaccatttacgacaggtttcttgggatactttttcgtcatggctgcgttcttttggctatctatcatcagtcggcactattggaaatgtcttaccaatccctgtgcctcgatgaacattcggtcagaacgtgcgtttctgctatacagctgcttcgcctgggcaatgcctttggccttgaccggagtcacctatctggctgataacgttgtgaacaacgaggagtggcagcctcgcgtgggcgacgaagggcattgctggatctatagtgggttctgttttgtatccggcttgtggtaccagctcaccaatgtttttctttccaccctcagctaaaagctggtctgcaatggtgtacttctatggaccgatggtgctcctgattctcttcaacataactatgtttgttctgacggctaaacacataatagattccaagaggactcttcgaaagattgctcgcaatgaaggtagaatacagaagctgaattcggacaaacagaagtatatcaattataatagttgaaaatgtcagtttaagataaatattatcaattcgttacagttacacacaatttctgctgctcttcactgtgatggggatgtcgtggagctttgagatattctcctacttggtgcaacgcgagaaactgtgggtcaatatctttctggtagctgactacttcaactggtcccaaggcgtcattatatttgtgctattcattctgcggcgcaaaactcttgtactattcaagaaacagtaagtcttatagttcatagttcgggtaaccagttccctaaaatgtctcttttcagaatatttcccaaacagagagcctttagtagatctgcaactcaaagtacgattgaatccatttctcaaacaaaaaggcattttaacatgacatagtattttcttctcttcgaattaatcaatttaatagtaaagtataactttttttctcacaaaatgtatgaatatatttcacttcattctacattctatatagaattcatttaatcacaaaatgtatgaatatttttctttatatgacgtgcatcgactatagaaaatcgactatagtgtgccacaatatattttactcatcatttcctaatcaaactattgcaaacttaactttgagccgaggaaaaaccctgtatgtctatcaaaactatgagtcaaaagtatgacgcgatgctgaaagtagttgcctttaaatattgaagtgataaatgtagaaagaagacatttgtatggaaataaactaagtttgtaaatctacattcgctttatttcatgtacaaattttaatttaaaaactttgaaggtaaatagtgctttatcagatgcggattacacggtagcagttatcatcgatgtcgaatcttcttgtttatgtgaccgcttttcttcgctgtcgcactggagttcgtggatagtttgctctttgtattcgaagtgggtgtgccgaggagatccttgttccctccactgttcgtagatccagacaccattccgctcactacgctgccctcattgcgatgcgagggtgaatctgtaaataaaaaggtgtaattaaacatatatacttttctggagaaaagcgctaaagttgaatctcaatgtgctgtgctgccttacccttttcgtctttcggtgtgctcttgattgtcgtggttccgtcgtgggccgttgtggtgttctgattgattgagatctgattgtcgctggagtcttcatttgtgatggaatccgattcg

SEQ ID NO: 10694 - DNA, 1449 bp, DROSOPHILA
atgttactttctgcatcgatcctaatatatttcttgctgaatctgcaatcttcgagtgctgagattgccgactgcagtttctatgataccgttgatatctcggaaggccagaggctctcgaatggatcatacctctacgagggattacttattcccgcccatttgacggccaagtatgaattcaagcttctggcgaatggagataaggagcaggtgccaagtcacgtgagaggatgtgtgtgcaagctaaggacttgcgtcaggttttgctgcccacatgaccacataatggatatgggcgaatgctacgccaacatgacgacggaggagaacgaattactggaccccatgctaaatgtgaccctggacgacggatcagtggtgcaaaggcactataagaaggagctcatggtgcagtgggatctgccaaagccctgcgatgatatgttttacctagacaaccgggatataatggatgagtacaccttgttcgagaatggaagattgctgcgccactacgatcaagtgtatttggacaagtcggagtactgtctgcagcaccgaacattcggcgaaggtaacaacaactccattcgcattataccccacaactgcttgatactgccatccagaacgggacagaccgttgtgatgatcacatcgttgatatgcttggttcttaccatcgccgtgtacctgtgcgttaagaagctaatgaatttggagggcaagtgtttcatctgttacatgatgtgcctatttttcggatacctgttcctactccttgatctgtgggagttatcgctcgatttctgtaaagcagcaggtttcttgggatactttttcgtcatggctgcgttcttttggctatctatcatcagtcggcactattggaaatgtcttaccaatccctgtgcctcgatgaacattcggtcagaacgtgcgtttctgctatacagctgcttcgcctgggcaatgcctttggccttgaccggagtcacctatctggctgataacgttgtgaacaacgaggagtggcagcctcgcgtgggcgacgaagggcattgctggatctatactaaaagctggtctgcaatggtgtacttctatggaccgatggtgctcctgattctcttcaacataactatgtttgttctgacggctaaacacataatagattccaagaggactcttcgaaagattgctcgcaatgaaggtagaatacagaagctgaattcggacaaacagaattacacacaatttctgctgctcttcactgtgatggggatgtcgtggagctttgagatattctcctacttggtgcaacgcgagaaactgtgggtcaatatctttctggtagctgactacttcaactggtcccaaggcgtcattatatttgtgctattcattctgcggcgcaaaactcttgtactattcaagaaacagtaa

SEQ ID NO: 10695 - protein, 482 aa, DROSOPHILA
MLLSASILIYFLLNLQSSSAEIADCSFYDTVDISEGQRLSNGSYLYEGLLIPAHLTAKYEFKLLANGDKEQVPSHVRGCVCKLRTCVRFCCPHDHIMDMGECYANMTTEENELLDPMLNVTLDDGSVVQRHYKKELMVQWDLPKPCDDMFYLDNRDIMDEYTLFENGRLLRHYDQVYLDKSEYCLQHRTFGEGNNNSIRIIPHNCLILPSRTGQTVVMITSLICLVLTIAVYLCVKKLMNLEGKCFICYMMCLFFGYLFLLLDLWELSLDFCKAAGFLGYFFVMAAFFWLSIISRHYWKCLTNPCASMNIRSERAFLLYSCFAWAMPLALTGVTYLADNVVNNEEWQPRVGDEGHCWIYTKSWSAMVYFYGPMVLLILFNITMFVLTAKHIIDSKRTLRKIARNEGRIQKLNSDKQNYTQFLLLFTVMGMSWSFEIFSYLVQREKLWVNIFLVADYFNWSQGVIIFVLFILRRKTLVLFKKQ

SEQ ID NO: 10696 - DNA, 4153 bp, DROSOPHILA
tcggaacatagtactatgattaacttcaatgtttaatcctcgaaataggagttagtgacaacaacaaattaatgccctaaaggatatacccattcaagtgaagggtggccatcgcagcaggtggatggacggccgtttgtcatgcactcgaaagtcccgatttctctttttttgccgaagaaagttcactccgcgcgtccttgaacttgtgaccctgacccttccgcaaatgcagaatgcagttgccattgattttcgcagtgcacacgtggcacggtaactggatttacttgacttaccaccaatctgtcttgggtcaacttctcaagtgctccgccagaggcgtttttgtacgcggattccagcatgcgtagctcttccgaattgtagagattatccgtctcccgcttgccactcgcatttcccatctcaggacacgaaattcagttggctggtgctacgacggctggtaaacaaacaatgcagctgcagctgcggatgatcgcggattttaattgaaaataaaaaacaaacaacacaagctggtgatggaatggcagtcgatttccctgcgataccctcgatagtttcggaaacgggtaaatttcgcggtggtcgtctgcactatgaatggttattgtctgtgctaagtcaggtcgatgtatttgctaaacggttaattttaaccgctaagcgaattcaacgaaggccaagcgaataaaataaattttaaatgccttggatagctgtagttaaaaatttattaaaataaaaaaaaacttacaagtttgagctaagatacctttgccctagcccggtatttttgaaattatctcagttaccttagcaacacgccttattaaatcaattgcctggcctaataaagttctcccacacaaaaacacaataaattccgatacaaaactgaagaaagctggcataccgacagatatttccggaatacgattggccaaatctgtgagtaatccaacgcgaaaggatgattggcactagcagcggaacgtcccacaatcggagtcgaaagaagaaagaacagtgcggatcctgtcccaacagattctcaaaggataagcgccaggtggccgccgaggactcggataccacggaggtggaatcgtctacggatgaggaggaacgctggaaggaagtggcgcgagccgctgagattccggctgactattataatatccaaaaactggtgaaatacatcaaggcgggcaatcagacagccactatagtatcgttgtgctgcttgaaggactacgatctgagcacccagatcaatcagttcgccatctcggacatcggcggactcgatgtcttggttaacatcctggagtgcagcgacaccaagtgctgtttgggcgccctcaaagttctctcagatatcacactgaacatcgatattaggaagaccatcgtagatctggatggcattcccctcattgtggacatcctaaactcttccatgaaggacctaaaaaccatggccgccgagacattggccaatgtgtgcaaggtgcgactggccagaaagtatgtgcgcacctgcggaggaatccccaagctggtggatctcatcgacatcaagttgaggtgagttggcattggataaagtgcttcatactacatcaccacatataagaaataattaaaaaaaaacctaattatattatagcattctaaagacgcctcgtgaccaattgagtccagatgatctggaatctctcgatatgacacgcgctggagcccgggctcttttcactctggccgattccaagcacaacatggagcagatgcgcaagagcggaattgttcctttgatggctcagctccttaagtcctgtcacatcgatgtcgtcattcccataatgggcaccgttcgaaagtgctcctcggagccgaagttccaactggccatcaccaccgagggcatgattcccgacattgtgagccatctgagttccgaaaataccgagctgaagatggagggcagtacagcgatctacaagtgcgccttcgacggaaccaccagggatttggtgagggaggctgggggcttggaacctttggtaactatcataaaggacaagaatgtgagggaaaataagcctttattgagaggcgccactggagcgatttggatgtgtgccgtaaccgatgcaaatgtcaaagtgctggatcaactcaggacggtgaaccacctggtggccttgctaaatgatgagtgtgacgaggtcctgaccaacgtgaccggagctatatctgaatgtgtgagatttcaaagcaatagggagcaactgcgtcaggctggaggattaccagcaatggtttccctactcaacagttctcacgcccctcttctggaaaatttagccaagggattgaaggagtgtgccgaagatccggacagcatgagaatccttgaggatctggatgcggtcaggctgatatggtcgctattgaagaaccccacaactagggttcaggcccatgcggcttacgccatatgtccctgtgttcgaaatgccaacgattccgctgaattggtcaggagcttggttggcgccatggaactggtggtgggtctgctaaagtccaaggatatcatggtcttatccgccgtttgtgctgccattgcaacaattgcccaggatcaaaccaatctagccatcttaaccgatctgaaagtcatctacaagctagccgatctcgtccagaccaccgacgacctccttcgaatgaacttggcagctgccgtggccgcctgtgcctgcttcggtaataatacggaggaactgggacgtctgcgtactgtcactccgattgtcacctacatgaccagcgacaatcccttggtgcaccgcagcacggccatggcactggagaagctatcgatggatccgcagaactgcattaccatgcaccaggtacatttcttctacctaatcacacttagcaactcatttagattcttttattttacttcagagtggagttgttcctttcctgctggagtgcattggatccactaacaaggagctccagttggccgccgctggttgtctgcgcaatatccgcgaattggccttgcgtgccgaggaatatctgcttaaaatcgacgatgactagcttcctgtttttttttctttgttaagttatttaattgtatttgacgaaatatatgtgtgtatgccgatgctaccaatttcttgcatttttagcaaataaattaataagttagtaaatttttaaaccagaaatcccagaaaaatatgtttcattttccatgacaataacatctagctatataattatatatttgtcgctacatattttgactaactaagctcgacccaccctgcataaaattccactctagtaactggcattactgcccctggtggaaatgctcatccgtcgctccacgcgattcgtgtgtggcagcaggcatcccggcggtggataccgccatctacgtggtcgggacaacagggtgccgtccgtcgaagctctactacggaagggagcatcgatgtcgctgcgtgagctgctcaaactgctactcgtaatctcatccgtagactccgtatggtcaccgttgctctcctccaaacaggcgcttccgatgaccagaaaggaatgtcgaccgacgcccaaagacgaggcatcgtagaaggaacaggatcccgaatcgggcgtgaggattccatccgtattggccacatcgctggtggagcgcttgagcttggggaatttgctgaagactcgccagaagcgaaacacatcgcgaaaaacattctgcacctggttggaatgagtgaataaacaaatcgtatatttataaggtgccatgtgatggtaaatggaagattaatttatcagacaaaagtttaatttcacttcaccttaataaagaaatcttttgtaagaaaatttttcctcttacttgatccacgctctctctgacggaaatctcgtgaaaacaggagcaggataactccctgaatcggcgctgaccctcttccaagctgaccattcgatcgcccggctgatctgtcttattgcccaccagtatgacaggaatatccagtgcgtattcctggaaatatggtatataaataagcttcct

SEQ ID NO: 10697 - DNA, 2010 bp, DROSOPHILA
atgattggcactagcagcggaacgtcccacaatcggagtcgaaagaagaaagaacagtgcggatcctgtcccaacagattctcaaaggataagcgccaggtggccgccgaggactcggataccacggaggtggaatcgtctacggatgaggaggaacgctggaaggaagtggcgcgagccgctgagattccggctgactattataatatccaaaaactggtgaaatacatcaaggcgggcaatcagacagccactatagtatcgttgtgctgcttgaaggactacgatctgagcacccagatcaatcagttcgccatctcggacatcggcggactcgatgtcttggttaacatcctggagtgcagcgacaccaagtgctgtttgggcgccctcaaagttctctcagatatcacactgaacatcgatattaggaagaccatcgtagatctggatggcattcccctcattgtggacatcctaaactcttccatgaaggacctaaaaaccatggccgccgagacattggccaatgtgtgcaaggtgcgactggccagaaagtatgtgcgcacctgcggaggaatccccaagctggtggatctcatcgacatcaagttgagcattctaaagacgcctcgtgaccaattgagtccagatgatctggaatctctcgatatgacacgcgctggagcccgggctcttttcactctggccgattccaagcacaacatggagcagatgcgcaagagcggaattgttcctttgatggctcagctccttaagtcctgtcacatcgatgtcgtcattcccataatgggcaccgttcgaaagtgctcctcggagccgaagttccaactggccatcaccaccgagggcatgattcccgacattgtgagccatctgagttccgaaaataccgagctgaagatggagggcagtacagcgatctacaagtgcgccttcgacggaaccaccagggatttggtgagggaggctgggggcttggaacctttggtaactatcataaaggacaagaatgtgagggaaaataagcctttattgagaggcgccactggagcgatttggatgtgtgccgtaaccgatgcaaatgtcaaagtgctggatcaactcaggacggtgaaccacctggtggccttgctaaatgatgagtgtgacgaggtcctgaccaacgtgaccggagctatatctgaatgtgtgagatttcaaagcaatagggagcaactgcgtcaggctggaggattaccagcaatggtttccctactcaacagttctcacgcccctcttctggaaaatttagccaagggattgaaggagtgtgccgaagatccggacagcatgagaatccttgaggatctggatgcggtcaggctgatatggtcgctattgaagaaccccacaactagggttcaggcccatgcggcttacgccatatgtccctgtgttcgaaatgccaacgattccgctgaattggtcaggagcttggttggcgccatggaactggtggtgggtctgctaaagtccaaggatatcatggtcttatccgccgtttgtgctgccattgcaacaattgcccaggatcaaaccaatctagccatcttaaccgatctgaaagtcatctacaagctagccgatctcgtccagaccaccgacgacctccttcgaatgaacttggcagctgccgtggccgcctgtgcctgcttcggtaataatacggaggaactgggacgtctgcgtactgtcactccgattgtcacctacatgaccagcgacaatcccttggtgcaccgcagcacggccatggcactggagaagctatcgatggatccgcagaactgcattaccatgcaccagagtggagttgttcctttcctgctggagtgcattggatccactaacaaggagctccagttggccgccgctggttgtctgcgcaatatccgcgaattggccttgcgtgccgaggaatatctgcttaaaatcgacgatgactag

SEQ ID NO: 10698 - protein, 669 aa, DROSOPHILA
MIGTSSGTSHNRSRKKKEQCGSCPNRFSKDKRQVAAEDSDTTEVESSTDEEERWKEVARAAEIPADYYNIQKLVKYIKAGNQTATIVSLCCLKDYDLSTQINQFAISDIGGLDVLVNILECSDTKCCLGALKVLSDITLNIDIRKTIVDLDGIPLIVDILNSSMKDLKTMAAETLANVCKVRLARKYVRTCGGIPKLVDLIDIKLSILKTPRDQLSPDDLESLDMTRAGARALFTLADSKHNMEQMRKSGIVPLMAQLLKSCHIDVVIPIMGTVRKCSSEPKFQLAITTEGMIPDIVSHLSSENTELKMEGSTAIYKCAFDGTTRDLVREAGGLEPLVTIIKDKNVRENKPLLRGATGAIWMCAVTDANVKVLDQLRTVNHLVALLNDECDEVLTNVTGAISECVRFQSNREQLRQAGGLPAMVSLLNSSHAPLLENLAKGLKECAEDPDSMRILEDLDAVRLIWSLLKNPTTRVQAHAAYAICPCVRNANDSAELVRSLVGAMELVVGLLKSKDIMVLSAVCAAIATIAQDQTNLAILTDLKVIYKLADLVQTTDDLLRMNLAAAVAACACFGNNTEELGRLRTVTPIVTYMTSDNPLVHRSTAMALEKLSMDPQNCITMHQSGVVPFLLECIGSTNKELQLAAAGCLRNIRELALRAEEYLLKIDDD

SEQ ID NO: 10699 - DNA, 2360 bp, DROSOPHILA
ccatctcccacttcccagaaaatcgaatttgatttttgatccctgcaggcaaagtgcacccaatactagcgaaattttttaaagcgcattatgcaaaacgtctaatatacaaaaatcggaataaaaatcgatatatatctaaatacatatatatattaattgaataccaattattgttgttgtctcatataaaacgcaaaagcattaaaagcaaaaaaacaaaaatgggaaaaatgaaagcaaatttaaaatatatttccaaaatatatagaacataactatgaaaacataaaaaccgttttttctttaagcaaccaaatttgttgtcaactggaaacttttagctttgattggcacttgacacacattattgcattttgggtttgactgattgtacgatatgaaccctgcaatgttccagttatcaataaatggtgtcgaagttaatggacataactaactcaaagaaaattcccaccataaattactcaacgggaagtgttcaagtgaatcataaactgtgcttagatttcaccaacgatagaaacccactcaatgacaactcgcgccatccatttgcattaatgatttgcacaaatcccacccaaaaaaaggagattggtcactgcccacactagtagcaggtcgccttgaaagacggtgaaattctcacgtatttcttatcaaccacaatgcagacagattgtggaaataactgaaataaaacagcaaatagtaattgcccgtcgagggggaaatgggggagaacaggtacaaggcaagtacaagcgatctaggcgattgtttgaactattgataaatgttaaacataagcaagggtcgccccttggcacgcgtccagtgtttccgagtccgtccaacggttaacagctcctaaaattatcgaatcaagagcgcgacttattaaacgcaaattaacagcagccattaaaagacattcgcgaacagcggaaagcaattaggaaatcaaatcagcaatatgtcacagttgtacgaactctcggaggtggcccagcagaacggcaagaatggcaaaccctgctggctgatcatcaaggggaacgtgtacgatgtaaccaagttcctcggcgagcatcctggcggcagtgaagcactactcgaatatggcggcaaggatgccaccaaggccttcaagcaggcaggccattcctccgacgcagaaaaggatctaaagaactacaaaatcggagaaatcaactcagctgcacccattcaagtgcagccaacgtccaatggtgcagcaaagccgacggcaaacacaatatccgaagatcccgaacccgcgaagaatagctcctccggtttctgttgctgctagtcataggtttacatgtcatttgattgatttattaacataggatgaggtcgtagttagtttatcatagttaaattgtaaatagttctaggtttatctcataatagctacatcttcatgtccacaaagctatcttaaaaaagatcaactcttcttaaacgatctgaataaattgcaaacaaagccggcggagctgctccaccaatttcaaaaaaattaaactaaatccaaacgatgcctaatctttcggttcggcctccatggttggctcgctgctgggggcagccgattggaacgtactgcatgcagtgtcaaagtaatccgtcgtgaaactggtcacgtttaccgtgtggttgcgcagatagtgatagaatctactcgacttccgttccagtcctgcccgttccttttcgctgcggcatatggagcgcagggcgggctcgaagtccagcgatttggcggagtcggaacggagaactccgttgcccaggtgctggcaaattgaaaacctggaaagattacagaaagttataaaaaatgaaaaaattaaagcataactaaaataagtttggtatctaattagtgaaaagtctgggcactaatttaatgaataggtgtgttcctaagatagttataagatcggtcatttttatgacaaggctattagaattccgaacgctaaagatatcttgtgactagttgttattatgactgctggatgataacaaaaccccggtttcctttttccatcgattactgccatgacagctaattaagttagcattattaagccttaaaatgtgtttaaagcaaaatagatatagatacagatagatattgttaataaagatcttttgatattaaagtgtttatatattggcttagttaaagagtaactcatcattttgaaaatcttacctctgaaccggcttatcaaatagattgtaggggcactccttggtcgcgagtccagtttggagagcctgctccaccagcaggtgac

SEQ ID NO: 10700 - DNA, 360 bp, DROSOPHILA
atgtcacagttgtacgaactctcggaggtggcccagcagaacggcaagaatggcaaaccctgctggctgatcatcaaggggaacgtgtacgatgtaaccaagttcctcggcgagcatcctggcggcagtgaagcactactcgaatatggcggcaaggatgccaccaaggccttcaagcaggcaggccattcctccgacgcagaaaaggatctaaagaactacaaaatcggagaaatcaactcagctgcacccattcaagtgcagccaacgtccaatggtgcagcaaagccgacggcaaacacaatatccgaagatcccgaacccgcgaagaatagctcctccggtttctgttgctgctag

SEQ ID NO: 10701 - protein, 119 aa, DROSOPHILA
MSQLYELSEVAQQNGKNGKPCWLIIKGNVYDVTKFLGEHPGGSEALLEYGGKDATKAFKQAGHSSDAEKDLKNYKIGEINSAAPIQVQPTSNGAAKPTANTISEDPEPAKNSSSGFCCC

SEQ ID NO: 10702 - DNA, 3765 bp, DROSOPHILA
gcaatgggtccgcattaatatggccattaatatggccctgttgtcgtaaccggaggcactatttgatgttaagtacgtgagaattgaccttacactgcaacattacatactagagctttaaatttcaaaaatgagcagataagaaacaaaaaagagatatcagaatttaataaaaggtttgcgaaacaaaaacccacaagtgggattgttgaaatttgtttatatagatactttaggataaataaaaatgtaattaaataatatttaaattatttaactcatttattatgtatatatttttttattatttatatacataagtttattctaaatatatgatttaccagtgtattttttgatacactactgatggcacgggccattgtcggtagagtgaggaattgtgtaaactgaaagatcgtttatgccattatcagttaaaaactgcacgtggcgatggtggggatcaagaaaattttggggaattccaagaccatttgccatttgtttgctgagattaaaacataatctgtttttggtgtatgagaacaattgaattagaggtcaaattttgtagctgataatcgctgtaatagggtgtttaaccggtcgactggatgccccgttgactgcataacagggcgttatctttcagtgctaatgccgtccgatttgctttagttttcgattagaattaaaataaatgcagatgagatcgggacatgcgactgcagtttgctccgggccggatttctcgatttctcgccgagatgtggcgaaggcgacgaatcgaaatggaaatggaaactaattaagtgacaagtgcaccttatctgatcggaacacacatcgatatggtcacagttgactggaatcatatatatatatatatatacatataaggcaatgtgtttgtcgcgcgagcccctccctctggaagctataaaaacaattgtgatttggcttccggcattcagttctcgttgagtttgtgtccaggatgggacgagttccggcaaagatgcacacgctcctcgcgctcctcctccagcttctggtggcctccatccacgctatcgagtggtcgcttccggatgtgatcaattccatcggaaatgtgggcaccagcatcgtggatcccagtcttctgcccacaccccaaggactcctcgaaggcagcaagcagctcatcgcgggatatccattcgagttcgtctccaactccctgaacgtcatttgtgagtatttatttaagttctagaaaacacataatttttaaatgcagaatttttagattaataaacattacctattaaataaacaattttatatagtcattctaaaacaaattatcttaaaaaattaaaactgcttaaaataaattacttcaaaaatattttcaggctcccaggcgctggcttcaaacaaaatcaagtcgaaatactcgccggatatcaataaaatgaacttccaactgcaaacggcgtgtgaaaagaaaaacttcccacttacaagtccggagtccatgtggaagagtccgcttttcgatgtcaagaagaaggtcgtcattctggccaccggatggaccaccaccgtgaatggttccgataccatcgaagtcttctcaaaggcctataattgccgtggggatgtcaactttgtggtaagtacaatctatattaattaaggttgaaatatgccacttaaaccaataaatcaataaataagtatagaggaaacaagtttgtcacagaaacatttattgttattaagttttcctactgataaggttcagatcagattaaatacactcacaagcaggttcaactcgttagctccggatttaatgtaaatgttttacatatttttttttcacattgcgcattcaaattaatgctaatattaaaaccacgggctttaaagttctcattatactttgaatatcctaacacctactggcataatacacagcttatgcatatatgtacatatatctagggtaatttgttaaaaatatgtcattacaggcggtggatgctgctcgtttcgttgataccctgtacacctggtcggctttcaatacggaggagattggcgagaacatcgccctcggattggtgaagcttctcgatctggtgccggtggagaatatccacttgattggccatagcctgggcgcccacattgtgggttcggcgggacggcacctgcaacacctgaccaatcagacgatacccaggattactggattggatccggccaagccgtgcttcaacgagggtgaagccctctctggtctgatgcgcggagatgcccacttcgtcgatgtgatccatagcaatcccggggtgctgggcaagcgggatccggtgggcgatgtggacttctatccgggcggaatgagcccccttgcggcgggctgtttctcggtaacctgtgcccatgcccgatcctgggaatattttgcggaaaccgttttcccaggcaatgagcgcaacttcatggccactcgctgcaattcgatatccaaactgcgcgatttccgctgtccgggcgacgaggtgcccatgggatatgcggtgccgcaaaacattaagggcaactatttcctggaggtcagcgcctccgcaccgttcggcatgcatgcctccgttgtgcgatcggcccacttggagcattgcggcctgtgtcccgagtccacgagcaccactgaggtgccgagcaccacaaccacggggaagccgggttcctggttctcaggataaggggcatatcctccaaatcaccattcccataatctatcctaagctagcaataagccttgttttttttttttggctcaaaccgattgcggtcgataagcaatacacaacttgccttctaagcgttgacatttcaattaaatttgtgtttactgtgcttatgcaaagcccaaacggaaaaggcagcaggctcacgaacttggaataccctacatatgtgataacgaaggataatggtaaaaggcataagcatacttaaataaatatgaataaaccaacccatattgcttagtcttaaattatttgctttaaatcgttcaacaattttaatttagcactacaaagatggtaatcactaatagttacattgtgtggaatgcattatcttatattatccgcttaatagaacagggttcattttaaaagtgttcacacatgtactgtaataattgattcctatttcggcgcgtggacaaggtaataatgtacgaacacattattgtcacaaattactaggtaaattataatactccgtggaagaaaaccgaaagataaataacttgtggaaaagaggccgcggtgtcgccattgccccaagctcatgattgttgactgttgactggagttgttttattttttgttggccattatccgagtggcgcccaggtacagtgggaaaattgcactgtcagtgcaattggatgtcatctggtttgtgtttgtgtccagatgagttttatagcgatctgaggtcagccgccttagttggtgaatgttgtcggggaagtgatgatttcatctctcgctaatatcgatgatacatggaattctagagcactttaatggcctagatgtcctagatggaattgcatatctatagctgaaaagttaactaccgacctcaatggcagcctatgatctagaaacttgttgtttatagcccaagttataatttaaatacacatatcaaccatcacgtagacattgaatgtggttttgttcg

SEQ ID NO: 10703 - DNA, 1236 bp, DROSOPHILA
atgggacgagttccggcaaagatgcacacgctcctcgcgctcctcctccagcttctggtggcctccatccacgctatcgagtggtcgcttccggatgtgatcaattccatcggaaatgtgggcaccagcatcgtggatcccagtcttctgcccacaccccaaggactcctcgaaggcagcaagcagctcatcgcgggatatccattcgagttcgtctccaactccctgaacgtcatttgctcccaggcgctggcttcaaacaaaatcaagtcgaaatactcgccggatatcaataaaatgaacttccaactgcaaacggcgtgtgaaaagaaaaacttcccacttacaagtccggagtccatgtggaagagtccgcttttcgatgtcaagaagaaggtcgtcattctggccaccggatggaccaccaccgtgaatggttccgataccatcgaagtcttctcaaaggcctataattgccgtggggatgtcaactttgtggcggtggatgctgctcgtttcgttgataccctgtacacctggtcggctttcaatacggaggagattggcgagaacatcgccctcggattggtgaagcttctcgatctggtgccggtggagaatatccacttgattggccatagcctgggcgcccacattgtgggttcggcgggacggcacctgcaacacctgaccaatcagacgatacccaggattactggattggatccggccaagccgtgcttcaacgagggtgaagccctctctggtctgatgcgcggagatgcccacttcgtcgatgtgatccatagcaatcccggggtgctgggcaagcgggatccggtgggcgatgtggacttctatccgggcggaatgagcccccttgcggcgggctgtttctcggtaacctgtgcccatgcccgatcctgggaatattttgcggaaaccgttttcccaggcaatgagcgcaacttcatggccactcgctgcaattcgatatccaaactgcgcgatttccgctgtccgggcgacgaggtgcccatgggatatgcggtgccgcaaaacattaagggcaactatttcctggaggtcagcgcctccgcaccgttcggcatgcatgcctccgttgtgcgatcggcccacttggagcattgcggcctgtgtcccgagtccacgagcaccactgaggtgccgagcaccacaaccacggggaagccgggttcctggttctcaggataa

SEQ ID NO: 10704 - protein, 411 aa, DROSOPHILA
MGRVPAKMHTLLALLLQLLVASIHAIEWSLPDVINSIGNVGTSIVDPSLLPTPQGLLEGSKQLIAGYPFEFVSNSLNVICSQALASNKIKSKYSPDINKMNFQLQTACEKKNFPLTSPESMWKSPLFDVKKKVVILATGWTTTVNGSDTIEVFSKAYNCRGDVNFVAVDAARFVDTLYTWSAFNTEEIGENIALGLVKLLDLVPVENIHLIGHSLGAHIVGSAGRHLQHLTNQTIPRITGLDPAKPCFNEGEALSGLMRGDAHFVDVIHSNPGVLGKRDPVGDVDFYPGGMSPLAAGCFSVTCAHARSWEYFAETVFPGNERNFMATRCNSISKLRDFRCPGDEVPMGYAVPQNIKGNYFLEVSASAPFGMHASVVRSAHLEHCGLCPESTSTTEVPSTTTTGKPGSWFSG

SEQ ID NO: 10705 - DNA, 5975 bp, DROSOPHILA
gtgtgggtgtgtgtggctgcctgtatgtgtgtgtgtgtgtgttgggcgtgcaagtctgtgcttttggctttttttttttggggttgtaggtgtgccggtcgattgccaaagcgcataaaactatagatagcgggagcgcagaagtgcatcaaattattatgtttaaaacaattttacaaaatttcgctcttattagccttaactcgacgtcttttcgcatcttcatctccctaggtttttgattctacttcattagcgtttcggttttacaatgtaattgtatcaatttggtagccaatcgggttttggaattttcgcctcgacttacaggacttgggcgggacaggaaacgcttcctacacacgctcattgttctcgtattataattgattcgacagttgcttttagctttctaaattattttgttttttcttatttttgcatttgctttcttatacgttttggtgttttcagtgattgtttgtttgttttgtttctttatgtttgcggttgttgtgtttggcttccgtgcgctgtagaagtcttgcaatttcaaaaaatttactagtttccttttgttttaattgtattttataatttcctagttgttgtttgttgttgttggtgttttcggtctgtgagagatgtgctacaggatgggccgctcgtgcacatggcataaggatgtggttggatgtgtgaattgtggggcgaaaatcgcttggagcgacaaagaaagccgcgcgtttactcaaaagtttgatgagaatacggatgcggatgctgatgcaggtgcatattcagatgcggatgcgggtgtggttaaggtgagtgcttcatgttgcgtgttgtgtctgtatatgtgtaactgttgcttgatgacggctgcccgtaacgtagctcccactcgctacggcgacattaacaagatggggccgcctgttccccccgccttccagctcgccaccttcccgtgcgccattccccagctggcggtgtctcactgtggctgatgctgctgcatcacgatctgatactgttgttgattctgctgcggatgctgcggcgtcggcggcgggaaatagtgattggctaagagcgattgggggtgcacgcacatcagctggtaagtggctgcctgtgtgggcggcgtgaacgccggttgtggtcccccgccggcgggggatggctgtggcggcggatggaactgctggtgcggctggcccggcgacggtgtggtcgactgtggcgtctgtgtcataaactgcaactgctgcggctggtccgggtacacgcgcatctgcattggcgcgtacgtatgtgattggaattgttgctggtgtggtgcatggccgtactggatgaattgcggtatcgggccggctgttatcaacggctgacccgtggccgcggatgccgatacgtgcatctgcgatgcggccattggagctgcaagggatcagataatatttttagcgcacaatttcgacatgccagttaaatcataattcatcactttcgttcttcttttatactaaaaaaaaataaaatgcttgattataggaagaatggacttacggtaattactacggcgaaggcgcggtggctgtccggcctgtgggtgtgtctgaggcgggaatggatgctgtggctgcatgacgtagatcggctggttggccgccggcggtacatgtcctcccgtggttgtgtaaatgttcgtcatgggcacaggcgtctgtggggtgtgcggtcgtgatggattcggggtgctgggcccgcggggtgtaaatggcttggctgatgggttgagcacatgcttcttaaccaccggagtggttcccgtggcacctccagcagtggcggccgttcctgtaggcaccgttgcggaattgctcgtcggagtgggcgctgccggcgtggttttctcagatccagcgctggcaatcacccctgctgtaggcgtactggctatgccagtaggtgtggtggtgttgctgcttggtggtgccggcgaaacttcaggtttgggcgtggcaagctgctgcgtctgctgttgctgcaccaccggcatgggttgtggcggaggctgctccagcagaaccggcgaagtaacaactacgggtgaagtctgtggcggcggcattgtatggtaaattggcaacggctgttgtgatggatcctggagcagctgtggcggcggctgctgcacttgtggctgcgactggtgctgcttctgcacatgctgatgctgggtctccaccaattgctgctgctgggccttttgttgcatgtgatgcggcacatgttgctgctgtggaagcggcgcctgctgaggctgctgctgaggcacatagtgtggctgtgatagggccgcttgatgcaggtgcgtttgcggcacttggtgcaggaccacgtgctgctgttgttgctgctgctgctgctgctgttgcggtggcgaggcagattgctgcaacgctcgctgttgctgctgctgcacttgatgctgctgctgctgctgctgctgctgctgttgctgctggggcggtgaagtgttgctcggggccagttggaagtcctggccaaactgtcgcagttcctgcatttggttatcgcgcgtgcgcacctgacgcgctggttgcgtgttttgcccttgtggctgtatgttctgatgctgctgttgctgcggcggctgttgttgttgctgctgctgctgctgttgctgctgttgctgctgttgctgctgtgggccggcggtctgcagcggcggcgagttgctattttgcccgggatggcctccatgggagccgtgcacgggcttacccagcgactggggttcaccgccatagttcagtgacgagttgctctgagagccctggtactggcgcatctggcgctgtggcagcggcttgttggtattggcgttcgaatcgccatttagcttatttgcgccgcccatgtgagattggttgcggtactgagaagacctgtaaacttactaatgttaatatttggttaatatttaatgacagttttgatttacccatgcataatttgcgagttaccctggtaggagtattgactcggcatgcccatcgacggctggtagccgcccttgttctggcccacagaattgccgttgccgccctgcgacacggagacgttgctgccacctgtaggcacattgttgcgcatcaccttaccgccctggggcaccgtcttgcgctttaccatcgaaccgccgctatacttgctggacgagtccgcggacgcgtttgctgagggggccggacccacgcccttcaggccgccggctagcataagtgctgccgtcgactgcgtggagccgccttggcccgacccgccgccactttgcatcatcatgctgccatcgccacgagtgtcacgatcgcgtccgctgccctgcgaggacatgccaacatgcgatagctgcggtccggtgatactgcgcgtctgttttgttatgtagcggtcgctactcatggtctccctcaactggaagtcaccagcgccacggggcttgttaccgcgatcacgatcacggtccctgtcccgctcctcgcgctccctatctcgatcgttgcgttcgcggtcgccacgatctccgcgttgatcctgctcggtcgatggacgctccacggccgcgaagagcgcctcctcatcaccattttccaagtccagacggtcccggcacgtcggattattttcgatctcggcagccagcttttcggccttggcttcggcctctttgaattctagggaatcacccttatctagcggtaccgtgtacgaagctagagaatcatcaaatgtggaggtcacaccgaacgtgttctcatttttgcggaacatctcgttgggatcccagccgttggcggcactatccaattctatgtcaatgtcgccattagcgccagaatcccatggttccaattccttctcgtccggacgcgcacctacaaaatgaagactaatgaataagtgttcgcaaattaaattagaaaggagcttaccgttgcacttgtcagaaatggcgccatccgtctgaaaagcgcctgcggtggcgtattgcgagtcaaagtccttggccacgatggtcaccacagtgtcggccgggaatataatgtgttttggcaccttgccctcctccggcagattcttggacttaatgcacgccggtagctccagtgcgatgtcaaagttgcccgagaatgtgcggaatacgccctcgtagatattgcccgaccgcaggcgcacctccacaacgctgcccaccagcgccgtggccgagtgcatgaaaaacgtgttgttgtagacgccctgcgccgacggacgcactgctgcgcctccgttcccgcctcctgcaccagccttgttgttagtgggccttaggctgttatcgttggagttgtatctgcgaatagtcagaagagacaggttaaaccattcgttagcgttgcggttggaaggcagtggtccgactgaaaatggaaattcgatttcattcagctacggtggcgatatcgattcgttcgccaactctgacctgacccagcattccgcaacccctgtgaacagccgtgccagttttgctttgtgtttgtgcacttgagctcatcttatttagtacgagcaagagatactatatggatgtttagacaaagaattttcggggagtccccaggttgcgaagttaaggcgaagacgggaaatcagtgtcaaagctatagtcattaatttatgatttcagttgcgtgccccagtcgagcaatttataatggtcaaatttgaatacattggttttgaataatgtaggatagccacttaagtcaatcaacgtgaattattatatgtcattagtgaaatgatgagctctacaacacgatatcctttaaagagcatagggatatatacccgtatttaaaacttttaagaacaatttaggagacacggtcatattcattccgcgacagtaatcagccaaatgtgccccctttggccagctccgccccggtcggaactcgtattcgcgtttcggggtgttttggcattggttgcgtgcggccaggatcgacgaccgtgaaatgcgcaacgcaacgcacaatgaacccgcggcggcagtggatgtgattgtgggtgtgggacagggcggcgtttcggccgggggctgaggcgatggcactggcactggctgaacgaaaccaattggagaagggtggcgcttgagcagtagctgattcacggagcgtgcactgtgcacattttggtgaatgaaaacaaataattgattgcgcccaagagtgaatcatgcgtgaggtgaggtgaggtgcaggcaggcaggcaagcgagctggcgagcagttggggaaacgaatccgggaaataggctgcgacggaggcaaacttaaaatgcaagtgtgcatggccgagtggcgaataaatatgcatagacgtcaggcggaaaacaagagcgaggtggcatatcgttcgttcggtcagcaaattgtaaagtgacccaaatttcggacccacgttggaggctctcgggcctgctcaggggctttcggggggttgctgcgggcgtttagaaggggttcgaagtgtgccaaagaacgatacgaaactcagcgcagccgccgcacgtcacagcaactgaaaacgtataactaaaaactgaatacggcaagcggcaaacagcaaacgcaaagctgcaaaatgctgacaatgcaagaaattgcattcgaagaaggcgagcgacgagagtaaaaaaaaaaaatataatgcactacgtgatacgtgagcgagtgtgccatgcatcaccgtgggcactacgggcacgggccgcacagtgggcctgattcgccctgagcgccatcccaggcccactgtgcccacaagcttgaggttgtgatgtggtattgtgttgatgccgtacacaatgaataatgaacacgcatt

SEQ ID NO: 10706 - DNA, 3210 bp, DROSOPHILA
atgaccgtgtctcctaaattatacaactccaacgataacagcctaaggcccactaacaacaaggctggtgcaggaggcgggaacggaggcgcagcagtgcgtccgtcggcgcagggcgtctacaacaacacgtttttcatgcactcggccacggcgctggtgggcagcgttgtggaggtgcgcctgcggtcgggcaatatctacgagggcgtattccgcacattctcgggcaactttgacatcgcactggagctaccggcgtgcattaagtccaagaatctgccggaggagggcaaggtgccaaaacacattatattcccggccgacactgtggtgaccatcgtggccaaggactttgactcgcaatacgccaccgcaggcgcttttcagacggatggcgccatttctgacaagtgcaacggtgcgcgtccggacgagaaggaattggaaccatgggattctggcgctaatggcgacattgacatagaattggatagtgccgccaacggctgggatcccaacgagatgttccgcaaaaatgagaacacgttcggtgtgacctccacatttgatgattctctagcttcgtacacggtaccgctagataagggtgattccctagaattcaaagaggccgaagccaaggccgaaaagctggctgccgagatcgaaaataatccgacgtgccgggaccgtctggacttggaaaatggtgatgaggaggcgctcttcgcggccgtggagcgtccatcgaccgagcaggatcaacgcggagatcgtggcgaccgcgaacgcaacgatcgagatagggagcgcgaggagcgggacagggaccgtgatcgtgatcgcggtaacaagccccgtggcgctggtgacttccagttgagggagaccatgagtagcgaccgctacataacaaaacagacgcgcagtatcaccggaccgcagctatcgcatgttggcatgtcctcgcagggcagcggacgcgatcgtgacactcgtggcgatggcagcatgatgatgcaaagtggcggcgggtcgggccaaggcggctccacgcagtcgacggcagcacttatgctagccggcggcctgaagggcgtgggtccggccccctcagcaaacgcgtccgcggactcgtccagcaagtatagcggcggttcgatggtaaagcgcaagacggtgccccagggcggtaaggtgatgcgcaacaatgtgcctacaggtggcagcaacgtctccgtgtcgcagggcggcaacggcaattctgtgggccagaacaagggcggctaccagccgtcgatgggcatgccgagtcaatactcctaccagggtaactcgcaaattatgcatgggtcttctcagtaccgcaaccaatctcacatgggcggcgcaaataagctaaatggcgattcgaacgccaataccaacaagccgctgccacagcgccagatgcgccagtaccagggctctcagagcaactcgtcactgaactatggcggtgaaccccagtcgctgggtaagcccgtgcacggctcccatggaggccatcccgggcaaaatagcaactcgccgccgctgcagaccgccggcccacagcagcaacagcagcaacagcagcaacagcagcagcagcagcaacaacaacagccgccgcagcaacagcagcatcagaacatacagccacaagggcaaaacacgcaaccagcgcgtcaggtgcgcacgcgcgataaccaaatgcaggaactgcgacagtttggccaggacttccaactggccccgagcaacacttcaccgccccagcagcaacagcagcagcagcagcagcagcagcagcatcaagtgcagcagcagcaacagcgagcgttgcagcaatctgcctcgccaccgcaacagcagcagcagcagcagcaacaacagcagcacgtggtcctgcaccaagtgccgcaaacgcacctgcatcaagcggccctatcacagccacactatgtgcctcagcagcagcctcagcaggcgccgcttccacagcagcaacatgtgccgcatcacatgcaacaaaaggcccagcagcagcaattggtggagacccagcatcagcatgtgcagaagcagcaccagtcgcagccacaagtgcagcagccgccgccacagctgctccaggatccatcacaacagccgttgccaatttaccatacaatgccgccgccacagacttcacccgtagttgttacttcgccggttctgctggagcagcctccgccacaacccatgccggtggtgcagcaacagcagacgcagcagcttgccacgcccaaacctgaagtttcgccggcaccaccaagcagcaacaccaccacacctactggcatagccagtacgcctacagcaggggtgattgccagcgctggatctgagaaaaccacgccggcagcgcccactccgacgagcaattccgcaacggtgcctacaggaacggccgccactgctggaggtgccacgggaaccactccggtggttaagaagcatgtgctcaacccatcagccaagccatttacaccccgcgggcccagcaccccgaatccatcacgaccgcacaccccacagacgcctgtgcccatgacgaacatttacacaaccacgggaggacatgtaccgccggcggccaaccagccgatctacgtcatgcagccacagcatccattcccgcctcagacacacccacaggccggacagccaccgcgccttcgccgtagtaattaccctccaatggccgcatcgcagatgcacgtatcggcatccgcggccacgggtcagccgttgataacagccggcccgataccgcaattcatccagtacggccatgcaccacaccagcaacaattccaatcacatacgtacgcgccaatgcagatgcgcgtgtacccggaccagccgcagcagttgcagtttatgacacagacgccacagtcgaccacaccgtcgccgggccagccgcaccagcagttccatccgccgccacagccatcccccgccggcgggggaccacaaccggcgttcacgccgcccacacaggcagccacttaccagctgatgtgcgtgcacccccaatcgctcttagccaatcactatttcccgccgccgacgccgcagcatccgcagcagaatcaacaacagtatcagatcgtgatgcagcagcatcagccacagtga

SEQ ID NO: 10707 - protein, 1069 aa, DROSOPHILA
MTVSPKLYNSNDNSLRPTNNKAGAGGGNGGAAVRPSAQGVYNNTFFMHSATALVGSVVEVRLRSGNIYEGVFRTFSGNFDIALELPACIKSKNLPEEGKVPKHIIFPADTVVTIVAKDFDSQYATAGAFQTDGAISDKCNGARPDEKELEPWDSGANGDIDIELDSAANGWDPNEMFRKNENTFGVTSTFDDSLASYTVPLDKGDSLEFKEAEAKAEKLAAEIENNPTCRDRLDLENGDEEALFAAVERPSTEQDQRGDRGDRERNDRDREREERDRDRDRDRGNKPRGAGDFQLRETMSSDRYITKQTRSITGPQLSHVGMSSQGSGRDRDTRGDGSMMMQSGGGSGQGGSTQSTAALMLAGGLKGVGPAPSANASADSSSKYSGGSMVKRKTVPQGGKVMRNNVPTGGSNVSVSQGGNGNSVGQNKGGYQPSMGMPSQYSYQGNSQIMHGSSQYRNQSHMGGANKLNGDSNANTNKPLPQRQMRQYQGSQSNSSLNYGGEPQSLGKPVHGSHGGHPGQNSNSPPLQTAGPQQQQQQQQQQQQQQQQQQPPQQQQHQNIQPQGQNTQPARQVRTRDNQMQELRQFGQDFQLAPSNTSPPQQQQQQQQQQQQHQVQQQQQRALQQSASPPQQQQQQQQQQQHVVLHQVPQTHLHQAALSQPHYVPQQQPQQAPLPQQQHVPHHMQQKAQQQQLVETQHQHVQKQHQSQPQVQQPPPQLLQDPSQQPLPIYHTMPPPQTSPVVVTSPVLLEQPPPQPMPVVQQQQTQQLATPKPEVSPAPPSSNTTTPTGIASTPTAGVIASAGSEKTTPAAPTPTSNSATVPTGTAATAGGATGTTPVVKKHVLNPSAKPFTPRGPSTPNPSRPHTPQTPVPMTNIYTTTGGHVPPAANQPIYVMQPQHPFPPQTHPQAGQPPRLRRSNYPPMAASQMHVSASAATGQPLITAGPIPQFIQYGHAPHQQQFQSHTYAPMQMRVYPDQPQQLQFMTQTPQSTTPSPGQPHQQFHPPPQPSPAGGGPQPAFTPPTQAATYQLMCVHPQSLLANHYFPPPTPQHPQQNQQQYQIVMQQHQPQ

SEQ ID NO: 10708 - DNA, 3399 bp, DROSOPHILA
caatagggagcaactgcgtcaggctggaggattaccagcaatggtttccctactcaacagttctcacgcccctcttctggaaaatttagccaagggattgaaggagtgtgccgaagatccggacagcatgagaatccttgaggatctggatgcggtcaggctgatatggtcgctattgaagaaccccacaactagggttcaggcccatgcggcttacgccatatgtccctgtgttcgaaatgccaacgattccgctgaattggtcaggagcttggttggcgccatggaactggtggtgggtctgctaaagtccaaggatatcatggtcttatccgccgtttgtgctgccattgcaacaattgcccaggatcaaaccaatctagccatcttaaccgatctgaaagtcatctacaagctagccgatctcgtccagaccaccgacgacctccttcgaatgaacttggcagctgccgtggccgcctgtgcctgcttcggtaataatacggaggaactgggacgtctgcgtactgtcactccgattgtcacctacatgaccagcgacaatcccttggtgcaccgcagcacggccatggcactggagaagctatcgatggatccgcagaactgcattaccatgcaccaggtacatttcttctacctaatcacacttagcaactcatttagattcttttattttacttcagagtggagttgttcctttcctgctggagtgcattggatccactaacaaggagctccagttggccgccgctggttgtctgcgcaatatccgcgaattggccttgcgtgccgaggaatatctgcttaaaatcgacgatgactagcttcctgtttttttttctttgttaagttatttaattgtatttgacgaaatatatgtgtgtatgccgatgctaccaatttcttgcatttttagcaaataaattaataagttagtaaatttttaaaccagaaatcccagaaaaatatgtttcattttccatgacaataacatctagctatataattatatatttgtcgctacatattttgactaactaagctcgacccaccctgcataaaattccactctagtaactggcattactgcccctggtggaaatgctcatccgtcgctccacgcgattcgtgtgtggcagcaggcatcccggcggtggataccgccatctacgtggtcgggacaacagggtgccgtccgtcgaagctctactacggaagggagcatcgatgtcgctgcgtgagctgctcaaactgctactcgtaatctcatccgtagactccgtatggtcaccgttgctctcctccaaacaggcgcttccgatgaccagaaaggaatgtcgaccgacgcccaaagacgaggcatcgtagaaggaacaggatcccgaatcgggcgtgaggattccatccgtattggccacatcgctggtggagcgcttgagcttggggaatttgctgaagactcgccagaagcgaaacacatcgcgaaaaacattctgcacctggttggaatgagtgaataaacaaatcgtatatttataaggtgccatgtgatggtaaatggaagattaatttatcagacaaaagtttaatttcacttcaccttaataaagaaatcttttgtaagaaaatttttcctcttacttgatccacgctctctctgacggaaatctcgtgaaaacaggagcaggataactccctgaatcggcgctgaccctcttccaagctgaccattcgatcgcccggctgatctgtcttattgcccaccagtatgacaggaatatccagtgcgtattcctggaaatatggtatataaataagcttcctataggtggttcaaaattaagtaatttactaactttactggccgagcccaacttgcgtcttcgtttattgtaattgatgaggaactttaggcgactgcactcgtcgaaggaacacttgtccgtaatggagtacattagtataaatgcgtcggcccagcggatgttggactccagactaactccatctagttcctacatgaaatggtctttaatgtcttgcaaaatgaaaaatgcaatttaaaacccacttgtagctgaccggtggcgtccagaatgtcaaactgaatctgctccttgtccagcgtggtttggcaggtgtaaatcttctccagattaggatcatactcgccaatgaagcgtcgggtaataaaacgcaccaccatggctaaatgggaaagtcccttcagtttgggttcccttttctgggagttgggcgcacaactcacccgtttttcccacaccactttggcccaggaccataaccttcagagtcttttgtttattggtatgcagacccaacttgaccagcgatgactttggcgaggtggcattcatggcagataacaggggcaattgtctgaaaaatataataggaaactttagtaagtgagaagtggtgaactttttaataagacttacacatacccatcttttaaatctattatactaatgataatgtttacaattttgcagaaccttgtttctgtttattgagtttattaatatatgctttaaaaattagagttaagcgaagttttagccaaaactactatccattttatagctccattccagggtataggcatctcctgaccctttggagtgggtctgggtgttaaggtctcgtatttccgagacaatatgtctgttaggaatgagtgacacgacctttgttgcccccagattccttatgctgttgtggctagctctagttttcttttacccgcatcaaaatatctagacacttgggaatgggtctaagccacggcgttttctaattttggccagcgatttccaggcaaattgcatacctttgtcgcataaagatacagaaagacagcccgttttccaaccacacttaaacattaaaaaactaaacaagttaacaaaatagcagaataatttcagatccaaagagaatattactgaatagggagttatgaactttgtttctacgaaaagaatctaaaggttttgtaaagtgctgcattttcaaaacccagcaggaacactaaacaaaagatgctcgacttgtgtgtgttttttttttgtttttttgttatggccacccattgacttgcacatacatacatgtgtgggtgggcatatgggtgttggtgtgtttgtgcttttgataaggtcaacaatgtcagactaccgacaactatgaaacatttattggacactttttgcgttgtcctccagcagaagcagtcgcagacacagacgaaatgggcaaaggcaggagaccgcggtgtccttgggcattgtcatggtcattattataaatgataaggacacgccccgtcagccgattagggcaggatgtcaaagg

SEQ ID NO: 10709 - DNA, 1078 bp, DROSOPHILA
atgaatgccacctcgccaaagtcatcgctggtcaagttgggtctgcataccaataaacaaaagactctgaaggttatggtcctgggccaaagtggtgtgggaaaaacggccatggtggtgcgttttattacccgacgcttcattggcgagtatgatcctaatctggagaagatttacacctgccaaaccacgctggacaaggagcagattcagtttgacattctggacgccaccggtcagctacaagaactagatggagttagtctggagtccaacatccgctgggccgacgcatttatactaatgtactccattacggacaagtgttccttcgacgagtgcagtcgcctaaagttcctcatcaattacaataaacgaagacgcaagttgggctcggccagtaaagaatacgcactggatattcctgtcatactggtgggcaataagacagatcagccgggcgatcgaatggtcagcttggaagagggtcagcgccgattcagggagttatcctgctcctgttttcacgagatttccgtcagagagagcgtggatcaagtgcagaatgtttttcgcgatgtgtttcgcttctggcgagtcttcagcaaattccccaagctcaagcgctccaccagcgatgtggccaatacggatggaatcctcacgcccgattcgggatcctgttccttctacgatgcctcgtctttgggcgtcggtcgacattcctttctggtcatcggaagcgcctgtttggaggagagcaacggtgaccatacggagtctacggatgagattacgagtagcagtttgagcagctcacgcagcgacatcgatgctcccttccgtagtagagcttcgacggacggcaccctgttgtcccgaccacgtagatggcggtatccaccgccgggatgcctgctgccacacacgaatcgcgtggagcgacggatgagcatttccaccaggggcagtaatgccagttactagagtggaattttatgcagggtgggtcgagcttagttagtcaaaatatgtagcgacaaatatataattatatagctagatgttattgtcatgg

SEQ ID NO: 10710 - protein, 328 aa, DROSOPHILA
MNATSPKSSLVKLGLHTNKQKTLKVMVLGQSGVGKTAMVVRFITRRFIGEYDPNLEKIYTCQTTLDKEQIQFDILDATGQLQELDGVSLESNIRWADAFILMYSITDKCSFDECSRLKFLINYNKRRRKLGSASKEYALDIPVILVGNKTDQPGDRMVSLEEGQRRFRELSCSCFHEISVRESVDQVQNVFRDVFRFWRVFSKFPKLKRSTSDVANTDGILTPDSGSCSFYDASSLGVGRHSFLVIGSACLEESNGDHTESTDEITSSSLSSSRSDIDAPFRSRASTDGTLLSRPRRWRYPPPGCLLPHTNRVERRMSISTRGSNASY

SEQ ID NO: 10711 - DNA, 2477 bp, DROSOPHILA
tcctggtggactcgcagtggtcgttgtgggtgcaatgtgctcacttgtaagacaatttacatcggtcatttttgtgggtctcttttgctgttttctttttgggtttaggcttaatgcattttgctgagtgtgtgcgtgtgtttgtgtatggtgtggtattcttttgtaagatctaagtacttaagcaattgatatatctacagataatacgaaagccaaactcaaaagatcgcaaatgaagatcgggggcaaaagcaaaaacatgacaacaatacaataataatgagatctaccttcgcagcgacttttcgtttttcgtatttgttacactcccgcacacgcacacacactgccgcgatcgaactggtgtcccgttgatcgcgatcctctttctaacggtacttgggcctcaatatgttattactttccggtgtctactttatgcgttaaatatcattttatacaagtttgcttaaggtataaattgttagcacaatgtgctggggggaaaaaaggcgcgaagaaacggtgttggtaaacagtggaggggtaactatttccagcactgatcggccaggcagaaattaatttgttgcactctcatttatgctttttaataatttgtttgtaaatttctatttttactttgtgaagtaatgattttatattaataatataattaccaagactaaacggaataattataaggttgtgtattagtagagaacaaaaacagaatgaaatacatttgtaggaatcacctaatatttaattatattttatattatattaattataattatatttgttctttatacaattttatacattgtattttatagttttattaaatattcccgcttaaaaaataaaatgttgtttctatttaaattaccgcagctgttggtggtaatttagatgacctgattcgatttggtattatgggaacttttccagatttggtcacactgccctttacactgttttggttttcgtgaaaatgtccacatactactttgttattgtgggtcaaaatgataatcccatttacgagaaggaattcagcaccgtgaacaaggaactaagggtatgtagacctgggcaacgtctcatagaactgtgtaaatacattctccttctgcagaaagaggaccacaggcacctcacccagtttattgcccatgccgccttggatttggtggatgagcacaaatggaagacggccaatatgcagctgaaatccattgatagattcaatcagtggtttgtttcggccttcatcacagccagccaaatacgattcatcatcgttcatgacaacaaaaacgacgagggaatcaagaacttctttaacgagatgtatgacacgtatatcaaaaactccatgaatgccttctatcgcatcaacacacccattaaatctccgatgtttgagaagaagtcggagatctttggtcggaagtatttgttatcataaatttgttaaaacctgtagccattaagtaattgtgtaatataaaacttgaaataatttaaaagcataactttaccctttcttatacagttgagaagacccgaaaccaatgaataatctagtttatattttatttaatttatttagaaaagcagcctaggcttaacattgatggacttgttttattcactttttactcaatgcgccctcgaatcaaatctaaaacgatttaacgcccgtctccagacgacagtcccagactggagtaaattagatgtgtgggttgaatagatgaacaacgcatggaatcaatttgaaactaaagcaacaaaatatacggaatttgtaatgggtctttgcaaagaaatctcttggtggtggcgaggaaaccgtccgtcctgcagcttagtgcttcttgttctttccagagcgctcatatttgctcttggactggtgccacagagccagaggaatggccagggaaggcagagtcatcacggcgaaggccacccagtcgaagaaatgggaggagaagcgcttgttgtactcgttcaggttgacaattccaccctcaccgggctcagagctgaccgccagttggagctgcaagaattgttgggtattaagttctttgatcgatctttcaacaggtaacgggcatttttaaaagactgttgtgtataaattcacttagttgagattattaaatttaaaagtgaatgattttggtttgctttggcggtggcttctgtaacactgagattagataagatttttcagggcggacactgagatttgatgcccccacattcagctataacttaccgtctccgactcctcgacagccttgtaggacacctcggcggcggtgaagttgaagtagccgaaggccttgggcctcaccaccaggacatgggtgaagttggtctggggagcgatcctatcgaccacggcggtgggctgtcctccgacaacgtcgaaggcctccgggtggaagccggag

SEQ ID NO: 10712 - DNA, 477 bp, DROSOPHILA
atgtccacatactactttgttattgtgggtcaaaatgataatcccatttacgagaaggaattcagcaccgtgaacaaggaactaagggtatgtagacctgggcaacgtctcatagaactgtgtaaatacattctccttctgcagaaagaggaccacaggcacctcacccagtttattgcccatgccgccttggatttggtggatgagcacaaatggaagacggccaatatgcagctgaaatccattgatagattcaatcagtggtttgtttcggccttcatcacagccagccaaatacgattcatcatcgttcatgacaacaaaaacgacgagggaatcaagaacttctttaacgagatgtatgacacgtatatcaaaaactccatgaatgccttctatcgcatcaacacacccattaaatctccgatgtttgagaagaagtcggagatctttggtcggaagtatttgttatcataa

SEQ ID NO: 10713 - protein, 158 aa, DROSOPHILA
MSTYYFVIVGQNDNPIYEKEFSTVNKELRVCRPGQRLIELCKYILLLQKEDHRHLTQFIAHAALDLVDEHKWKTANMQLKSIDRFNQWFVSAFITASQIRFIIVHDNKNDEGIKNFFNEMYDTYIKNSMNAFYRINTPIKSPMFEKKSEIFGRKYLLS

SEQ ID NO: 10714 - DNA, 4152 bp, DROSOPHILA
tcatgatatttgttggcatccggcctgcgccctccgcttcctctgtgtggctgtaaatatgctggagaacataattcatctggcaaaagataatgccgcacagctgtaaaatgtggcattatggactcatatggccaaccactgccccctcgcctatctcccaaaagtcgcatttacagacaatgactgctggcggctttaaagtctcattattatttcgctcatgcaattgaatttcatggaacatgctcggaagcatcaacaatgcgatggaaaaaccaatctgaccagtttgttattaagaaattttatgcgcgagatgaggcgtttattctgtcaagaaatctcacgttgctagcacaataataaagtaattcagcaaattgtctccgtttaattgcctttaagcaaatcgagagatgagcagaggcatcaatcatgaaagtaagcaatgttgaattcttggtaagaggaaataaaactatagttacaaactggttattggattgatgtgcagttgagactttataatattatgttactaagaagatagggtagcttggcattcggatgccttgatacttaaataaagattcaagttcattcgttcaatacttgaatacttttgggatacacataactttacacactgcttgttcgctgaaaagttgaccgcaaatcccccggctaattccagattcggagtgactcagtgaactataactggcatggagtacgtgattagaatgccggagaaacaaacactgtcccaaacatggccttatccaacttatccaactggaagcacgcaaacaaggcggccgcaaaagtttagcttacgctttgttttttatcatttgtgatgctatttttgagttgctcattatttttattttactccccgctgttatttatcgccaagctgagcaagtagccggcctcgcttttgagcaggggatccgattgtaatgtcagccagagctcagttcccagttgacagtcgagcgaggcgaaatgcaatctcagctgaagcggaacactttgttgctactgctactttcggtggtgatcttggccagctgcaagtctggcggggatgcgcacgttcgcgtgaagcggatagtgggtggcaagcagtcgaaggcgccgcccgtcgatgatcccgtgatcttcgcgagactctttgatcgcgatgcgcgagtggagggattccggaatcccagcacgggcatctactcctttctgggaatgcactacgcggagccacctgttggtccactgagatactccagaccggtgtacaaaaggctggctggtgacttcaatgccaccaaacatggcccaccttgtatacagccgcatccgcagtttcctcagaggattatcggcgatgaggattgcctgctgctgaacgtctacaccccgcaaatgccggatgagaccacagggctgccagtgttcgtttggattcacccgggtggctatcgatatggatcggcggcccagtacgatgccacgcctatggcccaaaggggcgcaatcgtggtggctcctcagtatcgcctgggatcactgggaataatgggggatggcaccaagcagttcgatggaaacctggccatgttcgacttggccgccgctctccgttgggtcaccgattacatctcctatttcgggggcaatcccaagcaggtccaggccataggccacggatccggagcagccagtgccatgtatctatcgatgtcgccgacgtcgcgaagcgctggcgatgttcacggagtggtggccatgtcgggaaccgctctctctcagtatgccatggacaaggaacccgttcagagcgtccaggaagtggccaaaatcaatggctgtcccacaggaaacgagctggaaatcgtcaattgcttaaggagtgtaagtttatatagtatagtattccacgcaaatgtttatatggtgatctaagatagaaattatttgttttctacgtgtagaaaagtgctgaggacataatcaagaacgatgataaagttcaaacggagcgtttggcaggacgtgccctggtcaaaggactaactggaaacgtgggcttccagcctcacatcgagagcgaggacgatggtagagcattgcccagtttgatagttggagaaccggagcagcagctcaagagcagtaacttctcggggattcccctgctgactggagtcaccaagcacgagacagcaaattccgtcactgtggaaacgatagaaaaggtctttggatcggcggagcagttcctgggatcactaagtgattctctgaacaagctgacgagttttctgaaaatcgacaagctaaccggtcagatcgccaaaccggaactgccgggcctcacgagtgtcctgactcccactctccaggacgtttggaaggtgccgcaggcgctgaatgtggatcaagtactttccaaggtggtggaatcaacgaccgacgtgctgttcaaccttccggctgttctgaccacccaggtttggtccaggctagctccagcctttatgtacagcttcgagtacaatggcaccaagtcgaagggaataaacttcctgaagggtctaccaattgtctcggaaacagcccatgataaaccggaaacggtgggtcatggtgatgagatcggctacatgttcgatgcaaatgacatattcgggaatcccatggaggagactcgtttgaccagcgccgaggatctcaaagtgcgcaacaacctcatcgatctgttggtcaagtttgccaataaggacaaggaagagggcggaaagagttccattttccagagtgttacgggaaaagccacgccttttattaagatagataccaaactgcagacctccaatgatttccgcttctgcgaattgtccgttctgggcgcttccctctctccgctaagttccaccagctgtgcgggattgggtaacttgctaggtcaacttggaagcctgggaggcggattgggaggcaccctgggaggagtgggcagcaccttgggattgggtggcaatgggggaggtggtaaacggggtggtctcggtcttggaattttgtaggtatagtgttacctctatcacattgttgtgtacttaaggaataataaatgtgaatattgtaatccataatctatatgcatgatgcactagtcatacaacttgtcagagtgcaaggctaatcatttattcatgtgccgcataagcgctcgtaaagtttccctttcatttcgagttcagattggataaatccggcgggttctattgatttaagctgtagccatgactggtcgctcaattagcagagctctgtgccggctcaatgccagccgcactaatcttcctattgactttggttggcccctccaaaaacaccgaacccctggcacgccacccatggcatcccagagccacaactgaaaagcggcgataagcaaatttccggcgcgcaaaatttaaacaaagagagagaaatttgttagatgaatggatggccgggtgcggaggagcgagcatctgggggtctggatggaagttggggccaggcaggcagttttataacttgtggccagatcttagcccgggagccttctgcataatgttgatgatggttggcactggcaacagtgcaaacaatgggcataagccccagccgacgatgatgaggaatgggctggctggtaatgggggcagggtatccgagttgccttgacgcctttgtgcaaattcccggcaagcgttgaactatgaccaaaaatgccaaagccaagccagagccaaagtcgaaagccgaaaccaaagccggcttatggcgtcggagttccagccttcttctcgaccagctccattgcccactccacagtggggttttgctgccaagtgacgatattattaatattattaaaactaatttcatgaatttgaatcattatcaacacagatgaaagagcagttgaggctgactgtcttttgaagccactgaggaaaggagatgatgaatctgcaggtcttcaagaattttgttaaatgtaatttcaatgactattcctattcctagaataataacatacaacttctgcaagagtttaagcccattcttgggcagttgcaattgcgaaacttt

SEQ ID NO: 10715 - DNA, 2072 bp, DROSOPHILA
tcgagcgaggcgaaatgcaatctcagctgaagcggaacactttgttgctactgctactttcggtggtgatcttggccagctgcaagtctggcggggatgcgcacgttcgcgtgaagcggatagtgggtggcaagcagtcgaaggcgccgcccgtcgatgatcccgtgatcttcgcgagactctttgatcgcgatgcgcgagtggagggattccggaatcccagcacgggcatctactcctttctgggaatgcactacgcggagccacctgttggtccactgagatactccagaccggtgtacaaaaggctggctggtgacttcaatgccaccaaacatggcccaccttgtatacagccgcatccgcagtttcctcagaggattatcggcgatgaggattgcctgctgctgaacgtctacaccccgcaaatgccggatgagaccacagggctgccagtgttcgtttggattcacccgggtggctatcgatatggatcggcggcccagtacgatgccacgcctatggcccaaaggggcgcaatcgtggtggctcctcagtatcgcctgggatcactgggaataatgggggatggcaccaagcagttcgatggaaacctggccatgttcgacttggccgccgctctccgttgggtcaccgattacatctcctatttcgggggcaatcccaagcaggtccaggccataggccacggatccggagcagccagtgccatgtatctatcgatgtcgccgacgtcgcgaagcgctggcgatgttcacggagtggtggccatgtcgggaaccgctctctctcagtatgccatggacaaggaacccgttcagagcgtccaggaagtggccaaaatcaatggctgtcccacaggaaacgagctggaaatcgtcaattgcttaaggagtaaaagtgctgaggacataatcaagaacgatgataaagttcaaacggagcgtttggcaggacgtgccctggtcaaaggactaactggaaacgtgggcttccagcctcacatcgagagcgaggacgatggtagagcattgcccagtttgatagttggagaaccggagcagcagctcaagagcagtaacttctcggggattcccctgctgactggagtcaccaagcacgagacagcaaattccgtcactgtggaaacgatagaaaaggtctttggatcggcggagcagttcctgggatcactaagtgattctctgaacaagctgacgagttttctgaaaatcgacaagctaaccggtcagatcgccaaaccggaactgccgggcctcacgagtgtcctgactcccactctccaggacgtttggaaggtgccgcaggcgctgaatgtggatcaagtactttccaaggtggtggaatcaacgaccgacgtgctgttcaaccttccggctgttctgaccacccaggtttggtccaggctagctccagcctttatgtacagcttcgagtacaatggcaccaagtcgaagggaataaacttcctgaagggtctaccaattgtctcggaaacagcccatgataaaccggaaacggtgggtcatggtgatgagatcggctacatgttcgatgcaaatgacatattcgggaatcccatggaggagactcgtttgaccagcgccgaggatctcaaagtgcgcaacaacctcatcgatctgttggtcaagtttgccaataaggacaaggaagagggcggaaagagttccattttccagagtgttacgggaaaagccacgccttttattaagatagataccaaactgcagacctccaatgatttccgcttctgcgaattgtccgttctgggcgcttccctctctccgctaagttccaccagctgtgcgggattgggtaacttgctaggtcaacttggaagcctgggaggcggattgggaggcaccctgggaggagtgggcagcaccttgggattgggtggcaatgggggaggtggtaaacggggtggtctcggtcttggaattttgtaggtatagtgttacctctatcacattgttgtgtacttaaggaataataaatgtgaatattgt

SEQ ID NO: 10716 - protein, 665 aa, DROSOPHILA
MQSQLKRNTLLLLLLSVVILASCKSGGDAHVRVKRIVGGKQSKAPPVDDPVIFARLFDRDARVEGFRNPSTGIYSFLGMHYAEPPVGPLRYSRPVYKRLAGDFNATKHGPPCIQPHPQFPQRIIGDEDCLLLNVYTPQMPDETTGLPVFVWIHPGGYRYGSAAQYDATPMAQRGAIVVAPQYRLGSLGIMGDGTKQFDGNLAMFDLAAALRWVTDYISYFGGNPKQVQAIGHGSGAASAMYLSMSPTSRSAGDVHGVVAMSGTALSQYAMDKEPVQSVQEVAKINGCPTGNELEIVNCLRSKSAEDIIKNDDKVQTERLAGRALVKGLTGNVGFQPHIESEDDGRALPSLIVGEPEQQLKSSNFSGIPLLTGVTKHETANSVTVETIEKVFGSAEQFLGSLSDSLNKLTSFLKIDKLTGQIAKPELPGLTSVLTPTLQDVWKVPQALNVDQVLSKVVESTTDVLFNLPAVLTTQVWSRLAPAFMYSFEYNGTKSKGINFLKGLPIVSETAHDKPETVGHGDEIGYMFDANDIFGNPMEETRLTSAEDLKVRNNLIDLLVKFANKDKEEGGKSSIFQSVTGKATPFIKIDTKLQTSNDFRFCELSVLGASLSPLSSTSCAGLGNLLGQLGSLGGGLGGTLGGVGSTLGLGGNGGGGKRGGLGLGIL

SEQ ID NO: 10717 - DNA, 3951 bp, DROSOPHILA
ttgcaaactggccccaatcttattgcagtaccaacatttcctcttctccgcggcggctgcctcctcgcggatatcgcgaagcagaaatcccaggattccactgctatctccgccgcgctgcggcaaatgcgttgagagtagctggtggattggatcaggaagtttacattagcgggagttctcttcatttcacaacaatcgcacttaccaggcaaaaatagtgcacctgcaaattgcgtacaatcatccattcgccaaagaccaggtcgtcagtgtccgaatatttgcatattaagcattgcagctccttgttatcttccatttgtaagctggccgctcagactagttttgctggacagatcaactcgtttgagtgctattatgaataatttttaaaactatcaacatgttttgcattccttttttactctattggcgggcaaggattttgaaaaacaataaatacaacagcgccttattatacttcaattccaccaagcacatttttggaaaagctctgtttccactgagcaacactcacaatgatctaatctgcttaactagctatattttgcgttaaccctacttataataaaattatttatttatgtgtaataataaattttaacgtattaaaaacttaacacaatataaacaaatattttgtgattaataattaaatagcatgataaccggaaacataactgtgcgtggtccgtaggttttattagatatgatatgccattatgaaaatcataagactatacatttataaagcgatttctgagattcaagattcaaatgctcgtttgtatgtttataaaatgtggtgcgtgcatatgcatacataatgctgcgacacatcacacgaaataccttcagtatttttaatagcaaaataatatacaataatacgcaaaaactatatctaacaattaagattctattttcatttcatcgattccactattccgcagcattcctaaacttggcgtcgctatctagacgagctttccaacaacaaagttcagtatatttaatgttaaacaaaataacacagttttgttaattgattgtgaatcacgtatctccattcaccttccccagtccgagaatcggattgtttataaccgcattatcatcgagtgcgttaaatagggcgtaggcgtaccatcggactggatccaccttaaataatatggctgccgagataaaaccagctcagcggaccaacaatgatcgctttaacacctccaaaaagccggaattgctgagtaagctggagggcagcagcgacgatgtgaacgcagcgatcctaattccgggcgaaaacggcgtaattagcgtttccgatgacaagtgcgtagctgtagcccattaaaaatatacacaaatggtatgcctgacattttcatgttttccccaatagaaccgttcgcgtttggctaaaacgcgattctggtcaatattggcctagcatttgccagtatatgccttccggctgcacggccatcgagtacgtttcggaatcccggcacctgtacgtcggccaggaaaacggaacggtcacccagtacgcgctatccgaagactgcaatcgcctgtccttcctgcgggattacttgtcccatcaagcgcgggtcatggccgtggtcttctcgaaaacccacaagtggatactctccgccggcaaagataagcagttcgcctatcattgcacggagagcggcaaacgggtgggcggatacaactttgagacaccatgcacggctctccagtaagtatgataaatggatggtgaaagggggaagggggtgcgacagtggatatgggataagcgggtcatttaattggattaaactgctttctttgacacggcaataaactgcaattcttcacggctatggaattcatttagaatttgagaaccttctattgttaatgacgtgtcaactgagtcattttatctacacaaaattttggcataaatgtgtgcactgtgcgaaatattctataagcaacatataattaattataatctgcgtttaggttcgacgctttggccaagtatgcctttgtgggcgatcatgctggacagataacaatgctaaggtgcgatgttcagggagtgcaactaattaccactttcaatggacattcgggtaaacaagttacaaatgatatttagtaagctaattatatacgaattggttaatttttagcggaaatccggtgcctcaaatgggtggaaggccctcagctcttgtttagcggagcttgcgatcagtccgtgctagtttgggatgttggtggcaaacgtggcaccatttacgagctgcagggacataggtatctccaatcttaaataatattcataaaataagatagtaatcggcacttctgattatgtagcaacaaagtttccgccctgtcgtacgcgaatcacacgcaacaactgataagctgtggcgaagattcagtagtggttttttgggaaatgaatgcaatgcggaaagaggttcctggctgggtggataccaacaactgtcagctttgctccaggcccttcttctggaacttccgctcaatgatggatcaaaagcagctgggtgagataaatagcttacacttgagttactctttgttttacaagtaatttctgactgtcaggaatacgacagcatcattgtcgccactgcggcaaagccgtgtgcgacaactgttccaccaatcgcattaacatacccataatgggcttcgagtttgatgtgcgtacctgtgatccgtgctacaaacaacttcagacagtcgagcgcccctcgctggcttcattcaatgacgccaagcattcgatcgtctacatggacctggacgaggacagaaagcgcctgttgacagtgggccaggacaggctcatcaagatctgggatctctccaacatctgggcataaaacatcctgtacgcacacgcacgtaccaaaggtataatcattcacgaggcgtttcggtcttaactggaacacccaattaacgaacgatgtggctggcaacgaccaaatccagtccctgctgcttaggttctcatataattgatgtaaagcaataatcattgtatgtacgtatgcttacattcaacacataaatacacgaatccatcgattaagtggtgttttctaaatgagtttttattagattgtactttatacttaatagccacccctgcccggtggtggtgctccacggatcatgctgggcggcggtccgcgcatcggtggcggagcaccgcgtcccatgtttcctggcatcgagggcatgccgccgggaatcatgcccggtggcggtgcacccatcatcggtgctcgtggcactcctcgtcccatcggagccatgtgctgttgggcgggtccgcccacacctctcacgggaccctggagacccgctggcacggcggacaagttgataggcattccgcgtccggccacgcgaccgattcccggaccaggagctgctcccggaatgggaactcggggcaggccctcctctggcggcggtggtccctccaccgtcagtgaaactatgttctcgccgcgcagcaatacaaagcccagcacgcgcttctcctcgcgctcgggcaccttggaattcttcgagcgaatcttccggaactcctcgcagtcgccgaggatcaagttcatgtgtttgtcgaaggctttgaaggtaccgatgaaggtacgcgagtcctgcagcacgattcgcacccgataattcaggtgctgaatcattttgttgttcttgccgatcgtctgaaataaaggaattcaaaggatttaattgtgaaatacaatagcatgcataaaagtcgcgccatcttttgtaaaccatttcgaccctttaaaaaagccggtatttataaaaattttaataaaccacagagtttgaaatagcaaatct

SEQ ID NO: 10718 - DNA, 1425 bp, DROSOPHILA
tctagacgagctttccaacaacaaagttcagtatatttaatgttaaacaaaataacacagttttgttaattgattgtgaatcacgtatctccattcaccttccccagtccgagaatcggattgtttataaccgcattatcatcgagtgcgttaaatagggcgtaggcgtaccatcggactggatccaccttaaataatatggctgccgagataaaaccagctcagcggaccaacaatgatcgctttaacacctccaaaaagccggaattgctgagtaagctggagggcagcagcgacgatgtgaacgcagcgatcctaattccgggcgaaaacggcgtaattagcgtttccgatgacaaaaccgttcgcgtttggctaaaacgcgattctggtcaatattggcctagcatttgccagtatatgccttccggctgcacggccatcgagtacgtttcggaatcccggcacctgtacgtcggccaggaaaacggaacggtcacccagtacgcgctatccgaagactgcaatcgcctgtccttcctgcgggattacttgtcccatcaagcgcgggtcatggccgtggtcttctcgaaaacccacaagtggatactctccgccggcaaagataagcagttcgcctatcattgcacggagagcggcaaacgggtgggcggatacaactttgagacaccatgcacggctctccagttcgacgctttggccaagtatgcctttgtgggcgatcatgctggacagataacaatgctaaggtgcgatgttcagggagtgcaactaattaccactttcaatggacattcggcggaaatccggtgcctcaaatgggtggaaggccctcagctcttgtttagcggagcttgcgatcagtccgtgctagtttgggatgttggtggcaaacgtggcaccatttacgagctgcagggacatagcaacaaagtttccgccctgtcgtacgcgaatcacacgcaacaactgataagctgtggcgaagattcagtagtggttttttgggaaatgaatgcaatgcggaaagaggttcctggctgggtggataccaacaactgtcagctttgctccaggcccttcttctggaacttccgctcaatgatggatcaaaagcagctgggaatacgacagcatcattgtcgccactgcggcaaagccgtgtgcgacaactgttccaccaatcgcattaacatacccataatgggcttcgagtttgatgtgcgtacctgtgatccgtgctacaaacaacttcagacagtcgagcgcccctcgctggcttcattcaatgacgccaagcattcgatcgtctacatggacctggacgaggacagaaagcgcctgttgacagtgggccaggacaggctcatcaagatctgggatctctccaacatctgggcataa

SEQ ID NO: 10719 - protein, 408 aa, DROSOPHILA
MAAEIKPAQRTNNDRFNTSKKPELLSKLEGSSDDVNAAILIPGENGVISVSDDKTVRVWLKRDSGQYWPSICQYMPSGCTAIEYVSESRHLYVGQENGTVTQYALSEDCNRLSFLRDYLSHQARVMAVVFSKTHKWILSAGKDKQFAYHCTESGKRVGGYNFETPCTALQFDALAKYAFVGDHAGQITMLRCDVQGVQLITTFNGHSAEIRCLKWVEGPQLLFSGACDQSVLVWDVGGKRGTIYELQGHSNKVSALSYANHTQQLISCGEDSVVVFWEMNAMRKEVPGWVDTNNCQLCSRPFFWNFRSMMDQKQLGIRQHHCRHCGKAVCDNCSTNRINIPIMGFEFDVRTCDPCYKQLQTVERPSLASFNDAKHSIVYMDLDEDRKRLLTVGQDRLIKIWDLSNIWA

SEQ ID NO: 10720 - DNA, 2603 bp, DROSOPHILA
tttgagaaaaggctgcccaagtacagggagttaattgccacggccaaggaaaaggggcgtcaactggtggccagcagggaacaagattttcgtgactcacaaaacctgctcattaaacaagaaaacgctaataagaatttcaaaggatgggttccaaagccatttattattaaaacggagtccctgtttgtgcaagaacagcgagtgtacaaaatggagccccaggatgtacaagaattttcacctggtacggagccgctggatgaccaaacttatgatagcgattaaagtgtgtagaattctaccacggaaatgaaaaaaaatgaaaatgcaaattattataattattattcataaagaattgttattagcctaaaatatgattctaattacgagctaccgacattctcatagtttaattatacctgtattactagatgcgttgaaaagtatggaacaggcagaaggaagcgattgcgatcatatacatttgtctatacatttttgatcaggatcaatagccgagtcgatctggccatgtccgtctgtattgatctcattttgccacgcccacacttttgaaaaatgcttagatttttcttcgtgcaaaaaaaaacactagccacgcgcctccttttgctacaatacgcccaaaacggtcacgactattttattccccagtatctatcgatatcccagaaaaatgatgaaatgttccctttggcattcccactagctgagtaacgggtatctgatagtcggggaactcgactataccattttctattgtttttaaattcaaaataaaacagtcaagcaccaaggtgccacctctcggttgacattgcaactacgcagagctaaggtgaccagtcgtcttgcaatctggcagccctataacagaagtgttccaaagtgtcacgctatcgcgtgctaaccaacactaatctgttgcttcgcattaaaaatttttgcttgacttgacaggttcgtagaaaagtcgcagaagaaaaagctgttccgtcggaattaaggcagccactatgtcgtatcaactgtaccgcaacaccacgctcggcaacaccctgcaggagagcctcgacgagctgattcaggtgagttcgcgctggcgaagtgaaacgcattgtaattttgggcttccatattgcagtacggccagattacgcccggactggctttcaaggttctgctgcaattcgacaagagcatcaacaatgccctaaaccagcgggtcaaggcccgcgtcaccttcaaggctggaaaactaaacacctaccgcttctgcgacaatgtctggactctcatgcttaacgatgtggagttccgcgaagtgcacgagatcgtcaaggtggacaaggtgaagatcgtggcctgcgacggcaagagcggcgagttctgaacaccaccgacccgatctgaacacccaatgtaaccccactaaacacaccatgtaaccccacaaaacacaccattataaccattacaaatagctgtaagattcgtaggcgataagctgggttggaaaacgaaaaccgaccgtgcgatgcagcaggcattgcaagaaatacactgttaattcacagttcaccgagtcgagtatgtttgttatgtattccgttaaaaaaaagggagttcttggaaacatgaggtgggtatgcaaataattgcgttacaaaaatctgtagggcacaaaagggttctttaatgccattaccaaatagtaatgcaaaatatgtgtacgtgtgaaaacatttatttattatttgctaataattgtagttcatttagtttgagcactttacagagctctgttagtcagctaatggtgagtgacctcgctagatagcagtgatatgttattttggtattttttagtcacactttttggtgtagccatttcgagtgggctcgctagcctcgcgacctgcagtcacacttgctccaacgaacaaaaaccaccgcccgcataaccacgcatcgttatttgttgttgtctacgccgtttaatcgctgacaattaacaacaaaacaataacaggaacggcaggcactgccttcactttaagagaagcccgcgaatcgaaactgccaggcgatcgaagtcgaggcgattttaaatcgaaaacgcgcgcgagatgcggaaaagccaaacgccgcgagctttgtttatgtgtatcggaaaataacataagaaaatcccttagattctttgtgcggatgagccagtgcgaaagcaatatcaataatatcccaagcagattgctgaataaatcgcattcgagaggtaaaaatgcaaaacgaagtgtgattttgaagagtgtgcctagtgtgtgctgcgaagtgactaagcgccgcaaagaaagtggaaaagcggaaaagcggagctagcggtggttggggaggcgagaagtgggcaagggaaaaatctaaagtgcatttatattgcgtgctaatctccgccgttttccactgcagaaacgtgaatataattacggcgaaagcggatcaatttttcgtgcagtcaacgagaaaagaaaaaaaaaaattgaaaataaaaccttgcgttggcgtcgcagcagcag

SEQ ID NO: 10721 - DNA, 547 bp, DROSOPHILA
tcgcagaagaaaaagctgttccgtcggaattaaggcagccactatgtcgtatcaactgtaccgcaacaccacgctcggcaacaccctgcaggagagcctcgacgagctgattcagtacggccagattacgcccggactggctttcaaggttctgctgcaattcgacaagagcatcaacaatgccctaaaccagcgggtcaaggcccgcgtcaccttcaaggctggaaaactaaacacctaccgcttctgcgacaatgtctggactctcatgcttaacgatgtggagttccgcgaagtgcacgagatcgtcaaggtggacaaggtgaagatcgtggcctgcgacggcaagagcggcgagttctgaacaccaccgacccgatctgaacacccaatgtaaccccactaaacacaccatgtaaccccacaaaacacaccattataaccattacaaatagctgtaagattcgtaggcgataagctgggttggaaaacgaaaaccgaccgtgcgatgcagcaggcattgcaagaaatacactgttaattcaca

SEQ ID NO: 10722 - protein, 106 aa, DROSOPHILA
MSYQLYRNTTLGNTLQESLDELIQYGQITPGLAFKVLLQFDKSINNALNQRVKARVTFKAGKLNTYRFCDNVWTLMLNDVEFREVHEIVKVDKVKIVACDGKSGEF

SEQ ID NO: 10723 - DNA, 4489 bp, DROSOPHILA
cggcagtatattaataccaacaccatagtattttcgtcggttatgaacacaacacaactaaatttttttgtgaaattcataaagcttaatttgtttttttatcaccagtgaatatatttagtaataatgaacgaaatagtttcaaattaaaaccgttagaagccgctatggtgtagctgtgtgcagtgctacataaaaaggaattatgtttataataacaaaaattaaaaaaaaaaacgttttaacgtaaacgtatacacttaaatcttttcgaaattaaattatattaaaatcggtttcaaattgttttctataaagtttaatttagctttaaacaaaaaattaagtcgttatttttaatttgcattcatatattatttaataaaaatttaaattgcatgcaaaagaagtaaggaagcctgaaattttaattatttctgaaattttaattatttctgaatagcgcacaactactcgtggagattcggcaactccgctccccagcgtctgttaagccgctgttaataagcagcagctgttgtttgaaacaccataaacaaatgtaaacaaaactctttttatgccttttatgactttaactaatgttttgctacgcggttttaaaatagttaggcattttatctgcttttgttcgtacatttggcatacatttcaaatagaacagctgttagccggcacccgggaatgcccttgaatgacattgcaccctacatcaaggttctcggcctctcagttcactaatgcatcatgataaaattacctcaaatcacgataaagaaatgaaattcaaggggacaatagtagataactggattaatgggttcttcagcattttaacgacgcacccccaatactagattaggactgactaatagcacgcactaatgatagaggttatcttgatcgccatgaccgaaccgatttggcttatcagtgggaggcaaatttcgctgtgcacactcaattttcatcgcacgcaaccgcggttaagtcgtccagttggaattcagccagcagccggaaaactccagtgacatgtcgctaacggtggaaattgttgccacaaagccctatgagggtcagaagccaggaaccagtggattgcgcaaaaaggtaaggtcttcaggtggcggaaaagctcgcacttgcattttataacttctgaaatcgtttccgaatctcaggttaaggttttcacccagcccaactacacggagaactttgtccaggccatcttggaggcaaatggagctgctctggctggttccacccttgtagttggtggagatggacgtttctactgcaaggaggctgccgagctaattgtgcggctatccgctgccaatggcgtctccaagttgctggtgggtcaaaacggcatcctgtccacccctgccgtatccagcctgatccgtcacaacaaggctttgggtaagttcaacgcaggcagccttcactgtgctcgtaaagattttaattgataagaagcatctttacacaatcaacgggtggcggctgttcgttgacagaggtccctggggtcgaataataactatggattcaatcggttaacagagagttcgttactcgggcaaccaaatttgaatcgggtaaaattgatttagggactcgtgcaatcgctaatcagactaacctttaataaaattgtatggtgtaattacttaagcgaatttgatatacaaatttgcttttaatatctatcttatactaacaaaagaccatctgtcaagctaacattattatttcgcattatagaagcaatattgcaaaatctctattatcttaataatatgaaatatttaaatctaagcttttgttgtacttactcaaacagtttattcacattaaaggtggcctctttggaatataaaattgttttagatgcctaggcacacccaactaaaaaatatacacgatttaaaaatgcttttttaaaccttataggcggcattgttttgactgcatcccacaatcccggtggtccagagaatgatttcggcatcaagttcaactgcgagaacggaggacctgccccggatgcgttcaccaaccacatctacaagatcaccaccgagatcaaggagtacaagctggtgcgcaacctgcagatcgacatctcaaaggttggtgtaacctcgttcgacatcgccggaaagccctttaccgtggaggtgatcgattcggtggccaactatgtgcgccacatggaggaaatcttcgacttcgccaagctgaaggacttcgtaagtggcaaagccactggaaagcctctgaagatgcgcatcgatgcaatgaacggagtaactggctcatatgtgcgcgagatcttcctgaaccggttgggtgccaccgaatcatcggtggtccacaccactccactgcccgactttggtggtctgcatcctgacccaaatctcacatacgccaaggacctggttgacactgtcgcccagggagactatgacattggagctgccttcgatggagatggtgaccgcaacatgatcattggcagcaaggcgttcttcgtaactcccagcgactcgctggcggtaattgcccactacctggaggccataccgtacttccaaaagaatggtgttcaaggattcgcccgcagtatgccaactgcatccgctgtggatttggtgggcagaaagttgggcaaggaagtgtttgaggttcccactggatggaagtacttcggtaatctcatggacgccggaaggttgtgtctgtgcggagaggagagcttcggaactggctccaatcacatccgcgaaaaggatggcatctgggcggttctcgcttggatctccgtgatgcagcacacgggtaaaggcatcgaagacatcctgaagcagcactggtctgtgtatggacgcaactatttcacccgctacgattatgaggagtgcgcttccgatccttgcaacgagatggtggccaccatggagaagaccataactgctccggagttcgtcggcaagagctattccagcggcggaaaaacctacaaggtcaaggaggccgacaacttcagctacacagatcctgtcgacaagtcggtggccacgaaacagggtctgcgcattgtgttcgaggatggcagccgcattgtggtgcgcctcagtggaactggaagctcgggagcaaccgttcggtgagtcacgatgagatttaatatcaaacaattcttttcaataatagatgaattgttccttttcagcttgtacattgattcctatgagaaggagaatgttttgggccaggccagcgtgatgctgaaacccttgatcgacatcgccctggagatctctcagctgcccaagttcactggacgcaacgctccaacggttatcacgtaaagagttcctgtcagcgaaggaacactgagattaccaacccatccaactacaatctcctcttgtacctcagcgaggcatttccttgttatgtttcggatttattaaagtttgtgtagcccaaacctgttggttagttttcattttagcagtgtggataaatactcgtactcgctaagtattatgttgggaatgcgctgctccagaactccgagtggcaaacgagcaatgcgtataaaggctagaagaaagtgcagggcggtgaccacctcgggacccaggatttctttatccctaataaagaaaagtgtatgtcatctgatattcgtggattatcttgtaactaaagtacttacagtaactgagcctccgatacagtcaccacgtactgactcatgtaggatatatacagcatcttgacattcttgtggaactgctgcaagatcgttactagacccacaataaaaggcacattatcaatgttatctttggctgattttggcaacagacaatcggtaatcgtggaatgctgcatacgacccaaatgggcaatggtgaaaagaaacataaagagggccatgttatgggtgttctttgtgataaggaagacttgctctaggggctcaaagtttcccgtatagagcagggtttcctgcagttctgtcaacatgaccacacccttttcatcacagagatccttgctgagagacagttctagtaaaagggctctgtttgcggaagagattgcaaatatataaatatttttaggatgttatagtttgacttacttgttcagggtgtccgccgtgttctccagcaacttggcatcacatttactgctaaagcttagctctcctgcaatttctctgcggagcagctgcttctgtccaatgcacaaaacccaatccaacagcgtgggccacactttcagccatcgttgggtgtaagcttgataatacttcaaaggctgcttggacacctccggagttgggaagtcccgggcctccaattcccgagtcagtgccgctaacgtatccacccacatacgatccgaggtcaggttacgctgtaaccgttccaag

SEQ ID NO: 10724 - DNA, 1818 bp, DROSOPHILA
accgcggttaagtcgtccagttggaattcagccagcagccggaaaactccagtgacatgtcgctaacggtggaaattgttgccacaaagccctatgagggtcagaagccaggaaccagtggattgcgcaaaaaggttaaggttttcacccagcccaactacacggagaactttgtccaggccatcttggaggcaaatggagctgctctggctggttccacccttgtagttggtggagatggacgtttctactgcaaggaggctgccgagctaattgtgcggctatccgctgccaatggcgtctccaagttgctggtgggtcaaaacggcatcctgtccacccctgccgtatccagcctgatccgtcacaacaaggctttgggcggcattgttttgactgcatcccacaatcccggtggtccagagaatgatttcggcatcaagttcaactgcgagaacggaggacctgccccggatgcgttcaccaaccacatctacaagatcaccaccgagatcaaggagtacaagctggtgcgcaacctgcagatcgacatctcaaaggttggtgtaacctcgttcgacatcgccggaaagccctttaccgtggaggtgatcgattcggtggccaactatgtgcgccacatggaggaaatcttcgacttcgccaagctgaaggacttcgtaagtggcaaagccactggaaagcctctgaagatgcgcatcgatgcaatgaacggagtaactggctcatatgtgcgcgagatcttcctgaaccggttgggtgccaccgaatcatcggtggtccacaccactccactgcccgactttggtggtctgcatcctgacccaaatctcacatacgccaaggacctggttgacactgtcgcccagggagactatgacattggagctgccttcgatggagatggtgaccgcaacatgatcattggcagcaaggcgttcttcgtaactcccagcgactcgctggcggtaattgcccactacctggaggccataccgtacttccaaaagaatggtgttcaaggattcgcccgcagtatgccaactgcatccgctgtggatttggtgggcagaaagttgggcaaggaagtgtttgaggttcccactggatggaagtacttcggtaatctcatggacgccggaaggttgtgtctgtgcggagaggagagcttcggaactggctccaatcacatccgcgaaaaggatggcatctgggcggttctcgcttggatctccgtgatgcagcacacgggtaaaggcatcgaagacatcctgaagcagcactggtctgtgtatggacgcaactatttcacccgctacgattatgaggagtgcgcttccgatccttgcaacgagatggtggccaccatggagaagaccataactgctccggagttcgtcggcaagagctattccagcggcggaaaaacctacaaggtcaaggaggccgacaacttcagctacacagatcctgtcgacaagtcggtggccacgaaacagggtctgcgcattgtgttcgaggatggcagccgcattgtggtgcgcctcagtggaactggaagctcgggagcaaccgttcgcttgtacattgattcctatgagaaggagaatgttttgggccaggccagcgtgatgctgaaacccttgatcgacatcgccctggagatctctcagctgcccaagttcactggacgcaacgctccaacggttatcacgtaaagagttcctgtcagcgaaggaacactgagattaccaacccatccaactacaatctcctcttgtacctcagcgaggcatt

SEQ ID NO: 10725 - protein, 560 aa, DROSOPHILA
MSLTVEIVATKPYEGQKPGTSGLRKKVKVFTQPNYTENFVQAILEANGAALAGSTLVVGGDGRFYCKEAAELIVRLSAANGVSKLLVGQNGILSTPAVSSLIRHNKALGGIVLTASHNPGGPENDFGIKFNCENGGPAPDAFTNHIYKITTEIKEYKLVRNLQIDISKVGVTSFDIAGKPFTVEVIDSVANYVRHMEEIFDFAKLKDFVSGKATGKPLKMRIDAMNGVTGSYVREIFLNRLGATESSVVHTTPLPDFGGLHPDPNLTYAKDLVDTVAQGDYDIGAAFDGDGDRNMIIGSKAFFVTPSDSLAVIAHYLEAIPYFQKNGVQGFARSMPTASAVDLVGRKLGKEVFEVPTGWKYFGNLMDAGRLCLCGEESFGTGSNHIREKDGIWAVLAWISVMQHTGKGIEDILKQHWSVYGRNYFTRYDYEECASDPCNEMVATMEKTITAPEFVGKSYSSGGKTYKVKEADNFSYTDPVDKSVATKQGLRIVFEDGSRIVVRLSGTGSSGATVRLYIDSYEKENVLGQASVMLKPLIDIALEISQLPKFTGRNAPTVIT

SEQ ID NO: 10726 - DNA, 3606 bp, DROSOPHILA
aatatcgagagtaaacagtttggcctggtcaggtctggatttgttttgggtttggtcggtatcggtgtgtgtctgagcatgcttttggagcatgctgcggttcccagacagcgtgattcacttcgactttaaccctctaaaagatacactaacccagatattatcatagctacctgacaaagataatctaatagatattttcttcgattttgattaaaattaaaaatcgacttttttaatattcctatttgtacatttgtaaaatgcatttacttaacaaaactgttgcaaatccttaaatccccttaagctcatgccacaaagtactggctgaggcctaagcttgttaaccccataggcactgcaagatttcccccacattttcccactccaatttccatagatttcgcgtgtcgcgtccatgctgtgcctatttttagagtcactgttgtcgcctaatcaattccactgcatgtaacaaatatttgtgcccccaaatcgcgttgacatcgtggtggaggcatgtcagtagggttagggatagggataggaatagggataaggaggttgggggaatcgtccttaggttacctcctgcagggacacgcttatcggcacgtcaaagggatttggcaaggacaaacgcgagtacataaccagatttgcatgctcattgctaattaacgacgagtcccggcaaagcagagggacgggtgtcactcactgggtagtgggtggaatttatgaatttttggttgctgttttattgccctccaatgtgaactttacgacccggggagaaggaggcaatgcacgcaccgtacacgaaggcaacgcatgatgcactgaatcggcgagtcgttgaatcggcgggcggtgggtggcgtactgcctttgttcaaaagcacaaaaacccggcgacaatttgtttgaggaaatcaccgccgacggatcattataaaactgcagctgccggagaagtagcaagtcaaaccgccttgcagatccatcagggataggtgtcgatagccgctcgagaagttccaagtacccggctaccttaaggtgacttgatcttttgagctgattgtactcgggtgataattacccgctgagaggaaaagtctatgtcagagaatccccccatcgatttgggtttcttatctccagagagtgagaactatcaaacggttataaaaacgagtctcagccagaaaatctcccagttcaaactgatgcactgagacatcaacacgctgataagacaatttcaaacgcggaactaatctcctcacacaattgtttcagtgaaatctatcgtatttttattggcattacttctaaacgcgacaaggagttatcgggaaattgtgaaaatgcctgagaaacaagtggcacctgtaattagtaatctcgaggattttgcgaataatttacctgggtaagtcggagttatgtgataattagcgacggaagtgtgaccttgtccatgtcatgtaacgagcaaattactgataagcaattcgcttaatttcatcaactcactgcttaattctctcatagtctctcatataacatagaaagttttgtgacctgcgattaatccttcacaacctttcaggtatctaatttctgaaagtccagttgccgtactcctggactacgatggcaccctagctcccattgcggataatccagcgaagaccaaaatgcccgtggaactggaggccatactgcacaagatagccaagcatcccaaagtttttctcgctgtgatctcgggtcgcggactgaaagatgtgcaaaaacaagtaaatatcgatggcattacatatgctggtaatcatggactggaaatcgagtatcccgatggctccaggcacgattacgagctacccacggagatccagaaaaactacacacaaatggttagggagctcaaggagaaggtggagaagaatggagcctgggtggaggataagaaggtgtcactcacctaccactacagagatacgcccgcagccctgaaggatcagcaaaagcagttggcttcggagatctgcacaaagttcggattccgtgcgaatcaggcccatgaagccatcgaagctaagcccccagtgaattggaacaagggagaggctgccgtgtatattctgaagcagaaattcggggataattggtcgcagaaagtgagtgtggtctttgcgggcgatgacaccaccgatgaagatgccatgagagtgagttcaaatgttacttttttaaaaacctatatttttttatatatttaacatgaaaccttttaggtgcttcgaggcttgggtcgctcgtttagaatttctgctgatgcccagattcaaacttatgcggatttccggttgcccaagcaggctgtaatgaccgatcttctcaaatggatagccaatgtgtatgtttcttagatgtaatcgaatttataaaatctaaaaagtttgttgatttgttacatacatataatataatttgaaattctgtttttgcataagcaatattgaaatttaatataaaatgtatatgtatttgattagttagtggcattagaataaattatatgcttttaatctactcatgattttttcactcgaataatgcaaatcgaaataaaactctaaccaaccttcattgaccggcaaataaatatttgttgacttcaagataatcgaatacaaattcgttcattaatcttaaagcaagcacaacattcattcttcgtttgaagatcaaaagaaaataaataaatcttcgaatggaaatcttttgcgaacagaacattgataccatggaaatgattcttccgttgcagaaaaatgtcgaaatttaaatgtttcaacttgttaaaataatccttagaaagtccgataaacttagataccccaaagtgtgtcatataaaaagaaacacttccaaaagacaaacaatctcaaacaaaggtgcatgaaagacatcatcaaaatatatatgcgcactatatactcacctcccttcagcgacacaaaccgaaatttgcggctatatagatagacatttgtgtgtgtattttttctcattatatatagaagtcttatatacagtcgaagatccattatagaatgtgcttttttatgcgcatatgcctcataaatattgtgggaattacttggccaacgtacggggccagagttgccaccaaccatttggagagaggccaaagcagaaagagaacgagatgtgggatcgcggatacttatagatcgcaggcgatatatggctgctgggcatagctggtcattagtattaaatcggtcgaggaacgtccagcacggcgcgcaatatccgttagatacaaaataatctgaaacagagatacacatagaaaatggctgagcagaagaaggcaccattgctgaagaaggaggaggactacgtgaaggccctcgaggggtgagtttcgaaggatcggtggcgaaggaaccttaaggatctaaagtgcattgttccctcgatagattcattaaccccgaaaccgatcaggtggccctgttgctggattacgatggcaccctggccccgctcaccgaggagctg

SEQ ID NO: 10727 - DNA, 1117 bp, DROSOPHILA
gcagatccatcagggataggtgtcgatagccgctcgagaagttccaagtacccggctaccttaagtgaaatctatcgtatttttattggcattacttctaaacgcgacaaggagttatcgggaaattgtgaaaatgcctgagaaacaagtggcacctgtaattagtaatctcgaggattttgcgaataatttacctgggtatctaatttctgaaagtccagttgccgtactcctggactacgatggcaccctagctcccattgcggataatccagcgaagaccaaaatgcccgtggaactggaggccatactgcacaagatagccaagcatcccaaagtttttctcgctgtgatctcgggtcgcggactgaaagatgtgcaaaaacaagtaaatatcgatggcattacatatgctggtaatcatggactggaaatcgagtatcccgatggctccaggcacgattacgagctacccacggagatccagaaaaactacacacaaatggttagggagctcaaggagaaggtggagaagaatggagcctgggtggaggataagaaggtgtcactcacctaccactacagagatacgcccgcagccctgaaggatcagcaaaagcagttggcttcggagatctgcacaaagttcggattccgtgcgaatcaggcccatgaagccatcgaagctaagcccccagtgaattggaacaagggagaggctgccgtgtatattctgaagcagaaattcggggataattggtcgcagaaagtgagtgtggtctttgcgggcgatgacaccaccgatgaagatgccatgagagtgcttcgaggcttgggtcgctcgtttagaatttctgctgatgcccagattcaaacttatgcggatttccggttgcccaagcaggctgtaatgaccgatcttctcaaatggatagccaatgtgtatgtttcttagatgtaatcgaatttataaaatctaaaaagtttgttgatttgttacatacatataatataatttgaaattctgtttttgcataagcaatattgaaatttaatataaaatgtatatgtatttgattagttagtggcattagaataaattatatgcttttaatct

SEQ ID NO: 10728 - protein, 273 aa, DROSOPHILA
MPEKQVAPVISNLEDFANNLPGYLISESPVAVLLDYDGTLAPIADNPAKTKMPVELEAILHKIAKHPKVFLAVISGRGLKDVQKQVNIDGITYAGNHGLEIEYPDGSRHDYELPTEIQKNYTQMVRELKEKVEKNGAWVEDKKVSLTYHYRDTPAALKDQQKQLASEICTKFGFRANQAHEAIEAKPPVNWNKGEAAVYILKQKFGDNWSQKVSVVFAGDDTTDEDAMRVLRGLGRSFRISADAQIQTYADFRLPKQAVMTDLLKWIANVYVS

SEQ ID NO: 10729 - DNA, 2821 bp, DROSOPHILA
ggtcaacaaaacggcacggaccggcggactggactcagtgccatatagaatcaggttagccattgtggttgcttaactaattgccttctagctggttgaattgagattcgtagcagacagtgtgccatccacaactgactcaaggcagtctaaataatttaaatttctttcaaacgcgataagattagatattaaacttagtttcttgataattaccacaaagacgtcataatgctgcaagtttaagtttgcctgattgtttattaatgtccgggataagtcggtctgctatctattagctgtgtcaatatttgatcaatgtccccgtgatttatttgatcatagttggagcaccaaaggggctacttatatacactgctagaaacgtccaaacgaaacctaaagtaaccagactcattagcagtgtttctatgcaaacattttcatataaatataattataaaattatgagtttaatattattacttctgtgtatcagatcatacaattttatccaaaataacgataagctttatgccagcttaacttaagctttaagcttttagaaactttcaagcttcgttaggaagacttgaattgtaaatttacatgggttctacatgattcaaatagatgtatattacaataaatcataaaacaagtaactgtattaaattaatttcttctgacaaccaatgttcctgagttcacagagacctactttgtttttgatgagtatatgttttttgtagttcaccactgcatatggtgttttaaaattagtatcatatagatgattccagaactatcagttgggggtaattaatgtttgttatgatgaaataggcatacatattatatatatggtttttttttaactgtttaacacatggtttcgagcttttatcttagatttacgaaatgctctctcatttagcaaaaagcttgaggcaataaggtgtgtatatatgtacagtaaatagagagatcagtcgaaagaaaaacactgacgggtaaacaacacgtatcatgtcgagctctggaattgtactctatgggacagatctcagtccctgtgtgaggaccgtcaaacttaccctaaaggtcctgaatctggactacgagtacaaggaggtgaatcttcaggcgggcgagcacctgagcgaggaatatgtgaagaagaatccccaacacacggtaccgatgctcgatgataatggcactttcatctgggactcccatgccattgccgcctacttggtggacaagtatgccaagtcggatgagctgtatcccaaggatctggccaagcgtgcgatcgtcaatcagcgtctcttcttcgatgccagtgtaatctatgccagtatagccaatgtcagccgcccgttttggataaacggtgttaccgaagtgccccaggaaaaactggacgccgtacaccagggtctgaagctgctggagacgttcctgggcaacagcccctacctggccggcgattcgctaaccctagccgatctgtccaccggacccactgtaagcgccgtgcccgctgccgtggacatagatcctgctacatatcccaaggtcaccgcctggttggatcgcctcaataagctgccctactacaaggagatcaacgaagctccggcccagagctacgtcgccttcctgcgcagcaagtggaccaagctgggcgacaagtgaaactaaacttatatttaaatatgacatttcacaagtttgaattccatcaattaacaacatacacatccatttctaaaacgtaaacttcttcaataaaatataacatatatataaaatatttaatttatttttttatttaatttatatttatttaaatatttgaatttataataaatactgaaatttataaactttaatatgggacttgagtcagtaattattatctcacagttggggaacccgaccgtaatatttttatcgctcatttatgatatcgtcagtgtacaattacaaaagtttatttaagatacaaatggggcaagctcagcgcacccaattgggttgtttagttaagctcgtttagatttctgtgtgtggcaaatttagtggaacttgggtctctctggtgatcgcatcatgtcggataaattggttttgtatggcatggatattagtcctcctgttcgcgcttgcaagctgaccttgcgggccttaaacttggactacgaatacaaggaaatggatctactggcaggagatcactttaaggatgcgttcctcaaaaagaacccgcagcacaccgtaccactcctcgaagataatggtgcccttatctgggattcacatgctattgtctgctacctggtggacaagtatgccaattcggatgagctatatcccagggatctggtgttgcgcgcccaggtggatcagcgtttgttctttgatgccagcattctgtttatgtcgctgcgaaatgtcagtataccctattttcttcgccaagtaagcctggtacccaaggagaaggtggacaacattaaagatgcatatggccatttggagaactttctaggggataatccctatttgaccgggtcgcaactgaccatagctgatttatgctgcggagctactgcatcctcgctggccgctgttcttgatctggatgagttaaagtatccaaaggtggctgcttggttcgaacgactctctaagttgccccactatgaggaagacaatctgcggggcttgaagaagtatatcaatttattgaaacccgtattaaatctggagcaatagtaatttgtattaaaaaaaaaataccatcaaatgc

SEQ ID NO: 10730 - DNA, 821 bp, DROSOPHILA
aaaacactgacgggtaaacaacacgtatcatgtcgagctctggaattgtactctatgggacagatctcagtccctgtgtgaggaccgtcaaacttaccctaaaggtcctgaatctggactacgagtacaaggaggtgaatcttcaggcgggcgagcacctgagcgaggaatatgtgaagaagaatccccaacacacggtaccgatgctcgatgataatggcactttcatctgggactcccatgccattgccgcctacttggtggacaagtatgccaagtcggatgagctgtatcccaaggatctggccaagcgtgcgatcgtcaatcagcgtctcttcttcgatgccagtgtaatctatgccagtatagccaatgtcagccgcccgttttggataaacggtgttaccgaagtgccccaggaaaaactggacgccgtacaccagggtctgaagctgctggagacgttcctgggcaacagcccctacctggccggcgattcgctaaccctagccgatctgtccaccggacccactgtaagcgccgtgcccgctgccgtggacatagatcctgctacatatcccaaggtcaccgcctggttggatcgcctcaataagctgccctactacaaggagatcaacgaagctccggcccagagctacgtcgccttcctgcgcagcaagtggaccaagctgggcgacaagtgaaactaaacttatatttaaatatgacatttcacaagtttgaattccatcaattaacaacatacacatccatttctaaaacgtaaacttcttcaataaaatataacatatatataaaat

SEQ ID NO: 10731 - protein, 224 aa, DROSOPHILA
MSSSGIVLYGTDLSPCVRTVKLTLKVLNLDYEYKEVNLQAGEHLSEEYVKKNPQHTVPMLDDNGTFIWDSHAIAAYLVDKYAKSDELYPKDLAKRAIVNQRLFFDASVIYASIANVSRPFWINGVTEVPQEKLDAVHQGLKLLETFLGNSPYLAGDSLTLADLSTGPTVSAVPAAVDIDPATYPKVTAWLDRLNKLPYYKEINEAPAQSYVAFLRSKWTKLGDK

SEQ ID NO: 10732 - DNA, 10715 bp, DROSOPHILA
gcgagctgcaggcgctcaagttttggttgaagttgtagacggagccgaagtgcagattattggcattcgagaagttcatgaccacctgttgctgggcgctgtgtacgttcatggtgttgtttgtctggacgttactgagagtgcccggaatattggcggaatgcaccacatccattgaattgtagtttgggtcgctgagctcgcgcagcacggattcggtcagatccgaggaggctgtgggcgtgccagcggtggagggcagcgccagggctccgctgttgttgttatctggttcgttgtcgtccacgggagctgcgtccttttccaggcgtccctcgacgggtgtcggattctgtgcctccttcccgccaaagattgtgggcaacaggttcctgagctttgacatgctgctcgctgataactggtagctttgaatgtgctctcgcttccggaaattccacagattggggagttttttgcctttgtgtttctttgctctttttcaatttggtggtggtaggccaaggatggacctgactatcgatattccgagccgattatcaaccgatatttcacttacaactaaaaatttttagttttattaagaaattcaactaaatagcatttcttgtcttttccgtctgattgaaaaaatcaattatatttgactaacatacaaaacttaacatttgaattttaattcttaatcattatgtgcatataaggaaaaaatttaagcatttatatctaatctttattaatttgcatataaggaaacccccataataacgattatcatctttaaaaactggtgtttgttgtctaagtttttttttaatatattttttttattgttactattgaataattctttaattaatttttgaaaatccccaaaagaaggccatggtaatagacccaatagtcgatagttcgatttgacagttcgcgcttgcgattggtaagagcgacaaccctgcacccgctgcggcgtatcgcccatctctatttgccacgttcgctcatgttcattcacattttacttggagtcggtaacgttgagttccgcgtccgtgcgttctgccttccaatagaaagtctgggtgtgaatttaccaagattccagtgcgaaaatcaactcacattgctcggtgatccgtgcggcggtataattgcagccggaattgcataagttgcggcgagcgaaagagagtgcacggatttacagttataaagggccggcagcggtggggcggcgacggcagagcaagcagaagaagaagagacggcagtggcgaattaaaaaaaacgatgaaagaaaattcgggccgctaatttttcttcaaatttgtgtgcggtcggcgaaaaacaacgtgtttttcaatggttgataatacacacggacggcgcactcgcgctcacccacacagtcacaaaagtcggcgacgtcgacgacccacacgctcacatagggacgtaaaatcccgtgcatacgtgtgagcgtgcatatataagcatatttgtccgattggaaggcgcgcgtgctgccttttatttttttttactttaattttcctatttttcgagagggggaggcagagttaaggccccgccccgtgccggaaaagaggatccacacaacctttcacctggaaagcatacggcactgatttccgcatttccatactctcacacacacacacagacgcacacaaacacgcccacgcgctgctccaattttgcctccgctgctgccacaaaaacaattgtccaataagtggcccgcatatgctgcccccctccccttccttcaccgtgctctctgcaacaacgcgctctctgcgacaaataacattagactttctattggggatgtgcataacgcagaatgactgactaaatgatttgtagggcattcatcctggtgatgccacgatccgatcttctgcatccgctaattgcattaattttaagcaattgtttttcggcttttccagcagacacccaagttatcaaactggatttggtcaaaggagagtaaactcggccggattttttggattttacagtaccgtaagttgaacaacctttgcctagagttaatttgcatagtttaacattttacacaagtgttttgccaaaaaaaagacaacaaatgtcgtccaagttaacggtttcatgcctaaaactgactacgtcaagcttttctttttttggtctttgggatctttgtatcgaaattacagaaacaagaatccatccgatatgtgcataccaattttgtatatatgttttttttttttttggttttttgtttaaagctgaactttagcgcattgttattgtgctttgtcttcatttgtcgacgtcagcgtcgctgcaggcgtcacatacgaacgtatgaacgatggtatttgctatgtaggtatgttgcttgttttcgttttttacctgtgccttctcgaaaggtggcaacacacacacacaaccgtattcccgaagaagaaaaagagcgacacagaaatgtgcaggcacacaggcacagcacactcacatgcatacaatacaccactggcactgctcgatcgttttgttgtagttgccggctatcatccggttttatatggagctgctcccctgctccgttaagttacttcgtcaagctctcgctctctcctctccctgttcctgtcgctctcgtgctcttgtctctgtatttgacacatttttcatgagcacaaacagattcgtcgttaggtgattatttttttgggaaattaattctgaaatgaaaaactattattaaatgttagggataatgatctggtgtcacttgcagttgtcattgttatctgtaatatataaatgtattaagctttcattgaaatttacaaaaccgtatgatttaaaagtaagaggccccctttacacataccctgccaccgccgctgtccgcacatacaaagacacaactaacagagaggagacagacatatctttgttgttctttcggtagagaggaaaatgtaggctacgaaaactcgttgggcatggatttagaaaacagctttggtcgaacaagtgcatggtctctgctgctcctcggctgagatctctctttctcattcgcgaggccccaacctttcacccaatcgaaatccgactgatagcagcctaaatttcggaaagcgcacttgtagcattgtgtgtttgtgtgtgtacgtaccacaatatcttggtggcaatcggacgactgagcttatcagccagaacggccgatagttatcactcagccccggaatctgcctgcgtggcccatcggccgcgtccacttatcaccaccgaaaagcggagagttgtgtcgagcactcatctcgcagatccaagcactacgtggccttagtttcaggctgtggtgcagaaagctcgtttgaaaagagactatttcggtttatcaacgccagaaaatccatttcatgcaccccctttggacacgcactgtttacagtggggcatgcaacatggtttcccggaatgattctgcattcagtcgaaggaaactttacgaatataagctacagaggtgaattcaatgaataatttatgatctaatttaatagatattttattaaatgtagtattggatgttattggaaatttcttccattcacaaattaagaagaaatggaaaacagcaaacaaaaaattgcaaacttttgacgtttttataagaaagcaatagtaacgcaacttgttagatttcctgtacataagtcacgccgcatatccaatgaattatctttgtactaatttgtttactgtagccaagcggtcctaaagtgtgtatgtacttatgtagttccttatcagttggtcgcagccaaatgcgggtcctcggaggtcgcacttatcaactatctgcgattttggtaagtctgcgggcgactgacaacagaaacagatgaaaactgtagctaaacgggcctattttaatccatgtttgccaaaataagaatgccatttaactatttgttctttgattgatcgaccagcacttcgataatcccctagaaatttttccttcctggttgtttgctttatcgctggctgataaacaaggttcatttatagggtccagtatgatgtaaacgttttaatgcacttgataagatatcttctacttttcaatttcagtgtactgtaaacgacttggaacgaaaaaggacttttctctttttttaagtaatgcaagcagcagcagtgatggaggaaactaacaacggtgagttcttcgaaggctaaatattatcaagcaattgttaaccaaaatcatcatgcagcaactaccatcgagcagcagcccatcgctctcattaatggccaagagcaggtggccaacgagcagcaaccatcctcgccaacttcagtggccacgcccactagtaccactagcggcggaactggcaatgccacacccgcctttagctacgacgacctgtttccggccctgccggccaacacttcggctcaatcgcaatccggagcttccggttcgactctagctcgtgtgacgagttcccaaaaaactcatgtaagctcgaaaaagacatacattgatttggttctgattctatggatttcaattttttttgtaacagattgtgcatgttccctgcaaggagcgcaagtccacggagtcggagaagtttggcgaaggcgagtcgaagcgtatttgccagcagatcaccaaggagaccggagcccagatcgagattgtgagcggcaagaaccagtcgctgaccttcctgattaagggcaagcagagcgagctgctcgatgcccgccgtaagattcttatgggcttctccactcaggccagtcggcaggtgaccgttcctcgggagcacttccgcgtcatcctcggcaagggtggccaacggctgcgcgaaatcgagcgtgttactgcgacgcgcatcaacatccccagccagagcgatgagagcgagtttatcacgattgccggaaccaaggagggtattgcccaggccgagcaggagatccgtcagctgtcagccgagcagtacaagaagtcatcggaccgcatcacggtgcccaaagtttaccatcccttcatcgtgggcccctacagcgagaacctaaataagctgcaggaggagaccggcgctaggatcaacgtgccgccgcagcaggttcagaaggacgagatcgtcatctcgggcgagaaggacgcggtcgcagcggcaaaggccaaggtggaggccatttacaaggatatggaaaagaagtgctctaccgtcagtgtggaggtagctaagcccaagcaccgatatgtcattggtccgaagggctccaccatcgccgagattctgcagttgaccggtgtgtctgtagagatgcctcccaatgactccccctcggagacgatcactttgcgtgggccgcaagtggctttgggaaatgccctaaccgttgtctaccaaaagtccaactcggtcaagtctgtggagatcaatgcggcacattggatccacaagtatgtgatcggtcgcaagggggccaacatgaagcagctggaggaggactgccccaacgtgaacgtgaattgcctggaagacaagatcaagctggagggagatcccgagaacgttgacagggctgtagcctacttgtccgaaatcatcaaaaactacgaggagaacttcacattcgaggtgatgacggttaatccttcgtactacaagcacatcatcggtaaggctggagccaacgtaaatcgcctgaaggatgaactgaaggttaacattaacatcgaagagcgcgagggccagaacaacatccgtatcgagggtcccaaggagggagtacggcaggcgcagcttgaattacaagaaaaaatcgacaaactggaaaacgaaaaatcgaaggatgtgatcatcgaccgccgtctccatcgttctattatcggagctaagggcgagaagattcgcgaggtgaaggaccgctaccgccaggttacaatcacgatacctacgccccaggagaataccgatattgtgaagctgcgcggacccaaggaggatgtggacaagtgtcacaaggatctgcttaagctggtcaaggagattcaggaatcgtcgcacattatcgaggtgcccatctttaagcagttccacaagttcgttattggcaagggcggcgctaacatcaaaaagatccgcgatgagacccagactaaaattgatctgcctgccgagggtgacaccaacgaagtgatcgtaatcaccggcaagaaggagaacgtgctcgaggcgaaggaacgtatccaaaagattcaaaacgagctttccgacattgtcaccgaggaggtgcaaatcccgcccaagtactacaactcaatcatcggcactggcggcaaactcatctcctcgatcatggaggaatgcggtggtgtttctatcaagttccccaacagcgactccaagagcgataaggttgggttattacgattacgatagagaggctttttattaatggttcctatttaaattcaggtcactattcgcggtcccaaggacgatgtggagaaggctaaggttcagctattggagctggccaacgaacggcagctggcttcctttaccgccgaggtgcgcgccaagcagcaacaccacaagttcctgatcggcaagaatggcgcttctatccgtaagattcgcgatgccactggtgcccgcattatcttcccttcaaacgaggacactgacaaggaagtgatcaccatcattggcaaggaagaaagcgtaaagaaggcccgtgagcagctggaggcgatcatcaaggagtgcgacgaagtaaccgaaggtgaggtttctgtcgatcccaagcaccacaagcacttcgtggccaagcgtggcttcatcctgcaccgcatttcggaggagtgcggcggcgtgatgatctccttcccccgtgtcggcatcaactccgataaggtgacgatcaagggtgccaaggactgcattgaagcggcccgccagcgcatcgaggagatcgtcgccgatctggaagcgcagaccaccatcgaggtggtgattccacagcgtcatcatcgcaccatcatgggcgcacgtggatttaaggttcaacaagtcacctttgagttcgatgtgcagatcaagttccctgatcgtgatgccaccgaacccgtcgagggtctgaccaacggaggcagcggagagaatggaggcgagaatgaaggccaggagggagagcaggaagtagagaaggaagccgaacaggagccggttcgtcagtgcgatgttatccgaatcacgggcagaattgagaagtgcgaggccgccaaacaggctctgcttgatcttatccccatcgaggaggagttgtcggtgcctttcgacctccatcgtaccatcatcggaccgcgcggtgccaatgtgcgtcagtttatgtccaagcacgatgtgcacgtagagctgccacctagtgagcttaagtcggatgtgatcaaggtctgcggtacgcccgctcgcgtcgccgaggcccgcgaagcgctggtgaaaatgattgaggattacgaggctgatagggccgatcgtgagctgcgctcctttgttctccaggtggacgtagatacggaattccattcgaagctcattggtcgtcatggcgctgtgattaacaagctgcgtgccgatcacgacgtcatcatttcgctgcctaagcgggatgaacccaatgaccgcatcatctctatcaccggctaccaggccaatgcggaggcagcccgcgatgccatcctagagattgttggcgaccccgagacacttcatcgcgaggttatcgagatcgataaacgcatccacccccacctcattggccaacgccgacgcaccattcgcaagatcatcgaggataataaggtatgtttccctgaaaatttaattcaagatattgctttaatggatttaatttctgtattaaccaataaaccattaatgccatcaggtgaacatcaagttctcagctgatgatgacaaccccaattcgatcttcatcagtggcaagatagaggacgttgagaacgtcaaggagttgctcttcggcatggctgaggactacgagcgtgactacttggataacgtggcgatagcgccgccaacgattggtgccttcctaactggtcagggttctggatccgatgccgcaggtgccagcgagaacggattcgtcatcaaagacgcaccgtgggagaagcaaaagcaggccaaaaacctgactgcgcccaacactcagtcgcaggaggacttcccgcacttcgctgctggcggggctccggtggcctccacgcctatcacctccgtgtggggccccaaaaactaagtgcatcgggccgagtgtcccgatcgccagcagtagcagcaatactacaagtcggggtgcgccggggatcggagctggagatggaccaggagctggagcagaagctggaactggaacttgaattggattatcgggcaatgagcggcagagcagcggcagtcgtgcggacatctctttagtcgaaaactagtgtcaaaaataatggtataggttgtctcccaggagcttttctacaacgcaatttgtgcaggttaatagaaaacgactatttttgtatgatttgatacaggatcaatcaaacacacaaaaacccacactcacacacaacggcacatacacatgctcacacatatgaaattgcatttatacaacatatagaatacgagaatcgaaacagacaattgaccacgccttcagttccgttccccgatgtgttggccaaaccccggccactttatatataaaaaacacttaattgccaatttctttttatataaccattcttcattgcaacacataatattctaattagttgaagctccctaaaagtaagcagaaagttcagcaaaatggtttgttaattgaattaaaactgactagcgaagcacgttcaagaacgaatgtaattttaagcataaaatgttaattatttacatttaccttctatctaccccccgttttgattacaccatactcaattttcgtattcggaatttccatttaaacccttcccaattaagtgatgattattatgatttatgcgaaagtaaatgttaaatgaacgttgattgtattgtacaaacgtttcttacgttgcggggcgagagtggaagtggagatggcgatttatttgaacagcaaatataaaccttacctaaatttaataactatattacccgcacgcctgctcctactcctactccctaatcctctagcgttctaccatacacacagccatgatacagaacccgaaaaacacacacacacacacaccgactctgttcacatttcaaaatgagtatcgacattttaattttgtgcaatccccttgatttatattaaattgttttcgacttatattttccacttaaataattttctttgcgccgcggtgtaaattgtcaaaagcaagtaaaagatttggaactcttccagtactttgtacgagtatcgggtgatggtttttcagttttctcaactctacaccgcgcaatatctgacagttgaaacacaaagtataagaaaaattattaattttttactattactattcaataaaaacaaaaaaccatataaaaccaataaaaatcgtaaacgaattttttgctttttttttgcaacatttttattttgtttcacgtttgtttagtatttcgattgcttctgttaaaaaaaaatatgataacaccaagaataacagacctgatattgtaaatttttaaaaatatacatacatatttacaacaactgcattagtaattctaagaacgtaaaaatacaaactatatcaaatgtatatattttcctatattaacggacaaaatcaaatgtaagagtcgacggccaaatggcaattgctgtctgcaaaacaaaatattttcattaacaattcgatttctaactataattttcaacccagatatagcagatacaaccgtatgtcttatttcttttgaaatacaaaagttttaaaccgaaacttttctgtttgaataaaggcgcgatctggcagctctaggtagtggtgtcacagcgtcgataactaacttagtttctcaccgagctgcaacaagtttaattacaatcgataacgaagattggagcttttagtgagtaaaatttgacccatttctgttgtttgaacgtttattacgcattacgtatttacttaagcgattttgtgaattttttgtgtgtagttatgtgcacgagagatggaatttttgaccgaaagctgctatcgatagtgacattccttcgatttattttagcaaccatcgatagctaagcaagcgaaacaaaaaattattttcaacttgaaagttttgcgacaagtgcgtgcagttggcatcgaaatagttaacaaaattgccgcagacttccggagacaacgccgtaatggaggaccgtaagtgtgtggcatacggacgcagtgcatcattgcaattccaatgcagcggcacatgtttccgtgggctcttgtgacctgggcgattgggacacctaagacctttcgggtaattcgggtatcattactattgtaggactctgattcagcagcggctttgccaaaa

SEQ ID NO: 10733 - DNA, 5277 bp, DROSOPHILA
catctctatttgccacgttcgctcatgttcattcacattttacttggagtcgacacccaagttatcaaactggatttggtcaaaggagagtaaactcggccggattttttggattttacagtacctgtactgtaaacgacttggaacgaaaaaggacttttctctttttttaagtaatgcaagcagcagcagtgatggaggaaactaacaacgcaactaccatcgagcagcagcccatcgctctcattaatggccaagagcaggtggccaacgagcagcaaccatcctcgccaacttcagtggccacgcccactagtaccactagcggcggaactggcaatgccacacccgcctttagctacgacgacctgtttccggccctgccggccaacacttcggctcaatcgcaatccggagcttccggttcgactctagctcgtgtgacgagttcccaaaaaactcatattgtgcatgttccctgcaaggagcgcaagtccacggagtcggagaagtttggcgaaggcgagtcgaagcgtatttgccagcagatcaccaaggagaccggagcccagatcgagattgccagtcggcaggtgaccgttcctcgggagcacttccgcgtcatcctcggcaagggtggccaacggctgcgcgaaatcgagcgtgttactgcgacgcgcatcaacatccccagccagagcgatgagagcgagtttatcacgattgccggaaccaaggagggtattgcccaggccgagcaggagatccgtcagctgtcagccgagcagtacaagaagtcatcggaccgcatcacggtgcccaaagtttaccatcccttcatcgtgggcccctacagcgagaacctaaataagctgcaggaggagaccggcgctaggatcaacgtgccgccgcagcaggttcagaaggacgagatcgtcatctcgggcgagaaggacgcggtcgcagcggcaaaggccaaggtggaggccatttacaaggatatggaaaagaagtgctctaccgtcagtgtggaggtagctaagcccaagcaccgatatgtcattggtccgaagggctccaccatcgccgagattctgcagttgaccggtgtgtctgtagagatgcctcccaatgactccccctcggagacgatcactttgcgtgggccgcaagtggctttgggaaatgccctaaccgttgtctaccaaaagtccaactcggtcaagtctgtggagatcaatgcggcacattggatccacaagtatgtgatcggtcgcaagggggccaacatgaagcagctggaggaggactgccccaacgtgaacgtgaattgcctggaagacaagatcaagctggagggagatcccgagaacgttgacagggctgtagcctacttgtccgaaatcatcaaaaactacgaggagaacttcacattcgaggtgatgacggttaatccttcgtactacaagcacatcatcggtaaggctggagccaacgtaaatcgcctgaaggatgaactgaaggttaacattaacatcgaagagcgcgagggccagaacaacatccgtatcgagggtcccaaggagggagtacggcaggcgcagcttgaattacaagaaaaaatcgacaaactggaaaacgaaaaatcgaaggatgtgatcatcgaccgccgtctccatcgttctattatcggagctaagggcgagaagattcgcgaggtgaaggaccgctaccgccaggttacaatcacgatacctacgccccaggagaataccgatattgtgaagctgcgcggacccaaggaggatgtggacaagtgtcacaaggatctgcttaagctggtcaaggagattcaggaatcgtcgcacattatcgaggtgcccatctttaagcagttccacaagttcgttattggcaagggcggcgctaacatcaaaaagatccgcgatgagacccagactaaaattgatctgcctgccgagggtgacaccaacgaagtgatcgtaatcaccggcaagaaggagaacgtgctcgaggcgaaggaacgtatccaaaagattcaaaacgagctttccgacattgtcaccgaggaggtgcaaatcccgcccaagtactacaactcaatcatcggcactggcggcaaactcatctcctcgatcatggaggaatgcggtggtgtttctatcaagttccccaacagcgactccaagagcgataaggtcactattcgcggtcccaaggacgatgtggagaaggctaaggttcagctattggagctggccaacgaacggcagctggcttcctttaccgccgaggtgcgcgccaagcagcaacaccacaagttcctgatcggcaagaatggcgcttctatccgtaagattcgcgatgccactggtgcccgcattatcttcccttcaaacgaggacactgacaaggaagtgatcaccatcattggcaaggaagaaagcgtaaagaaggcccgtgagcagctggaggcgatcatcaaggagtgcgacgaagtaaccgaaggtgaggtttctgtcgatcccaagcaccacaagcacttcgtggccaagcgtggcttcatcctgcaccgcatttcggaggagtgcggcggcgtgatgatctccttcccccgtgtcggcatcaactccgataaggtgacgatcaagggtgccaaggactgcattgaagcggcccgccagcgcatcgaggagatcgtcgccgatctggaagcgcagaccaccatcgaggtggtgattccacagcgtcatcatcgcaccatcatgggcgcacgtggatttaaggttcaacaagtcacctttgagttcgatgtgcagatcaagttccctgatcgtgatgccaccgaacccgtcgagggtctgaccaacggaggcagcggagagaatggaggcgagaatgaaggccaggagggagagcaggaagtagagaaggaagccgaacaggagccggttcgtcagtgcgatgttatccgaatcacgggcagaattgagaagtgcgaggccgccaaacaggctctgcttgatcttatccccatcgaggaggagttgtcggtgcctttcgacctccatcgtaccatcatcggaccgcgcggtgccaatgtgcgtcagtttatgtccaagcacgatgtgcacgtagagctgccacctagtgagcttaagtcggatgtgatcaaggtctgcggtacgcccgctcgcgtcgccgaggcccgcgaagcgctggtgaaaatgattgaggattacgaggctgatagggccgatcgtgagctgcgctcctttgttctccaggtggacgtagatacggaattccattcgaagctcattggtcgtcatggcgctgtgattaacaagctgcgtgccgatcacgacgtcatcatttcgctgcctaagcgggatgaacccaatgaccgcatcatctctatcaccggctaccaggccaatgcggaggcagcccgcgatgccatcctagagattgttggcgaccccgagacacttcatcgcgaggttatcgagatcgataaacgcatccacccccacctcattggccaacgccgacgcaccattcgcaagatcatcgaggataataaggtgaacatcaagttctcagctgatgatgacaaccccaattcgatcttcatcagtggcaagatagaggacgttgagaacgtcaaggagttgctcttcggcatggctgaggactacgagcgtgactacttggataacgtggcgatagcgccgccaacgattggtgccttcctaactggtcagggttctggatccgatgccgcaggtgccagcgagaacggattcgtcatcaaagacgcaccgtgggagaagcaaaagcaggccaaaaacctgactgcgcccaacactcagtcgcaggaggacttcccgcacttcgctgctggcggggctccggtggcctccacgcctatcacctccgtgtggggccccaaaaactaagtgcatcgggccgagtgtcccgatcgccagcagtagcagcaatactacaagtcggggtgcgccggggatcggagctggagatggaccaggagctggagcagaagctggaactggaacttgaattggattatcgggcaatgagcggcagagcagcggcagtcgtgcggacatctctttagtcgaaaactagtgtcaaaaataatggtataggttgtctcccaggagcttttctacaacgcaatttgtgcaggttaatagaaaacgactatttttgtatgatttgatacaggatcaatcaaacacacaaaaacccacactcacacacaacggcacatacacatgctcacacatatgaaattgcatttatacaacatatagaatacgagaatcgaaacagacaattgaccacgccttcagttccgttccccgatgtgttggccaaaccccggccactttatatataaaaaacacttaattgccaatttctttttatataaccattcttcattgcaacacataatattctaattagttgaagctccctaaaagtaagcagaaagttcagcaaaatggtttgttaattgaattaaaactgactagcgaagcacgttcaagaacgaatgtaattttaagcataaaatgttaattatttacatttaccttctatctaccccccgttttgattacaccatactcaattttcgtattcggaatttccatttaaacccttcccaattaagtgatgattattatgatttatgcgaaagtaaatgttaaatgaacgttgattgtattgtacaaacgtttcttacgttgcggggcgagagtggaagtggagatggcgatttatttgaacagcaaatataaaccttacctaaatttaataactatattacccgcacgcctgctcctactcctactccctaatcctctagcgttctaccatacacacagccatgatacagaacccgaaaaacacacacacacacacaccgactctgttcacatttcaaaatgagtatcgacattttaattttgtgcaatccccttgatttatattaaattgttttcgacttatattttccacttaaataattttctttgcgccgcggtgtaaattgtcaaaagcaagtaaaagatttggaactcttccagtactttgtacgagtatcgggtgatggtttttcagttttctcaactctacaccgcgcaatatctgacagttgaaacacaaagtataagaaaaattattaattttttactattactattcaataaaaacaaaaaaccatat

SEQ ID NO: 10734 - protein, 1268 aa, DROSOPHILA
MQAAAVMEETNNATTIEQQPIALINGQEQVANEQQPSSPTSVATPTSTTSGGTGNATPAFSYDDLFPALPANTSAQSQSGASGSTLARVTSSQKTHIVHVPCKERKSTESEKFGEGESKRICQQITKETGAQIEIASRQVTVPREHFRVILGKGGQRLREIERVTATRINIPSQSDESEFITIAGTKEGIAQAEQEIRQLSAEQYKKSSDRITVPKVYHPFIVGPYSENLNKLQEETGARINVPPQQVQKDEIVISGEKDAVAAAKAKVEAIYKDMEKKCSTVSVEVAKPKHRYVIGPKGSTIAEILQLTGVSVEMPPNDSPSETITLRGPQVALGNALTVVYQKSNSVKSVEINAAHWIHKYVIGRKGANMKQLEEDCPNVNVNCLEDKIKLEGDPENVDRAVAYLSEIIKNYEENFTFEVMTVNPSYYKHIIGKAGANVNRLKDELKVNINIEEREGQNNIRIEGPKEGVRQAQLELQEKIDKLENEKSKDVIIDRRLHRSIIGAKGEKIREVKDRYRQVTITIPTPQENTDIVKLRGPKEDVDKCHKDLLKLVKEIQESSHIIEVPIFKQFHKFVIGKGGANIKKIRDETQTKIDLPAEGDTNEVIVITGKKENVLEAKERIQKIQNELSDIVTEEVQIPPKYYNSIIGTGGKLISSIMEECGGVSIKFPNSDSKSDKVTIRGPKDDVEKAKVQLLELANERQLASFTAEVRAKQQHHKFLIGKNGASIRKIRDATGARIIFPSNEDTDKEVITIIGKEESVKKAREQLEAIIKECDEVTEGEVSVDPKHHKHFVAKRGFILHRISEECGGVMISFPRVGINSDKVTIKGAKDCIEAARQRIEEIVADLEAQTTIEVVIPQRHHRTIMGARGFKVQQVTFEFDVQIKFPDRDATEPVEGLTNGGSGENGGENEGQEGEQEVEKEAEQEPVRQCDVIRITGRIEKCEAAKQALLDLIPIEEELSVPFDLHRTIIGPRGANVRQFMSKHDVHVELPPSELKSDVIKVCGTPARVAEAREALVKMIEDYEADRADRELRSFVLQVDVDTEFHSKLIGRHGAVINKLRADHDVIISLPKRDEPNDRIISITGYQANAEAARDAILEIVGDPETLHREVIEIDKRIHPHLIGQRRRTIRKIIEDNKVNIKFSADDDNPNSIFISGKIEDVENVKELLFGMAEDYERDYLDNVAIAPPTIGAFLTGQGSGSDAAGASENGFVIKDAPWEKQKQAKNLTAPNTQSQEDFPHFAAGGAPVASTPITSVWGPKN

SEQ ID NO: 10735 - DNA, 4125 bp, DROSOPHILA
cagcagagtgtgcgtcggctaacggatcaactgaatagttgccggctggagcaattgaatctcagttatgtgcgctggcccctcgacgatgcaagtggatttgcgttgagtgagcgcctggttacgcttttcgaaggtggtacctgcgagcgatttgtcggagtgcagctcgctggctgcggcttgaacgatgcgcatatgtacaatatcagccagcatttggccaaagccaaacaactacagatgttggatatcagtgataatagcaatttaagtggaactactcttggatacatattagatgaactacctcaattacgcgatcttttggccgttaattgtacaaatctactggatgacattcgtctgcaaaaactcgaacaactaaagcagctgcccaggcgcttagaattaacagttgatgagcaggtgttctccatgccaggagccctggaaacacttcagtccatttggcagctgcaatttggagacaaggccaaaatgttgaccacatcaaatagccggaaaattggaaggcggtacaaaggtctacttaagctactcgctgatggaagcgatgcggaatagtgtagtctcatcatgtgtaaaccatttccttgtgttgtatgtcccagagcattttttattgtttgacaattatatagcaaatctaagtacagtaagtcttatcgttcagttgatagcagaacagcgattcgttgaacctaagtagaacaaacactcagcccccacagggcttatcttatcaatggatgatagctagcgaaataatttgcgatggtctagactctacaattttgggggtaagtgagggcaagattagagaaacttgaaatattaagaattagtaaacatactaacgcactgactgtttgcttacttcttccttccttttatacacttgaggaataagtaattccttagaaattaccaagtgccatttatacaacatttccctcaacagacaaatcacaatcaatgatttatattttcttgtaattatttacttattgtactttattaatcggatttgtgaatgtgtctacaatgagcatgacaactgatgaggtgaatggagatgaggaatcctagttaaaactgacttaggcttgacccttagcagcctcgtacatgtttcgggaaatgatgaggcgctggatctgagaagtaccttcgtagatttggtagatcttggcatcacgcatcagcttctccacgggatactcgctgttgaagccgttgcctccaaagatctggacggcatcggaggcaatcttgttggccatatcggcggcatggcacttggcaatggaggcatagtagctgttgcggcgtccctggtcgatttcccaggcggagagacgccacgccagacgggatgtctccacaccgatggccatatcagccagcatgaactgcacagcctggtggtaagcgatgggcacgccaaaggtcttgcgttccagcgcgtatttaagagcctcatccaagcaacgctgggccaaacccacagctccggcagcaactggaggacgcgtcttatcaaaggtgcccatggcaattttgaaaccggcaccctcgccaatcagcacattttccttgggcacgcgcacatcctcgaaggtgatgccacgcgtgtcggaggcgcgctgtcccatgttcaactccttgcggccgggcgttagtccgggactgtcgcgctccacaatgaacccggtgaaggccttgctgggcgggcacttgggatccggattggtgcgggccagcacaaagtaccagttcgccacaccaccgttggtgatccacatcttctggccgttgattacccactcatcacccttcttctcggcgcgtgtcttgatgccggacacatcggatcctgctccgggctctgtaacacaataggcggcgacaagtggctcctccagcaggcggcccaggtactttttcttctgttccttgttaccggacaggatcacaggagtttgctatgaaagaacgtggcgtttcgatcatcttgccgtaaatagacatgactttaaacttacgcccagaccactagcctctaaggcggtcatgatgccagtgcagccataggccaactcctcggccgacaagcaggtggtgaacacatcgagatccaggccaccaatatcagcaggaatgtggttgttcatcaggcccagttcccaggccttcttgatgatgggccacgggtactcgccgctcttgtcgtactgggcggccaccgggatgatctcctcacgggtgaacttacgtgccagttcctgcagctgcagctgatcctcggtgagtgcgaaagaggtgccattgggcgaaacgtgtgacacggcggcgtaggcgcgactttgggacaccaactggcgcagggcaggcgcagcaagctggattttcggatattggatatcggatttaaagtcaactggtaaacaagtgtttatcgaaatgcaaaatgaaaatgtagaaataatcagaacaacaacaaagttgaccgcgaattaatcttaactacaagcaacaaataaaatgggccaactacgtatgtatttaattaatacaacatcatgatcatagacgaaggttttttttatatttacaagggactttggatgtttgaggttcataaccaaccatcacattctatttttttcataaaacagataacgaatatgcctgcccataaagtttgcattccgatttaaatagagtgcacgataagccgccattagacgccgctaataatactttctcagggggggcaaagtacagatgattgctaacagataggcagcaacaaattgttttcgaaacggaacccactcgaatatatgtttgttggtaggtacatatgtatatgtatgtatgatcctacgatcaacagttgctgtcgtcactagcgtgatagaactttggacctttggatatgatatgtcccagcgatgtgtttttcactttctctgcgttgtaaattgactgatatgctcaccttgttgaggaacgccatttgaatgtgggtttattttcgtattttcctgagttttaactaggtcgccttgctaactcgtcggtggctgccagcgaaatgatccaaacgagttgccgatgcgccggtatagcgatgttatatatgtacatacatatgtacattggttcatcgcgatatggcagcgacgcttggacattggaccttgttgcgctggcagtcgcaaaagctacagaatcgtggtgacgaacgaactacaagcatatgcacctacaaatatatgcaggaggttgagataagggaagatttcgcagacatttgtatgcgctgttgatggaactttcccaaagcttttcgaagagttaacaaatttgtttgtacctcgccttaattgtaatataatgcttatataaataaattgtattgtaaaatatttttaaaataccaactgtacatttcatccaggttttgtcaagtacataggcatatgtgtatgaagagacacacccccttttttaagatatcaatgtaccacacgaaataccctacgaaataagcttaataaaacatagctttaacgtaatgcccagcaatctacgtaaggtaaaagctttcagttcacaacgtaacgtattgcttctgggcaataggtataaaataatacaatcgggtatattaggcttgaaaatgttcgtcggcagaggtcattgagggataattcatattaaatagtaatatactatattttggttagtttagaataaaatgtagagacaattagataattataggtttcattcgctttaactttttaaccccatttttccatattcaaaacatttaaaacatgatttgatatgttaaataataaaataagaaccaacaggatagtccctagtcgttagacttcgctgccacctgttaggtgcttaacaatcggagcatactttcccgcttgacacaaatagacggaacatgttcctctggctgttttaaaaataacagattgcagccccgcctcccagcgacaaaaaaatctccagcgaaacgaattggaaatccgtgacacagttgacaggcagatataaaaaacagagcac

SEQ ID NO: 10736 - DNA, 1463 bp, DROSOPHILA
tttcgctggcagccaccgacgagttagcaaggcgacctagttaaaactcaggaaaatacgaaaataaacccacattcaaatggcgttcctcaacaagcttgctgcgcctgccctgcgccagttggtgtcccaaagtcgcgcctacgccgccgtgtcacacgtttcgcccaatggcacctctttcgcactcaccgaggatcagctgcagctgcaggaactggcacgtaagttcacccgtgaggagatcatcccggtggccgcccagtacgacaagagcggcgagtacccgtggcccatcatcaagaaggcctgggaactgggcctgatgaacaaccacattcctgctgatattggtggcctggatctcgatgtgttcaccacctgcttgtcggccgaggagttggcctatggctgcactggcatcatgaccgccttagaggctagtggtctgggccaaactcctgtgatcctgtccggtaacaaggaacagaagaaaaagtacctgggccgcctgctggaggagccacttgtcgccgcctattgtgttacagagcccggagcaggatccgatgtgtccggcatcaagacacgcgccgagaagaagggtgatgagtgggtaatcaacggccagaagatgtggatcaccaacggtggtgtggcgaactggtactttgtgctggcccgcaccaatccggatcccaagtgcccgcccagcaaggccttcaccgggttcattgtggagcgcgacagtcccggactaacgcccggccgcaaggagttgaacatgggacagcgcgcctccgacacgcgtggcatcaccttcgaggatgtgcgcgtgcccaaggaaaatgtgctgattggcgagggtgccggtttcaaaattgccatgggcacctttgataagacgcgtcctccagttgctgccggagctgtgggtttggcccagcgttgcttggatgaggctcttaaatacgcgctggaacgcaagacctttggcgtgcccatcgcttaccaccaggctgtgcagttcatgctggctgatatggccatcggtgtggagacatcccgtctggcgtggcgtctctccgcctgggaaatcgaccagggacgccgcaacagctactatgcctccattgccaagtgccatgccgccgatatggccaacaagattgcctccgatgccgtccagatctttggaggcaacggcttcaacagcgagtatcccgtggagaagctgatgcgtgatgccaagatctaccaaatctacgaaggtacttctcagatccagcgcctcatcatttcccgaaacatgtacgaggctgctaagggtcaagcctaagtcagttttaactaggattcctcatctccattcacctcatcagttgtcatgctcattgtagacacattcacaaatccgattaataaagtacaataagtaaataattacaagaaaatataaatca

SEQ ID NO: 10737 - protein, 419 aa, DROSOPHILA [sequence omitted]

SEQ ID NO: 10738 - DNA, 3929 bp, DROSOPHILA
taagtgtcagttctgtaacgctggtggcgttgatatggcccatttcaagctttgcctcgtcgggcacattgtcctccacagcctcctttgccacgtcatccaggtcggggtcctcgtcctcgccgtggaacaagttgtcgaactcggccacatctatttccatgccgtcttccaggctggcaaaatcctataaaacaatatcgtccatcaagaagagacgccacttgggtttctacggactcaccgccattttactggaccaggccttagagcgctcgtagaccattgcctccagtgtttcctcgtccaccaccgcattcgccatggttatgtagttatcagttcacggaatacttgattaaaatttataaaaactaaaagaaatcttaaaacacaaaaataaagagtcaacaaaaatggcgttgccactggtgttaccgtctccaaggcgccaaaaaatacaccaaaacgcgacttaactaaacacgtcccatttttatttatataaaacaaatagaaaacttgggttcctcatttccaataaggtcgttttgatgttctatttgcacggctttttgattataattattatttatttaacgatatcctgtttattcaatttatttatttttttatttactgcatttttcgctagcgtccagcgttgccagatcaaatgaatactcggagtcaccaatgatgccaagttcgcattagcgcgccaaaatcgaattgtttatttttgtggggtttttattttgaagttatatatgttttacattagattaatattgcagataaacaaacgaatacatattatatgcttaaataactgttcaattgaaatacatgtacatcgctcccggtcctctgttggccactaaatgtcggaatatgtctgctccagcgtttcagtttgtgttgtctcggtgtcgttaataaagttgtgtatatattaaaataggctgcttggaatcggaatttgctacggcttcgccagctacttgcggttgcgtatggcgcggtccatgatcgtattgattcgcgtctccgagtaaccaggaacgagcatgtggatcagctctttcataaataggtcgctcactcccggactggaacgttcggccagctcgaacacagacttcaggtcgccgatgtcgctgccgacgcctatgttacggccgcctgatcctccgcttcctgcagatcctccgccggagtactttcgctggatgtcgctcagcacggggaagaggaagttgttcagacaggcgctgttcgtttggactaggcgttgtcccgccccagagtgcttgacatggctggcatggttggtggccacatgctcctcgtggctgtggttgttgctactgctgctgcagctggcaaccagcgcggcgttatttgcatggaatgattcacgttggctgctgcggcgctgttgctgctgctcagccgtcgatggagtcggaaccgacgactgcaatggcaggcccaaagaggcacggcgatcctctacttgatccagaggggcggcggatcgcgactggcgcagctccggcttcgagctggaacgcttctgctgcagctcactggccgacgacgagcttgtgacgctgctcggcggaggagctgcgttcagcatggtggtggtggcatgcttgttgctcaagtttctgatgttattgttgttaatgttgttgtggttgtggttgtggacgtgactgttctgggggggcagggcggatgcagaggagacaccttcgttggctgtaatgaccgatacggaggaagctgacgccgccacggcggacacagaggacgataatgcatttgcagcaggggacgcttgcacgccaccaccgccggctggcgagtgtgtggtctgcatcagcttctgcatggttagctcgtgctcctgcaactggaagctgttgacacccgcccgcggagcactgttgatatgcaggcccttgacggtcatgatccagggctcatcctggctgctgccgccctgcttggcgtccgagtccgagtcagagttctcagactccgtctcactttcgtcgcccttggagaccttccacttcttgaagcggtcgatcaggtcaatcagataggcgttcttcttggccttcttgatgaacgggtacttgagcagctccttggccgtgggcctgttctccgggtccttgtttaggcaggcctccacaaagtccttaaaagacttggtatagctgcccgtcagctggggtggattgttcttggggatgaggaagagcacgcgcatcggatgcagctccgaattgggcggctcacccttggccagttcgatagccgtgatgcccaacgaccagatgtccgccttggcatcgtactgtgactgcttgatcacctcgggcgccatccaaaagggcgtgcccacgaaggtgttcctcttggatgtggtgttggtcagctggccagcgactccaaagtccgccagcttgacatcgccctgttcgctcaacagaacattggccgccttgatgtcgcgatgcagcttgcgctccgagtgcaggtagtccaggcccttaagcacttcgcgcaatatgatcccgatgtgcatttcctcgaaggagccggccttcatgaggtccaaggcggatccaccgcccaggtactccatgatgatccataacttggtgcccttaagaaagctgccatagtacttcgtcacgtacggcgagtcgcactgcgacagcaccatgatctcctgctggatgtcgtcgatctcatcttcggcctcctccagatcgatgatcttgatggccaccacttgctgggtgcggttgtcgatgcccttgaacacctcgccgaaggagcccttgccgatgcgctcctgcttggtgaagatgagctctggatcgactttctccgtccaggacatgtttcctatctggtttctacttcccacttcgtggcttctggctctcctcctccacctccttctggattcacgggtttccttgttactccgctggctctcgactggcttgtgttggacccaactggactgaactgttctgcgggctatttggtggctgaactactctgcgggggcacttgactaataattttttcgttggtatctcatctaatccgagaaatctctcttttttttgctgtatcgcagcagtatcgaataccgattgaatatcgatattctcctgtcgatatcgatatctttccagctgttgattagagccgccagccgaaaaataaatattaaaattaattttttattttaattgtaataatatttatttcacgattcgtatgtattttcttaactctggcagagcaattcttattctttcactaatataatagttattaatttccctaagattatttaactcgttagcagttccgaaaagcttaaataagattaacttattcatttattttcctattcgacttgtgtcaaagcttacaatatataaatattagatgttaactattttatttctttacccacttctgtaattacaaaacccatttggcagcgttgccacataatattgaatattggaaagcgttgcatcgatacccgctaaaaacttaatgttgcagaatgaatttacatcgagtccctcatttttagtttattgtaaatggatgtagttatcgagtataaataaaaacaactggtttccaaacgatgcaactaaaatgattttttcgccatcactaaggattcaatttcacatcattcaaaataattttctttaagcttaatatcgcaattgatgggttattttaatacataaaacacataagttacttatatctgaaaaagaaaatcgcagtgccttcaatacccatgcatacaccaaaaattcagatatttcgttttaatgtactttatttatgaaatgtgttacatt

SEQ ID NO: 10739 - DNA, 1929 bp, DROSOPHILA
atgtcctggacggagaaagtcgatccagagctcatcttcaccaagcaggagcgcatcggcaagggctccttcggcgaggtgttcaagggcatcgacaaccgcacccagcaagtggtggccatcaagatcatcgatctggaggaggccgaagatgagatcgacgacatccagcaggagatcatggtgctgtcgcagtgcgactcgccgtacgtgacgaagtactatggcagctttcttaagggcaccaagttatggatcatcatggagtacctgggcggtggatccgccttggacctcatgaaggccggctccttcgaggaaatgcacatcgggatcatattgcgcgaagtgcttaagggcctggactacctgcactcggagcgcaagctgcatcgcgacatcaaggcggccaatgttctgttgagcgaacagggcgatgtcaagctggcggactttggagtcgctggccagctgaccaacaccacatccaagaggaacaccttcgtgggcacgcccttttggatggcgcccgaggtgatcaagcagtcacagtacgatgccaaggcggacatctggtcgttgggcatcacggctatcgaactggccaagggtgagccgcccaattcggagctgcatccgatgcgcgtgctcttcctcatccccaagaacaatccaccccagctgacgggcagctataccaagtcttttaaggactttgtggaggcctgcctaaacaaggacccggagaacaggcccacggccaaggagctgctcaagtacccgttcatcaagaaggccaagaagaacgcctatctgattgacctgatcgaccgcttcaagaagtggaaggtctccaagggcgacgaaagtgagacggagtctgagaactctgactcggactcggacgccaagcagggcggcagcagccaggatgagccctggatcatgaccgtcaagggcctgcatatcaacagtgctccgcgggcgggtgtcaacagcttccagttgcaggagcacgagctaaccatgcagaagctgatgcagaccacacactcgccagccggcggtggtggcgtgcaagcgtcccctgctgcaaatgcattatcgtcctctgtgtccgccgtggcggcgtcagcttcctccgtatcggtcattacagccaacgaaggtgtctcctctgcatccgccctgcccccccagaacagtcacgtccacaaccacaaccacaacaacattaacaacaataacatcagaaacttgagcaacaagcatgccaccaccaccatgctgaacgcagctcctccgccgagcagcgtcacaagctcgtcgtcggccagtgagctgcagcagaagcgttccagctcgaagccggagctgcgccagtcgcgatccgccgcccctctggatcaagtagaggatcgccgtgcctctttgggcctgccattgcagtcgtcggttccgactccatcgacggctgagcagcagcaacagcgccgcagcagccaacgtgaatcattccatgcaaataacgccgcgctggttgccagctgcagcagcagtagcaacaaccacagccacgaggagcatgtggccaccaaccatgccagccatgtcaagcactctggggcgggacaacgcctagtccaaacgaacagcgcctgtctgaacaacttcctcttccccgtgctgagcgacatccagcgaaagtactccggcggaggatctgcaggaagcggaggatcaggcggccgtaacataggcgtcggcagcgacatcggcgacctgaagtctgtgttcgagctggccgaacgttccagtccgggagtgagcgacctatttatgaaagagctgatccacatgctcgttcctggttactcggagacgcgaatcaatacgatcatggaccgcgccatacgcaaccgcaagtag

SEQ ID NO: 10740 - protein, 642 aa, DROSOPHILA
MSWTEKVDPELIFTKQERIGKGSFGEVFKGIDNRTQQVVAIKIIDLEEAEDEIDDIQQEIMVLSQCDSPYVTKYYGSFLKGTKLWIIMEYLGGGSALDLMKAGSFEEMHIGIILREVLKGLDYLHSERKLHRDIKAANVLLSEQGDVKLADFGVAGQLTNTTSKRNTFVGTPFWMAPEVIKQSQYDAKADIWSLGITAIELAKGEPPNSELHPMRVLFLIPKNNPPQLTGSYTKSFKDFVEACLNKDPENRPTAKELLKYPFIKKAKKNAYLIDLIDRFKKWKVSKGDESETESENSDSDSDAKQGGSSQDEPWIMTVKGLHINSAPRAGVNSFQLQEHELTMQKLMQTTHSPAGGGGVQASPAANALSSSVSAVAASASSVSVITANEGVSSASALPPQNSHVHNHNHNNINNNNIRNLSNKHATTTMLNAAPPPSSVTSSSSASELQQKRSSSKPELRQSRSAAPLDQVEDRRASLGLPLQSSVPTPSTAEQQQQRRSSQRESFHANNAALVASCSSSSNNHSHEEHVATNHASHVKHSGAGQRLVQTNSACLNNFLFPVLSDIQRKYSGGGSAGSGGSGGRNIGVGSDIGDLKSVFELAERSSPGVSDLFMKELIHMLVPGYSETRINTIMDRAIRNRK

SEQ ID NO: 10741 - DNA, 3293 bp, DROSOPHILA
cggcggtggtccctccaccgtcagtgaaactatgttctcgccgcgcagcaatacaaagcccagcacgcgcttctcctcgcgctcgggcaccttggaattcttcgagcgaatcttccggaactcctcgcagtcgccgaggatcaagttcatgtgtttgtcgaaggctttgaaggtaccgatgaaggtacgcgagtcctgcagcacgattcgcacccgataattcaggtgctgaatcattttgttgttcttgccgatcgtctgaaataaaggaattcaaaggatttaattgtgaaatacaatagcatgcataaaagtcgcgccatcttttgtaaaccatttcgaccctttaaaaaagccggtatttataaaaattttaataaaccacagagtttgaaatagcaaatctcagcgtaatatcgaagatcactaaaaatcataattttaaacaaatataaaatagttaattagccaaaacaaattgttttatttattcgcatgcatgtttgtatgtatgtatgcctatgtaaatacgaaatcgcaaccgcgaaagtaagaatctatgaattaatacaactaaacaaaacttaaccattgcagtcagatgcttaaaacagtgtttttacttaccattttatttgatttctatgttaattctatcgcttgtaaataaaatacagatgccggaacctcaccacggcttttttcgataggcatgaagaataaatcgagtggcgtgtgcggcggtcagcattttctggtgtctttcaatcgagcctatcgaatataaattttttattgataatccacatgattttttaaacaaacattcgactatccctagcaaaagaagagaaaaaaattaaattttttttaaatcttatgataaaaaacgaaaaaagaaaaaatttgaatcagtatgttttttctcaatttttttcgttagagatggtcgaattttcattaaaaaaatcatgtggcggcacttatcgatatcgataggcagtggccatgttatcaaacttattcttattcatcagccacgtcattgtttatgccgacattctgacaagtttttttccgaagcggcaaagccctcacatctctactcgttggcaaattaggcgaaaagtcattttggtaacgtatgcagctgttgaaacactgaatgccgccattattgctatagtatacactcccattttcatataggcgtgcgttccgtgacgcagccgcagcgaaaggaagtagaacaatcaaacagccaaccgggcagccaagtagccaagtcggcggattagatcacgatgaatatctttcgctttgctggggatctgtcgcatgtgtttgccatcataatactgctgctgaagatatggaagacccgctcgtgcgccggaatatcgggcaagtcgcagatcctgttcgccgtggtctatctgacgcgctacctggatctgttcaccacctacgtgagcctgtacaactcggtgatgaaggtgttgttcctggccacgtccggtgccaccgtgtatttgatgtacgtgaagtttaaggccacctatgaccacaatcacgattcgttccgcatcgaattcctgctggtgccgtgcgccctgctctcgctggtgatcaatcatgagtttaccgtgatggaagtgctgtggacattctcgatctatttggaatcggtggccattctgccgcagctgttcctagtgagcagaaccggcgaggccgagtccatcaccagccactacctcttcgccctgggatcgtaccgtgcactctacttgctcaactgggtctaccggtacatggtcgagtcgcactacgaccttatcgcgatcttcgccggagttgtccagaccgtcttgtactgcgacttcttctacttatacattaccaaagttcttaagggcaagaagctccagctgccggcataagcggatgatggataagtgcatagatgtgggacatttgtgttttgtcggcacacatcatcaatcgacgtcagagtaaacaagcgagcgatccacggcccgtttgacaacgcgtatttcgttcatattatacaaaagatacataatcgaggggagcgcctaagttgtaattatttaatgagaaataaaccgaaaatcgaaagtacactataaactatgcaataccgacatcgtacattgaaaatgtaacaaatgtattaatctccgttttccgaactgcactcacaaattttagaatccaaaaatattaaaaaaaaaaatcattactccagtaagagataacgttaattgacaaaatcgaaacaaatgttttctcttttgcgcggaggcttatctgattcgcaatagtatcacagaagaggtcatagatttctttgtttaattaagaatttaaagttatgcattaaatagctcttaagtcgactgtatcctaaaaatccgagtaaagttaagtcttattgtgtggctaatagtaaagtaaatgatgagcgatgtcaacatataatacacataatattctgaaaaataggccgcaggatcgtaggaactccatgtgctgttttgcacaacttctattgaattccgaaaagatatattaaatttctgcaacaccctcgtttccccttgcacgcttcgcagtcatgccagatgcaaatggaaaatttaatttatatggagatcatgtacgaaacaaatacgaacctaatgtggcataaataatattttaaacacttttgcagatattatattataaacaaagtacaataaacaactcgattttcttttatttattagattacaatgcaaagagttagtaaggatgtataaatatatattacatctctataaattgtttagtttccaaaaacttgaagcactgtgccgttatcaaaaaagggggaatacccctaacactcggctgttatctgtaaaaatatttacagcactgccacactgcaaaaatgtcataatcaaaacaaaatgagaagaattggtcttttaaatagtttaatgcgccagaaaacgactgccagaaacttgtttcagttcggcaaagttaaggggtatgggctccggcttatctctttcaggactctattctgatgggtatacttacagagatactggcaaatatgaacagatcgtgtccaccggccaagtttccccggaacgttttgtgcccgaggagatcaagaaaccggcgtactacttcaagaatatgccaccgggtaacacgctgggatcgcccgaaatcaaaagccaggttcagattgatgccatgcgtctaagcgg

SEQ ID NO: 10742 - DNA, 1221 bp, DROSOPHILA
cagtggccatgttatcaaacttattcttattcatcagccacgtcattgtttatgccgacattctgacaagtttttttccgaagcggcaaagccctcacatctctactcgttggcaaattaggcgaaaagtcattttggcgtgcgttccgtgacgcagccgcagcgaaaggaagtagaacaatcaaacagccaaccgggcagccaagtagccaagtcggcggattagatcacgatgaatatctttcgctttgctggggatctgtcgcatgtgtttgccatcataatactgctgctgaagatatggaagacccgctcgtgcgccggaatatcgggcaagtcgcagatcctgttcgccgtggtctatctgacgcgctacctggatctgttcaccacctacgtgagcctgtacaactcggtgatgaaggtgttgttcctggccacgtccggtgccaccgtgtatttgatgtacgtgaagtttaaggccacctatgaccacaatcacgattcgttccgcatcgaattcctgctggtgccgtgcgccctgctctcgctggtgatcaatcatgagtttaccgtgatggaagtgctgtggacattctcgatctatttggaatcggtggccattctgccgcagctgttcctagtgagcagaaccggcgaggccgagtccatcaccagccactacctcttcgccctgggatcgtaccgtgcactctacttgctcaactgggtctaccggtacatggtcgagtcgcactacgaccttatcgcgatcttcgccggagttgtccagaccgtcttgtactgcgacttcttctacttatacattaccaaagttcttaagggcaagaagctccagctgccggcataagcggatgatggataagtgcatagatgtgggacatttgtgttttgtcggcacacatcatcaatcgacgtcagagtaaacaagcgagcgatccacggcccgtttgacaacgcgtatttcgttcatattatacaaaagatacataatcgaggggagcgcctaagttgtaattatttaatgagaaataaaccgaaaatcgaaagtacactataaactatgcaataccgacatcgtacattgaaaatgtaacaaatgtattaatctccgttttccgaactgcactcacaaattttagaatccaaaaatattaaaaaaaaaaatcattactccagtaagagataacgttaattgac

SEQ ID NO: 10743 - protein, 212 aa, DROSOPHILA
MNIFRFAGDLSHVFAIIILLLKIWKTRSCAGISGKSQILFAVVYLTRYLDLFTTYVSLYNSVMKVLFLATSGATVYLMYVKFKATYDHNHDSFRIEFLLVPCALLSLVINHEFTVMEVLWTFSIYLESVAILPQLFLVSRTGEAESITSHYLFALGSYRALYLLNWVYRYMVESHYDLIAIFAGVVQTVLYCDFFYLYITKVLKGKKLQLPA

SEQ ID NO: 10744 - DNA, 3019 bp, DROSOPHILA
tgacattgaaccagtgtctgcggagtcgtgtctcctccatttggcgattcaattgcggctgctgtataaatgaagattaatcgccgcatacattgcatggctgtagtgagaaacgaagccgaaattaaacataagtacgaaatgaaaattatattaacatttttcctttttaacagcaccgttttaatgctctgcgaaaattcaaattggtcgatttaaatatccataaaaatgtttgaagtagtaaacaatatgattaaatattcaaataagtaacgtcttaaattaccgacaagctataaacaatatatcgtgtattgaaggtttaagctctatttatgcaaaaacctattaaaatatgtttgcattgaataaacaaataaaatacgggagtaagcctagtatacattaaatacattcgtaagaatagttaatatataccaacgattcccaacgattctctacagcgtcggtaaatttgttccattaattccaaactttacttaaacctgccaagcggcaagactgaaaataataattaagaaaattcaacaacaaattgaatggatggcgcaaaatgaaaaaggcaaatattcttagaatttcgcatagaaatagtaaacttgtaagacaaattgctaggcgtttcgtggccaaatgtgctatgtgcgctggcaattaatgatgcagccatggctcagcagtttgcaagtggtgcggtggcgtatacgcgatgttcccagacagcgcacattgcgtatccgccgagtgcgccgacgtacttgagacttttttaaaccagacaagttgctggtgaagccagccgcttgccgcattgtgccgacatgaagtgcagttcttaaccttcctttgggagctccagcttggagttgaagggatggcaggctgctgactcagccgaagtttccgcctttcggagctataaaaaggtgcctcgattctgggttagttcatcagtaatattgagcctccagcagtgattacacagcggttctaagtcggtctaacaatctttttttttactatatttttttgagtgactaaagagttctaaggatgcgtcacgctgtgatccttgttttcgtgtgttgcctgctgatcgccttaacctcagccggtttgctgggcggtggaggcggtggtggtggctacggcggtggtggtggtggtggctacggcggtggtggtggtggtcagagcggctacggcggcggtggccaaaagaacggaggaggcggccatggaggtggcggccagggaagctacggaggcggtagccaaggcaagtgaatatatttgggatatgcctatagttaatactaactataatccgatattacttctatgcctaatttgatttaataacttaataatgaaatggattttgttataatatactttattggttctaaaaaactcattttacaaaaacgttttatggtatgtaaatagttaaaatgctttcagcatacaaatgtttggtcaaaacatttagaaaatatgtacataataaatatttgagtaatttataacctcatttaaaaaattgtcagctaatatttaaaatgtataatttaccgatgttagggttaaggcttacgatatctgtaatatttatatacacttgccttctaggtggacatggaggcggtggccaaggaggttggcagaagaacggaggaggtggtggacaaggaggctatggaggtggcaatcaaggtaaatattaagttcaattagtttaatccaagattacaatgcttttcttaacctgtatattcatttcaggtggccacggaggacaaggaggttatggcggcggcggtcatggaggcggtggccatgcaagcaagtccttggccggcaatcgcggtagttccgtgtcctggcagggcggaaatggaggcaacaagaacggaggcggcggaggaggtggtggtggcctgtacggtggtggtggcggtggaggtggcaaacaacatggcggtggctggtaatcaaaccaccaggagcagctaatccaccgtctgatgctgacttgtgttccatggcatagagatagagacaatccctagattcttctatttttcttctatcgaaagcccaatttttcctgcttttaatgttttttatactaataaatcttgtttatgcattttgtaattatatttgtttttctatggggcacattacattatctactacattatcggggaagtaaaattatatgaaaaattataatctgttgcaaaaattgtatcattttcaccaaagaaataaaaatagttaatttagatgcaaaaattaaaaaagttggcggcaatggcaaataatatacgcccaaaatatatttactatacatactagctctttacattttcaaacaaaaattttcccttaattttcttgattcattttttaaattataaataattgaataaactcacccataaaaataaaaacgtgggataaaattactttcttgtaagatttattcacatagttagatacacaaaaaaaaaaaatggttaatttaagggcagaattattatgtacaggttgagcagtggatagtggtgtcgcctcgtcgccgatttttctcggatggatgccgttttctttccaggatctgattaccagctccagccgctgcctccgcctcctccggcggaccaaccaccgccacctccaccagaggaccaaccgctgctaatcttgctgggccaagcggaggaccctccggaggaccaaccaccagatccaccgccgctcttccagccgccgcctgaggaaccaccagatgaccagccacctccaccgccgccgcttttccaaccgctgcttaagcttcccaaagcttgggatttccaactggagagactggacagtgcactggataatcccgagctgcctcctgacttccagccagagctgccggaacttggccagccggaggatccaccggaggaccagccacctgagccgccgccgctcttcc

SEQ ID NO: 10745 - DNA, 601 bp, DROSOPHILA
attacacagcggttctaagtcggtctaacaatctttttttttactatatttttttgagtgactaaagagttctaaggatgcgtcacgctgtgatccttgttttcgtgtgttgcctgctgatcgccttaacctcagccggtttgctgggcggtggaggcggtggtggtggctacggcggtggtggtggtggtggctacggcggtggtggtggtggtcagagcggctacggcggcggtggccaaaagaacggaggaggcggccatggaggtggcggccagggaagctacggaggcggtagccaaggcaagtggacatggaggcggtggccaaggaggttggcagaagaacggaggaggtggtggacaaggaggctatggaggtggcaatcaaggtggccacggaggacaaggaggttatggcggcggcggtcatggaggcggtggccatgcaagcaagtccttggccggcaatcgcggtagttccgtgtcctggcagggcggaaatggaggcaacaagaacggaggcggcggaggaggtggtggtggcctgtacggtggtggtggcggtggaggtggcaaacaacatggcggtggctggtaat

SEQ ID NO: 10746 - protein, 133 aa, DROSOPHILA
MRHAVILVFVCCLLIALTSAGLLGGGGGGGGYGGGGGGGYGGGGGGQSGYGGGGQKNGGGGHGGGGQGSYGGGSQGKWTWRRWPRRLAEERRRWWTRRLWRWQSRWPRRTRRLWRRRSWRRWPCKQVLGRQSR

SEQ ID NO: 10747 - DNA, 6141 bp, DROSOPHILA
tatgtattttcttaactctggcagagcaattcttattctttcactaatataatagttattaatttccctaagattatttaactcgttagcagttccgaaaagcttaaataagattaacttattcatttattttcctattcgacttgtgtcaaagcttacaatatataaatattagatgttaactattttatttctttacccacttctgtaattacaaaacccatttggcagcgttgccacataatattgaatattggaaagcgttgcatcgatacccgctaaaaacttaatgttgcagaatgaatttacatcgagtccctcatttttagtttattgtaaatggatgtagttatcgagtataaataaaaacaactggtttccaaacgatgcaactaaaatgattttttcgccatcactaaggattcaatttcacatcattcaaaataattttctttaagcttaatatcgcaattgatgggttattttaatacataaaacacataagttacttatatctgaaaaagaaaatcgcagtgccttcaatacccatgcatacaccaaaaattcagatatttcgttttaatgtactttatttatgaaatgtgttacatttttctttttttcttttgatatagcgaaacaatacatgaactcggcgaaaagactttcacaaatatgtgttttatataaaaatttcttaaacagattactacaagtatgggttttctacggttggtacccacttttgcctgggtacagatcgtcagattcgtcggtggttgtctgcgacccgggagttcgcgaggagacaaccagcaaggaatctgtgacagaacggtgattttcctgacgaaaaacgacccgacgagtcctagctataaaactttctcttaacatgttactttacgtcagaacataaattaccaaagagggtgaaacagatatgctaagacaatcttatcaactaagggaagggtattatgtggtctggcctgttgtattacataattgagcagatggatcggccctcggcagcgaccgcggcaacatcagccacctctacaacagggtcaatgttttctccatcgctggactccttgtcgccatcctggccattgacgttcttatcctcgacatccttcttggcggggatttcctccgctccggcctcctgaccaacggtcacgtcttcggccggttgttcctcctccacatcaacctcttctggtacgccagtcgtagatgtgttcagatgttgctcctccacgccggaactgttcggctccagacgcagacgggtcggagtaccgattgttgccttggagaatctcgagcgcagcaagctaaagggagaagccaaattcaggctgaacaagtcgaagcgggcgcgctttggcggcgacatatccacgtcgtggcccaggtcactggtcgactgagaggccgtcagtggtgggggagtgcgttcacgcttgcggccacggccaaagaatgaaaatgaaaatgacgagctgttggggatctctgatccgactgtggcattcatgcttgcgttcgtgcagttcgaggtgtccagatcgctgttcccgcacctgtaggtgcctattttcgagggcgtcagtgagtcgatgggtcgtatgctacgcctgccgctgatctgggcgaaagtgcgagccggagttcctgccggcgagctggaagtctgggcagccagctctacctcggtgctttgcttgttgctaccacggaaactgaagagactgcgtccgggcgtggatgtagccgtcggcacggcattcaaattgccgtggacgctgcgtatgggagaggcatccacttgtagcggttccatatcgacatcttcttgtggagtcaaagagcccgatgtcgatgaagaaactgcttcggtttttatcttctggacaggcgaagcgttgcttgccttgctgatgggtgacttttgctggctacccgacttgcgtgtagacttgcgatccttagtaggagtgctgagatcgggaataaacactacttcatcgatgattaccgcagcatccgcaggcgtttgagaagcaggagcagtactctcaacggtagcatcatcttttttggtctctccgttgtcgtctttgtcggagggaacttcagctaccaccacctttttttcggaagccacctccttattttcggataccacctccttattttcagataccacttccttattttcagataccacctcattttgcttattttcggataccacctccttttgcttattttcgaccacaacctccatatctgtcatctcggcagcgccatccttatccttattctcggcacccacttcctttgccttcttttccggcaacttatctttagatttctctaccttctggtctttgcctgttgagctgccattctgtgacttatctttgccatttgtgggcttgcttacgccgttctggctggatccggtggatccagtcgaagtggtccgcggttggttgctcttttttaccggcaaaaatgactctgtgatctttttgttcccattttgggggctatttgagcggccgttgctgccagaagattgctgcaagcgcgtgacggtggaaccgccgctcagcgagagtggcagacgacgtcccgttccagtgcctgaagtggtacctcccccgccgcttgtgttgctagccattttgcttaacattgattgggtttccttcgatgcgttgcacgatctctgcaagggagcacaaacaaagagaatattttattcgttgatttcagagggctgtgaaaacgaaaacaaaaaagtaaacacgaattgatttgcggtttgtttacaccacattccttgcgagaaccggctatgaaatcaatacccccacccaattaccacagatttgctgttcagtatgggaatgtaatcacagtttttgatattttctacgctaagcgttttatttctgattttctagcacgtccgcacacattcaagtctgaagcttaactctaaggtatcttcatcctgacccggtttaagtagctagacggggaatcttattcattgcaggtacgtgaagtatggacaatctacctgccgatgcagctgccatttatgacggacatatgtgcagagattaggatgtgttaattgccgggaataaacggtcaaccatatgctaatttctacctctaaatttcgaattcgctcaaaaaattctgcttcgaattttcggtttttctgctcgctgactatgtttttttttgtttgtttctgcttgagtggctttcacttcccccatatttttaactggcttccgttctattaaatgcattcaaaacaaactgagacacaaacttaacaaatacagaccaacacgcaaagctggttgccccagtgtgttttccgttttcgctcgccttgcaagtgaaatgacacgaaagggtaagaacggctgaagtgaagaaattcgtctagaatgccaagagatggaattttcccagacagctcgatgccagataaatgcgaaagttcaattttactttatccggattgctacatactctaaccaattatttaaatggcatttgactgattttttgtgattatagacttttgtgggttttgttgagtagaaatattgactactaatttaagactaataaacgttatctaataaataataaattggatacaaacaaataatgcgcgagaaacatataaaaatgtcatataaatatgtatctttaaattttttttgtttcaatatacctttgtgatcagtatacctcaatacttgttgtgagggtatcaaaactagttgcacccaggtgcatttatttaagagaaacgtagggcaaggagggaacggggaattcgcttagaaggaaattgcattgaccgggtttctttttattttgtttttagaaagtggaaatgcgaatgctgaaaaattgcggacaacgaacgatgctgcgcaaaatacataaaaaataatgcacacaattgcagcgaaagactgcaaaaatgagaaatgaagagaatgaatgtttttgcgaggtttgccatgcagatgcgagtgtgtgagtgtgtggcacacatgtatttatagccaagccctcttttatgcggaattatcactgttattgcagtgccctttcgtcgtttgttttgatatttgcttcgcggagttgattaaactcgagcataaatgcctctttatatggtcgagtggttaatggcggttctgctccaagtctagttaatcaatttgaacaagctgcgatcggatcggcaaaaaaaaacaaacaaaaggaagagtacaaaaaaatcagaaacccacacatgtgcagcgacaaactgtctgtgagtgggcaagaaaaggcggcatacagtgcgcgccaaaatattgcatacagtacaaaagcaataaatatttgactagagaaatctgaatcaaacattactattttgatagacatatttagatagctaccattgtgttattgaatctcttatttatttgtatacagaaaacgatattcaaggatgtaacgctgcagtagataatattgtatgtactatatatttagatatgcttctccaagctacttataattgaaaacaaaaataaactatagtttgatatttcgacatcccaggttttttgacctggtccactatgctttgccaccactgtaccatgcaattgtaggaggctgataccgcgttcgttttttaaaatggcggcgcgacagccgcaattggcgataatttgtttggagaaaggaaaaaaaatgtgagctcttgggcgaggggtgcaataaagcccttttgcagggcaataaaactgatgtttctaacgcctgctgcttcatattttgcgcacattttgaacatttgaattattcctttgtacgcgcacaaatttatgtatgtatgctatactatcctaccgcaacaaaaaggatgcgcagacagtgcccatcgaaaccagcagtattttagctttttgtaaatcaatataaacataagcacacccaccttgtagcgttctagttctagcagcacagctaatacttatacagaaattactttgcgacaaattaactgatttcaattcaaccgacgccgatacaaacaaattataaccaacgcgctagtgggaccttagctaccacgcggagaaataccacgtgctgccgatcatcgttttgctttcgataagtcacgatggttcacgtcttggaatttctacatctatatgtaaaaaaaaaaaaaaaaaaattatcagaatagtgaaacagtacaaccaactttaaagttgtaataattaaaattgtttgtaaatgtggtttaatatcatgtataccatttattttataaatatccaccagctggttggacatctggcaactcctgtcattacatgctttcagtgtcgagcgttttccagcacttgcatgtttaccttaagaagaagagtagaaaaaatcgttgtgtagtggcaaaataaataaatacagatgtgagtagcagtaaataaaacatacaaagtgcaaaaaaggcataaaaagtgcatgaccctcgcatagtttagtttccagctgggaaaccttttatttgtctacgatcgtacatttatctgcatgtgaaaacctcaatgaaacaaagggagaaattaacggtgtattttcccagccgatttacgtggttatatacataaatatatgaagtatctgtgagatcttgaaatccctggtgataaagtgtaaatgtttgtcctgcattgcggtaatctcttacaacaaagtggtttgttttaagtggccttctttcgagttcagtttcaatggcctttatcagctgtttggcacatggcgttggaagtgcgggtgtgtgtatgtatgtaaatagtatgtacagtacgtacgtgtgtgcaagggtgacagctgtcgccccagggagagcaatgtaagtgagtaatatttgtttatgtgaaagcaaagttcaacggtacctgcaaacacacaaacacacatccccaacatccgtgctgattacgctgctgttttcacctacaccgacgtaccactgtgacagtgtgtaaggttttgcctcttcagcatgat

SEQ ID NO: 10748 - DNA, 1937 bp, DROSOPHILA
gcgtcggttgaattgaaatcagttaatttgtcgcaaagtaatttctgtataagtattagctgtgctgctagaactagaacgctacaagacttgaatgtgtgcggacgtgctagaaaatcagaaataaaacgcttagcgtagaaaatatcaaaaactgtgattacattcccatactgaacagcaaatctgtgagatcgtgcaacgcatcgaaggaaacccaatcaatgttaagcaaaatggctagcaacacaagcggcgggggaggtaccacttcaggcactggaacgggacgtcgtctgccactctcgctgagcggcggttccaccgtcacgcgcttgcagcaatcttctggcagcaacggccgctcaaatagcccccaaaatgggaacaaaaagatcacagagtcatttttgccggtaaaaaagagcaaccaaccgcggaccacttcgactggatccaccggatccagccagaacggcgtaagcaagcccacaaatggcaaagataagtcacagaatggcagctcaacaggcaaagaccagaaggtagagaaatctaaagataagttgccggaaaagaaggcaaaggaagtgggtgccgagaataaggataaggatggcgctgccgagatgacagatatggaggttgtggtcgaaaataagcaaaaggaggtggtatccgaaaataagcaaaatgaggtggtatctgaaaataaggaagtggtatctgaaaataaggaggtggtatccgaaaataaggaggtggcttccgaaaaaaaggtggtggtagctgaagttccctccgacaaagacgacaacggagagaccaaaaaagatgatgctaccgttgagagtactgctcctgcttctcaaacgcctgcggatgctgcggtaatcatcgatgaagtagtgtttattcccgatctcagcactcctactaaggatcgcaagtctacacgcaagtcgggtagccagcaaaagtcacccatcagcaaggcaagcaacgcttcgcctgtccagaagataaaaaccgaagcagtttcttcatcgacatcgggctctttgactccacaagaagatgtcgatatggaaccgctacaagtggatgcctctcccatacgcagcgtccacggcaatttgaatgccgtgccgacggctacatccacgcccggacgcagtctcttcagtttccgtggtagcaacaagcaaagcaccgaggtagagctggctgcccagacttccagctcgccggcaggaactccggctcgcactttcgcccagatcagcggcaggcgtagcatacgacccatcgactcactgacgccctcgaaaataggcacctacaggtgcgggaacagcgatctggacacctcgaactgcacgaacgcaagcatgaatgccacagtcggatcagagatccccaacagctcgtcattttcattttcattctttggccgtggccgcaagcgtgaacgcactcccccaccactgacggcctctcagtcgaccagtgacctgggccacgacgtggatatgtcgccgccaaagcgcgcccgcttcgacttgttcagcctgaatttggcttctccctttagcttgctgcgctcgagattctccaaggcaacaatcggtactccgacccgtctgcgtctggagccgaacagttccggcgtggaggagcaacatctgaacacatctacgactggcgtaccagaagaggttgatgtggaggaggaacaaccggccgaagacgtgaccgttggtcaggaggccggagcggaggaaatccccgccaagaaggatgtcgaggataagaacgtcaatggccaggatggcgacaaggagtccagcgatggagaaaacattgaccctgttgtagaggtggctgatgttgccgcggtcgctgccgagggccgatccatctgctcaattatgtaa

SEQ ID NO: 10749 - protein, 566 aa, DROSOPHILA
MASNTSGGGGTTSGTGTGRRLPLSLSGGSTVTRLQQSSGSNGRSNSPQNGNKKITESFLPVKKSNQPRTTSTGSTGSSQNGVSKPTNGKDKSQNGSSTGKDQKVEKSKDKLPEKKAKEVGAENKDKDGAAEMTDMEVVVENKQKEVVSENKQNEVVSENKEVVSENKEVVSENKEVASEKKVVVAEVPSDKDDNGETKKDDATVESTAPASQTPADAAVIIDEVVFIPDLSTPTKDRKSTRKSGSQQKSPISKASNASPVQKIKTEAVSSSTSGSLTPQEDVDMEPLQVDASPIRSVHGNLNAVPTATSTPGRSLFSFRGSNKQSTEVELAAQTSSSPAGTPARTFAQISGRRSIRPIDSLTPSKIGTYRCGNSDLDTSNCTNASMNATVGSEIPNSSSFSFSFFGRGRKRERTPPPLTASQSTSDLGHDVDMSPPKRARFDLFSLNLASPFSLLRSRFSKATIGTPTRLRLEPNSSGVEEQHLNTSTTGVPEEVDVEEEQPAEDVTVGQEAGAEEIPAKKDVEDKNVNGQDGDKESSDGENIDPVVEVADVAAVAAEGRSICSIM

SEQ ID NO: 10750 - DNA, 4943 bp, DROSOPHILA
tgagtaattgaagctgcaatagaaattagccaaaacaaaacaaaatacgtaacaatatgggtggattgttagtaaatgaaacttttgtttcacaacctaataatgtgcattagacatgcaatgagagtgttcggatctgacgtgcaattggaaccagttccctgcactcaagttcgattgaacccgcaatgggttaattcacaagcctcaagtgcccgtgtccttgtcctgggaatccggcaagctggctttgatttccatttgccgagtaattgattttttatacacactcaaggtgtcccttttagggggaagggtaaggcggcgatgaggatggaagggagtgactgagtgagtggagtatacgtgtacccgattcctgtcattatcagagcacatttcacactccagctcgacacttgaatttgacttgaccgccctgatgactggaggcggctcaaccatgcccagctgcccagtcgcgtgctataaactttattgatacggggcgagtggaaacgggtggtctatggacattgggtggttggtggtgggtcgtccagcgcatcgtgtaaatatatccttccgcattatgttgccgctcatccggcaacagtttgagccggcgcctgcgggtaggcaatcccactgctgcttcaaccctcgaaccttcccgttcgtgacgaccgaccaccaccctccccggaatattctgcaaatatactagtactatactacttcgattgagagcactctcatcgaaactccggttaaaactctcccagctgagagcgctgaatgcggcttaatgccggcgataaagtgcgggcccttgggtgcgactcctctcagtcatttcctttcgatttgccgattgggtttgttcccgttcgtcctttgccgatagtcccgtccaacgttcgcgagtcaaaggcgcgcgctaaaatattctgcagaccagaagcagagcagagcagctccagcagtagtcagtcagccgagcagcagtcagcaagtcctttgctcccccaaaatagcatcgcgtagtgtttgtttagtgtagtatacatttgggcgcggcagcagagaaaagcagagtcgcagaagtctctcgaaaaggataacgcataaaggatatagaatatacaacattgttgcgtccgatattttgataccaacgaaaaagaccaccaatcaaacagatatatacgctgaaacgagaatcaatcaatcaatcccaatcaccgaaaatcaaaagcaatagcgttaagccaagcgtgcgtctgtgtctgagaaaagagtgtgtgtgtgttctaaaataaggatcccaaaacgagatccttgaagagctaaagctgcattgtgatttcattttacctgcaaacgcaaccaaacatacgaagattggttttttctatatacaaaataccgactttgtgaccaagcaaacgccaaatttttaaacgttttttgaaaactttacatcaaaccctacaaaaaaaaaacaccacacgcgaaatgggtctctgcgcctccaaggacaaaaaggagaaggtgatcgagggcgaggtggccaatggcgaacccaatggtaccgccacggcagctggcgctggaggagatgggtgtgtatcccggagttccgggctcttatattcaattttttttgtagtgggcctacgactcctagacaggagttgtctgtatatcccctggttgggtgaccgaccgaccgaagggggctgacgtcatgtgtgtgtgtgtgtaagtgcatgaacgctgctctgtcgaaaaagcggccaaaaataaagtgccataaaaaaattattattgccctggtccttcgttttgtccaggacttcggctgggtagccatgttgttgtagtgcgcatgtccttcgacaggaggaaggcagagggcggtggtgggtgtatagtgtgccgtcgatttgcgtattcagcggcagccggcaaaattttatagtcagtcagccaccaccgaaagcaggacacaatcgagaaacaaaaccagagtcaccaccactaaaaaaggggcgttgtgggatcaagggtgatgggtgttcggttctgggtactgctttctgggtgtagcgagctgaaggggaaagggagcgtgggtatatgtggcagtcgcgtgccacagacccaagtcgagtatgagcacatggccataacccgaaactaattgcggggcaaacaggcaggaattgaggaaaacagaaacacaagaaaacatgttgccgacttttgggcgccacaaaatgaagataggcgagtcctttgtagcaataaaatgttgtactgtcgccccagccacgcccttttactaatggtcaataccccattctctccttctctctacgtatttttgcagcaaacaagacaccatggttgatgccgctgttctcgctaaactggaggagggttatgccaagttggctgcctccgactccaagtcgctgttgaagaagtacctgaccaaggaggtcttcgacaacctgaagaacaaggtcacgcccaccttcaagtcgaccctgctggatgtgatccagtctggcctggagaaccacgattccggcgtcggcatctacgctcccgatgccgaggcttacacagtgttcgccgacctgttcgatcccatcatcgaggactaccatggtggcttcaagaagaccgacaagcacccggcctccaactttggcgatgtgtccaccttcggcaacgttgaccccaccaacgagtacgtgatctccactcgcgtgcgttgcggtcgctccatgcagggataccccttcaacccctgcttgaccgaggcccagtacaaggagatggaaagcaaggtcagcagcaccctgtccggtctggaaggtgagctgaagggcaagttctaccccctgactggcatggagaaggccgtccagcagcagctgatcgacgaccacttcctgttcaaggagggcgatcgtttcctgcaggccgccaacgcctgccgcttctggcccagcggccgtggcatctaccacaacgatgccaagaccttcctggtctggtgcaacgaggaggaccatctccgcatcatctccatgcagcagggtggtgatctgggccagatctacaagcgtctggtgaccgccgtcaacgaaatcgagaagcgtgtgccattcagccacgacgaccgtctcggtttcctgaccttctgccccaccaacctgggcaccaccatccgtgcctccgtgcacatcaaggtgcccaagctggcatccaacaaggccaagctggaggaggttgccgccaagtacaacctgcaggtgcgcggaacccgcggtgagcacaccgaggctgagggtggtgtctacgacatctccaacaagcgtcgcatgggtctgaccgagttcgaggccgtcaaggagatgtacgatggcatcaccgagctgatcaagctcgagaagagcctgtaaattgcccgccaaccgccgagcatcgtccccccggctggaggtgcatcgcctccggagttaacatctatccacgggtgccaccagttcggggcatacgcaacaatcaagaacaacaacagcaacacttagaaatcttcggctcgtccgccttgtcgcttttgggcggttcgaactgcaaatatgtctagtttgtagctatggtgtggagctgctgtcccagtccggcaaccttcggcattttcgtatactttgagggtcgcgggcgcaggcagggatcccatcttgcaacaccatcaacacctacagcagcagcagcaacaacggataactatttgacaaaaacatttgcttaattacaaccaaacaatgtaaaacattttgacatctgtgtcaagcaaaaacaaaaaaaggaactttaaatacttttatttaagtcttaagtttataaaagaattaaaattattaaaaaaaaaataaaaaaaaaacttaaaactcaatgaatgttttgtattcaatggatatagaggacatatagggtatacaaatatttagtttattatttatttagagttcatcacggcctttaaccttttgtacacttcacgctttacaactaagctgactttgccttacactcggcttctatgagacccttgattccatcgtgcatctctttgatgatttcgtattcggttagtcccatcctgcgttggttggatatatcgtgcactccgcccttggcctctgagtgctcgcccgaggttcctctgatttgtagacgatacttgtcggccagctttttcatctcgtcgggatcacacattagattgggcagcttgatgtgcaccgaggcgcgaatagaagtgcccagattggtgggacagaaggttaaaaagccaagtcgttcatccctgttgaattgcagctgcttgccgagagcctccacgccgccaaccatgcgatcgtagaccttgcccaggtcgccacccttctccatcgagatgatgcgtatgtggtcctcctcgttgcaccagaccagaaagttcttggcgctattcagaaagatgccccttcccgttggccaatatcgagaggctccagcggaagccagaaatcgatcgccctccttgaacagatagtgatcctctatgagctgctcctgtatgcatttatccattccagtcaatggcatgtatttacccttgtactctccggtgaggctagtcactgccccacaaatcttactctccagctccatgtagtcagcctccgttaagcagggattgaaggggtatcctttgacggctcttccgcaacggacacgcgtggatacgatgaaatggccatcgggatctaggttttcaaaatccgcgcctttgccgaaagcagtcgccggctgtttgtccgtcttcttgaagcacttatggtattcctcgatgacgggatcaaagagatcggcaaaca

SEQ ID NO: 10751 - DNA, 2173 bp, DROSOPHILA
agcagcagtcagcaagtcctttgctcccccaaaatagcatcgcgtagtgtttgtttagtgtagtatacatttgggcgcggcagcagagaaaagcagagtcgcagaagtctctcgaaaaggataacgcataaaggatatagaatatacaacattgttgcgtccgatattttgataccaacgaaaaagaccaccaatcaaacagatatatacgctgaaacgagaatcaatcaatcaatcccaatcaccgaaaatcaaaagcaatagcgttaagccaagcgtgcgtctgtgtctgagaaaagagtgtgtgtgtgttctaaaataaggatcccaaaacgagatccttgaagagctaaagctgcattgtgatttcattttacctgcaaacgcaaccaaacatacgaagattggttttttctatatacaaaataccgactttgtgaccaagcaaacgccaaatttttaaacgttttttgaaaactttacatcaaaccctacaaaaaaaaaacaccacacgcgaaatgggtctctgcgcctccaaggacaaaaaggagaaggtgatcgagggcgaggtggccaatggcgaacccaatggtaccgccacggcagctggcgctggaggagatggcaaacaagacaccatggttgatgccgctgttctcgctaaactggaggagggttatgccaagttggctgcctccgactccaagtcgctgttgaagaagtacctgaccaaggaggtcttcgacaacctgaagaacaaggtcacgcccaccttcaagtcgaccctgctggatgtgatccagtctggcctggagaaccacgattccggcgtcggcatctacgctcccgatgccgaggcttacacagtgttcgccgacctgttcgatcccatcatcgaggactaccatggtggcttcaagaagaccgacaagcacccggcctccaactttggcgatgtgtccaccttcggcaacgttgaccccaccaacgagtacgtgatctccactcgcgtgcgttgcggtcgctccatgcagggataccccttcaacccctgcttgaccgaggcccagtacaaggagatggaaagcaaggtcagcagcaccctgtccggtctggaaggtgagctgaagggcaagttctaccccctgactggcatggagaaggccgtccagcagcagctgatcgacgaccacttcctgttcaaggagggcgatcgtttcctgcaggccgccaacgcctgccgcttctggcccagcggccgtggcatctaccacaacgatgccaagaccttcctggtctggtgcaacgaggaggaccatctccgcatcatctccatgcagcagggtggtgatctgggccagatctacaagcgtctggtgaccgccgtcaacgaaatcgagaagcgtgtgccattcagccacgacgaccgtctcggtttcctgaccttctgccccaccaacctgggcaccaccatccgtgcctccgtgcacatcaaggtgcccaagctggcatccaacaaggccaagctggaggaggttgccgccaagtacaacctgcaggtgcgcggaacccgcggtgagcacaccgaggctgagggtggtgtctacgacatctccaacaagcgtcgcatgggtctgaccgagttcgaggccgtcaaggagatgtacgatggcatcaccgagctgatcaagctcgagaagagcctgtaaattgcccgccaaccgccgagcatcgtccccccggctggaggtgcatcgcctccggagttaacatctatccacgggtgccaccagttcggggcatacgcaacaatcaagaacaacaacagcaacacttagaaatcttcggctcgtccgccttgtcgcttttgggcggttcgaactgcaaatatgtctagtttgtagctatggtgtggagctgctgtcccagtccggcaaccttcggcattttcgtatactttgagggtcgcgggcgcaggcagggatcccatcttgcaacaccatcaacacctacagcagcagcagcaacaacggataactatttgacaaaaacatttgcttaattacaaccaaacaatgtaaaacattttgacatctgtgtcaagcaaaaacaaaaaaaggaactttaaatacttttatttaagtcttaagtttataaaagaattaaaattatt

SEQ ID NO: 10752 - protein, 356 aa, DROSOPHILA
MVDAAVLAKLEEGYAKLAASDSKSLLKKYLTKEVFDNLKNKVTPTFKSTLLDVIQSGLENHDSGVGIYAPDAEAYTVFADLFDPIIEDYHGGFKKTDKHPASNFGDVSTFGNVDPTNEYVISTRVRCGRSMQGYPFNPCLTEAQYKEMESKVSSTLSGLEGELKGKFYPLTGMEKAVQQQLIDDHFLFKEGDRFLQAANACRFWPSGRGIYHNDAKTFLVWCNEEDHLRIISMQQGGDLGQIYKRLVTAVNEIEKRVPFSHDDRLGFLTFCPTNLGTTIRASVHIKVPKLASNKAKLEEVAAKYNLQVRGTRGEHTEAEGGVYDISNKRRMGLTEFEAVKEMYDGITELIKLEKSL

SEQ ID NO: 10753 - DNA, 3309 bp, DROSOPHILA
cgttgttgttgttgcacggattaccatctggcagtgagttctccatattttccttggccaagtcccccggtggtgcagagtctgcggaaacaaacccggccatcgatagtggaaacataaagttattcgccttatactgctccagttgttgctccaaaaagtcctgacctattagcggctgcacgctttgggacataggaagcacagcacctgctccgccctcaatagatgactgataaagtggagcaccactaaccaagctgcgcaccaccaagcgatcacccgaacgctccaccattgaaggcagctccatgacttgacaaaatctgaaacaagcaaaattttccttggattttttcacagaacacttttcaaccgtccggtgcgagttctcctgtaagactgattcacttttccgatggtcctgctaaacttcttttggcttttccaagggctacttcgatatgacagaaaacgagttctcagggacgtgagatgttcaaatgccaaataaaaaattcgtagttctcaccgaattaaggtttaggttttattttatattttataaaaatagcaatgtcattctttctttcacataaccacaatttataaaacttgcttcttgggtgtcaataaaaaacgcatggttccggttcaagattcggttccaagtgtttatgtggttccaatgttaatgttaacataagcctatttaattttagattttaataaataagaattattgtaataaaatattaaacatttcttagtgtatctattttgcatcttaagaaaagttttttaacaggttttatttccatccaaatgataatttcatgttatcgctgaaatgttatttaatattattttgtaatacatttttattatttattttttttcctttccagggcaggacacttaacatcagtaacaagaggacaattagatatttgaacaacctgaaaaatccctgccatagttagtttattttgaaaatcttctagactgcttcaaaggcttctacgaccgaatacttgtcctccattgaagacaaatggatcggtaataggttgacccaaagttttggatctgtacccatctccaggctgttgaagtcgaacagaggggggagcggattgccattgggcatgggcaacgccatggcgtccatgatgcgcaattcatcataggaaccatgactacatgccatcataggtgagattctagcggcggcttcatagatgaaacacgagttcaacagaccgcacagatcctgcggaacagccgtattcaggagataattccaactgggacgagtggtccgtgggtgaagtgaatttccacactttgagagtatttcaggagctcgttccaagccatcggtgcccagcatattaacgatgagtcgcagctgctttcggtcatgtttgtggctggagaagagcggatatcccttgagcagctccgccaggacgcaaccagcactccagatgtccacggcacacgaataaagttcgtacccggcaaaaagctccggagcacgataaagcctggagcaaatgtagcttatactgggctcctggggcaccaggagtttggcgcttccaaaatcacttagcttaagcaccatcttctggttgtctatcagcagattctcgggcttgacgtcccggtgggaaatgcccaatagatgaagatatcccaatcctctgaacatctgatacgagagtatgcggacattgattaggcgctctgcgggctgtagcaccgttaggtgatagttgatatagtccagcaaagtcataggcatgtactccataaccagcaaaacgtagtccactgacggaaagcccaaactcacggacgagtgcatgatgagccggacaatgttgttgtggtcctttagctgacccataatttctgcttcgccctggctcaacttcggattgtaaagggtttgcttaacggccactatttcctcggactcattcacatgagcctggtaaacccggccaaaggatccacttccaatcagatctttaacctcaatcctgaccaaagcaggttccgaacagaggcgaccgacggcataggtgctgatcactgagttcttgggaatgatgagtggaacttgggcatggcgtttaaggggcttttgcttcttttctttattttcttaagaagaaatgagtgatttgaaggaaatcctaaagaattttaggacaaattgacttacccatttttaacgaaactcttaaaaaataactcagatttatttctccaataaatctagcaaggcaatggcttgaaaggaatagtacgaatagcactactgtcacttttcttaggcattgccaccttgttcgatttcaggaatcgtattgtgaatggaaatataagtgttggaaataaaaactttagagttgccgaggattctttcaacctcaacaggtaatatggaatatatatgatatataatttgtatacatttgtttcgattttgccagcagaaagccaaaagtggattatgtatatggggcagagttttaaatgcgataaaatgtcgttcgtcggttcgagccattatcatttccgctttagccgcaacaatctctctctctctctctattcgtttagactgctttcaccccccaccacctccgtcaaagtttatgggccatgcatttgcggaaatgtcgcctgccagtgtattctcgcttttactctgcggttcagagttggaattcatgtaattccattaacacagacaacttccgctggaagagagaaaggacgagcactcacactaatggccgaagcgtgtatgtgtgtgtgtgcgtgggaggatggtctggattttggtgtatttgctcaaacggattttgtgtcggaatccttagatagtgatgattccaaaagcttgtctctttttttgcagagtccaaatattgtttaataaaggggttataaaggggtttcgaaaccggatgttatcgttctgatttgaaaacaaatattgcatacttccaggcgaccacttaaataataagccaataagagatttataactttgattgtgtaaatgaatatacaatatatagtagtgtgtgaaactgttatattgcgcatcactaacaaaacctaaataaacacaactttccgctatcgttggcttcctttttgggttattaaaactaaattcccaaattcaaatggcatattttacgatgccatgaatctgtctccgcgcaacaggtccgctcatcaggacctcaacactccattcgcccgtaaaatcgccatgggaag

SEQ ID NO: 10754 - DNA, 1248 bp, DROSOPHILA
tcaagccattgccttgctagatttattggagaaataaatctgagttattttttaagagtttcgttaaaaatggaaaataaagaaaagaagcaaaagccccttaaacgccatgcccaagttccactcatcattcccaagaactcagtgatcagcacctatgccgtcggtcgcctctgttcggaacctgctttggtcaggattgaggttaaagatctgattggaagtggatcctttggccgggtttaccaggctcatgtgaatgagtccgaggaaatagtggccgttaagcaaaccctttacaatccgaagttgagccagggcgaagcagaaattatgggtcagctaaaggaccacaacaacattgtccggctcatcatgcactcgtccgtgagtttgggctttccgtcagtggactacgttttgctggttatggagtacatgcctatgactttgctggactatatcaactatcacctaacggtgctacagcccgcagagcgcctaatcaatgtccgcatactctcgtatcagatgttcagaggattgggatatcttcatctattgggcatttcccaccgggacgtcaagcccgagaatctgctgatagacaaccagaagatggtgcttaagctaagtgattttggaagcgccaaactcctggtgccccaggagcccagtataagctacatttgctccaggctttatcgtgctccggagctttttgccgggtacgaactttattcgtgtgccgtggacatctggagtgctggttgcgtcctggcggagctgctcaagggatatccgctcttctccagccacaaacatgaccgaaagcagctgcgactcatcgttaatatgctgggcaccgatggcttggaacgagctcctgaaatactctcaaagtgtggaaattcacttcacccacggaccactcgtcccagttggaattatctcctgaatacggctgttccgcaggatctgtgcggtctgttgaactcgtgtttcatctatgaagccgccgctagaatctcacctatgatggcatgtagtcatggttcctatgatgaattgcgcatcatggacgccatggcgttgcccatgcccaatggcaatccgctcccccctctgttcgacttcaacagcctggagatgggtacagatccaaaactttgggtcaacctattaccgatccatttgtcttcaatggaggacaagtattcggtcgtagaagcctttgaagcagtctag

SEQ ID NO: 10755 - protein, 392 aa, DROSOPHILA
MENKEKKQKPLKRHAQVPLIIPKNSVISTYAVGRLCSEPALVRIEVKDLIGSGSFGRVYQAHVNESEEIVAVKQTLYNPKLSQGEAEIMGQLKDHNNIVRLIMHSSVSLGFPSVDYVLLVMEYMPMTLLDYINYHLTVLQPAERLINVRILSYQMFRGLGYLHLLGISHRDVKPENLLIDNQKMVLKLSDFGSAKLLVPQEPSISYICSRLYRAPELFAGYELYSCAVDIWSAGCVLAELLKGYPLFSSHKHDRKQLRLIVNMLGTDGLERAPEILSKCGNSLHPRTTRPSWNYLLNTAVPQDLCGLLNSCFIYEAAARISPMMACSHGSYDELRIMDAMALPMPNGNPLPPLFDFNSLEMGTDPKLWVNLLPIHLSSMEDKYSVVEAFEAV

SEQ ID NO: 10756 - DNA, 4186 bp, DROSOPHILA
gcatcggcgccgcaatgcaaagtgcagcagcattctgtagaatgcgattgcaaatgtggatgcagcttcctcgagcaccgcgcgcggagatctcgatcaaccttgatgttgatttataggtgccgctctgcttggcgcgtctattttagattcgcctcgctgcgtgcccgttgaaatgtcccattctcccagtccctgccgcggatgccaattgtcttgcgtcggtccttctaaggtccgtttctattttccgaactctcagcaccgaatgagtcgtccgccgcagcagtcgcccattggcagcaggattgggacagagatggggacggagatggggctaattggccactcgagagtgctgattgccgtttagatggcccatgctccgactatcacgcacctctgctaatcactcggctatggcgttctcttatctttcgagagctttctctctcctggcactccctacaaataatgaatagggtcctaagattgatagcttacttctatcatatattgtcaattaattaaatatttctaggattaaatatgaactgaattgaagataaagtttatcttctactacatagttatttaagctgttatatgttatgagacccttttctaggatttgtacctactaacaatgtgaaaaaaatataaaatgtcatattttcgtagtttggaaattccctcgtttattgaatttattggtaatcttaataaatgattctatgctttattaagtatttaattgtgtggcttcctttttttgtgaagcgcattaatgagtcgtcttcgtgcaatgaggcatccaaacttctgacatgctcggccagaagtctgaaaactgcttatatggatcgattgttccgcagcactttcgctcaatctttttctcagtgccgcactggcatccaactcaaatcgcttcgagggagagccgagatataaaggcaggacagaccgatcggcgtgccatttgttgttgaatctagttgtcaacaggaatcgaacgtgcgactctatccaatttttctcctttcgttgacctaaaaggtgtgtgagtgcgacctcaatgtcgaaggatccaaggattattacagaaaaagccaagaggactaaggatattaaaactctttttaataagttcggattgtttgatggatttttctacaagtcactaatcggtcttcgaaagttcaatatctaaatataaagtgaagagtaattgcaacgaaacgtattttcaattaatttgatacgtttaaattaagttctatgaactattcttttccgatatttatagagcactgatttagtttcaagtgaataaccatattagcatgagtcaaaaggaaatggaatataccaattttggcaatttttcatggttttatttactgaaatgtgctcaaatggacaatagagtttcacttcacttcttcaatatcttaaaaagttaaatattttcttgagacacaaattagttttctatgttgtcattaaagtagtagaatttaaagaattgagatgtaggtgggagctataaaactttacatatataatcgacagatcgagctaaccgagtgcacttccatctcccttccagataaacaactgccaagatgtgtgacgatgatgcgggtgcattagttatcgacaacggatcgggcatgtgcaaagccggcttcgccggtgatgacgctccccgtgctgtcttcccctcaattgtgggtcgtccccgacaccagggtgtgatggtgggtatgggtcagaaggactcgtacgtgggcgacgaggcgcaaagcaagcgcggtatcctgacgctgaagtaccccatcgagcacggcatcatcacgaactgggacgacatggagaagatctggcatcacaccttctacaacgagctgcgcgtggcccccgaggagcatccagtattattgaccgaggctccactgaaccccaaggccaatcgcgagaagatgacccagatcatgttcgagaccttcaactcgccggccatgtacgtggccatccaggccgtgctctccctgtacgcctccggtcgtaccaccggtattgtgctggactccggcgatggtgtctcccacaccgtgcccatctatgagggcttcgccctgccccacgccattctgcgtctggatctggctggtcgcgatctgaccgattacctgatgaagatcctgacggagcgcggctacagcttcaccaccaccgccgagcgtgagatcgtgcgcgacatcaaggagaagctgtgctacgtggctctggacttcgagcaggagatggccaccgctgccgcctccacctcgctggagaagtcgtacgagttgcctgacggccaggtgatcaccattggcaacgagcgcttccgctgccccgaggctctgttccagccctcgttcctgggcatggagtcgtgcggcatccacgagaccgtctacaactcgatcatgaagtgcgacgtggacatccgcaaggatctgtatgccaactctgtgctgtccggcggtaccaccatgtaccctggtaagacaaatcattcgcttcagcagttgcacttgtgcttaatcctttggtgcactttcaggtattgccgatcgtatgcagaaggagatcactgccctggccccatcgaccatcaagatcaagatcattgcgccacccgagaggaagtactccgtctggatcggtggctccatcctggcctcgctgtccaccttccagcagatgtggatctcgaagcaggagtacgacgagtccggccccggaatcgttcaccgcaaatgcttttaagtctttcgcccgccgcgaaagctcttcaaaggcagcaaccagcagcgaccaacaagcacccatcgagctacccaacaacctcggctcggacagtgatagacaaaagcagcgaacccatcgcacaacaattatcatccaactcagattcacagcagataatcagaggcaacctccggttgtcggtgctcatccttcatggccatttcatcggcagcggtatagcggatttttactttgaagaactaatcgtaagagtcgtggctgtgctccatgtcgagtagcaatcaaatgtatatgaggagcttttaaccctagtcagtgaattgaaagccaaatatatcttccattaaaactattaaatattttaaataaatacatttttctattacccgccccccccccgtgtactgaaaagccctggaggtgcgaaccacgtttggttggtaacagctttaaattccttttaattgacattaaattaattgttaacattggttttgcattagcctagctagttaaatgaaaatacagcgaggatacttggtaccgggacttaggcgatttgggatacaatcgattgaacgttgaaaatctggcagtgataacaatcaatcaagagtgttaattcgatttgatgaatagtttggtttggcttgtgcgatcggggggtatcctaaataatatgagtattcgttttagttacacatacatttgctcccaacttctctctctctctcttaactaactaattgcggagctaagctaatacaactattgtacagaccggcattgcactagtttagccgagctcttcgttttcggtgagtgatggatggatggatgccctaggcttgtttcagggaataatcggaataattgttggggatggagcagaggaaagtgtaagtatattttaattaaattaaattattgcttgaaatgcacttcttggtattgttcccattgctgactttacctaggcaaaggatatctttgcatcttccatcactgcataccggagttggcacaaatacgggcttatctgagcgacgacctatgatgatggataatccctatttgctaattcaaaggctcacatcctctagtatttacaatacttaatacattacatggcaataatatctagttactaatttcgagcgaaatataattatatatatatacagacgatatggttttgttcgggctacttcgacacgattattacagtttatatataactaactaatattcgagaatacttttaaccatcgatagcggcgactctccgtagtggtaattcttggctggggtaaccctgatatgctgggatgctcggattaactttacccttggtccttcccgg

SEQ ID NO: 10757 - DNA, 1572 bp, DROSOPHILA
gtcaacaggaatcgaacgtgcgactctatccaatttttctcctttcgttgacctaaaagataaacaactgccaagatgtgtgacgatgatgcgggtgcattagttatcgacaacggatcgggcatgtgcaaagccggcttcgccggtgatgacgctccccgtgctgtcttcccctcaattgtgggtcgtccccgacaccagggtgtgatggtgggtatgggtcagaaggactcgtacgtgggcgacgaggcgcaaagcaagcgcggtatcctgacgctgaagtaccccatcgagcacggcatcatcacgaactgggacgacatggagaagatctggcatcacaccttctacaacgagctgcgcgtggcccccgaggagcatccagtattattgaccgaggctccactgaaccccaaggccaatcgcgagaagatgacccagatcatgttcgagaccttcaactcgccggccatgtacgtggccatccaggccgtgctctccctgtacgcctccggtcgtaccaccggtattgtgctggactccggcgatggtgtctcccacaccgtgcccatctatgagggcttcgccctgccccacgccattctgcgtctggatctggctggtcgcgatctgaccgattacctgatgaagatcctgacggagcgcggctacagcttcaccaccaccgccgagcgtgagatcgtgcgcgacatcaaggagaagctgtgctacgtggctctggacttcgagcaggagatggccaccgctgccgcctccacctcgctggagaagtcgtacgagttgcctgacggccaggtgatcaccattggcaacgagcgcttccgctgccccgaggctctgttccagccctcgttcctgggcatggagtcgtgcggcatccacgagaccgtctacaactcgatcatgaagtgcgacgtggacatccgcaaggatctgtatgccaactctgtgctgtccggcggtaccaccatgtaccctggtattgccgatcgtatgcagaaggagatcactgccctggccccatcgaccatcaagatcaagatcattgcgccacccgagaggaagtactccgtctggatcggtggctccatcctggcctcgctgtccaccttccagcagatgtggatctcgaagcaggagtacgacgagtccggccccggaatcgttcaccgcaaatgcttttaagtctttcgcccgccgcgaaagctcttcaaaggcagcaaccagcagcgaccaacaagcacccatcgagctacccaacaacctcggctcggacagtgatagacaaaagcagcgaacccatcgcacaacaattatcatccaactcagattcacagcagataatcagaggcaacctccggttgtcggtgctcatccttcatggccatttcatcggcagcggtatagcggatttttactttgaagaactaatcgtaagagtcgtggctgtgctccatgtcgagtagcaatcaaatgtatatgaggagcttttaaccctagtcagtgaattgaaagccaaatatatcttccattaaaactattaaatatttt

SEQ ID NO: 10758 - protein, 376 aa, DROSOPHILA
MCDDDAGALVIDNGSGMCKAGFAGDDAPRAVFPSIVGRPRHQGVMVGMGQKDSYVGDEAQSKRGILTLKYPIEHGIITNWDDMEKIWHHTFYNELRVAPEEHPVLLTEAPLNPKANREKMTQIMFETFNSPAMYVAIQAVLSLYASGRTTGIVLDSGDGVSHTVPIYEGFALPHAILRLDLAGRDLTDYLMKILTERGYSFTTTAEREIVRDIKEKLCYVALDFEQEMATAAASTSLEKSYELPDGQVITIGNERFRCPEALFQPSFLGMESCGIHETVYNSIMKCDVDIRKDLYANSVLSGGTTMYPGIADRMQKEITALAPSTIKIKIIAPPERKYSVWIGGSILASLSTFQQMWISKQEYDESGPGIVHRKCF

SEQ ID NO: 10759 - DNA, 5231 bp, DROSOPHILA
ggtcgctcgtttagaatttctgctgatgcccagattcaaacttatgcggatttccggttgcccaagcaggctgtaatgaccgatcttctcaaatggatagccaatgtgtatgtttcttagatgtaatcgaatttataaaatctaaaaagtttgttgatttgttacatacatataatataatttgaaattctgtttttgcataagcaatattgaaatttaatataaaatgtatatgtatttgattagttagtggcattagaataaattatatgcttttaatctactcatgattttttcactcgaataatgcaaatcgaaataaaactctaaccaaccttcattgaccggcaaataaatatttgttgacttcaagataatcgaatacaaattcgttcattaatcttaaagcaagcacaacattcattcttcgtttgaagatcaaaagaaaataaataaatcttcgaatggaaatcttttgcgaacagaacattgataccatggaaatgattcttccgttgcagaaaaatgtcgaaatttaaatgtttcaacttgttaaaataatccttagaaagtccgataaacttagataccccaaagtgtgtcatataaaaagaaacacttccaaaagacaaacaatctcaaacaaaggtgcatgaaagacatcatcaaaatatatatgcgcactatatactcacctcccttcagcgacacaaaccgaaatttgcggctatatagatagacatttgtgtgtgtattttttctcattatatatagaagtcttatatacagtcgaagatccattatagaatgtgcttttttatgcgcatatgcctcataaatattgtgggaattacttggccaacgtacggggccagagttgccaccaaccatttggagagaggccaaagcagaaagagaacgagatgtgggatcgcggatacttatagatcgcaggcgatatatggctgctgggcatagctggtcattagtattaaatcggtcgaggaacgtccagcacggcgcgcaatatccgttagatacaaaataatctgaaacagagatacacatagaaaatggctgagcagaagaaggcaccattgctgaagaaggaggaggactacgtgaaggccctcgaggggtgagtttcgaaggatcggtggcgaaggaaccttaaggatctaaagtgcattgttccctcgatagattcattaaccccgaaaccgatcaggtggccctgttgctggattacgatggcaccctggccccgctcaccgaggagctgtccgtcatgcccaaggataccgagatcaacatcaagaaactggccgccaacgagaaaatcttcatggtcgtcttctccggtcgcgaactgagcgagatcaagaaccacctgaagttccccaatgtgacctatgccggcaaccatggtctggaggttgagtatccttccggcaagaaattcaagatcgagatgcccgaggaattgctcgagaagcacaacaagctggtgtctgagctcaaggaaaaggtaagttatatacagtttagcagatagcaacgacccagggaaattgaaactaaagaaggtataaaagcagacttcaaaaagttatctatcttcgaagtgtcgtaaggtcgtgaaaagttatttgtgttatttaacagatacaatctaaagtagaaaatagaagttagtgagatcagagatgaaccctcaagccagatcatttactcaaaaatttgaaccttccacaggtcgtgtgctccggtgcctgggtggaggacaagaagatctccgtgacctatcactacaagggcgtcaccgacaagttgaaggccaagctgattgccgaggccaagggactgatccaggcccatggattccagctgatcgagacaccctacgctctggagggcaagccccgcgtcaactgggacaaaggttagtgggaatcaagcgatgctccaaaggggctattaatacaccagtcatcgttaaacaatttgccaactgttgccatccatttgcaagctgtccccatggcattcctttcagcttttccgcacttcggcacctgctcgaagaattcgatttttgactcgacgcttcgatgatttaattattgctaaaatttctctattttctctataccccattgggaatccgacgtgggcgtctttcacaaaaaatattttctacgaaaaatttaacacacacacacaccgctcgaaagttcactcacaaaaatcagacaaaattaaaatgtctgagaaaaatatatagacaagacggcggtagacaaaacatcccgcagccaactgatgtcaaaagcgcgcctaaaactatatatacttgccttcttctatatatattcatatagtcactcgcccgatttcttatgataaattaacgtatctgtgtaatttctcatagacacaagatttcgctttcgtttttcgaaatttttcatcacttgtttttgccgctagtcacaatatttgcggaaagttttgtgttccaattgaaaacacacacttttcggtttgttggggatgtttgtaattttagcttttctaaagatgaatgaagccaaaatcaagcgaaaccaatttaatttgatgacgttttcccctaacgatgcgttacatagttttatgtaagtcgtacagatatgtgcacagattattaaagttgtagctctcttttagtatgcaactttgcttcaatctttcagtttttaagatataaaggtatttcgaatagcaatgtcaatttttttgttcgcctatcagaaaaaaaacattttttttttggatcactgacgacatttaaacatatcccaagttattgatcttttttaatccgaacaaataagcaaaaaatatttttccaaattcgcgaaaaaatattcataattaattcgacccccctcgaggagatttatggacgccactctgtcctctagaagacaaccaacccattccgaaccgaaatgtcgctcaggccaatgagccgtggcgatgagatacatgaaacatctttaagcagatatattcatgtatgaaatgcgtgaaaatcaaaaattaattatgatggtgtacgcctccaaaggcaataaatttataggggccagaacaaaatgcttgcaaaaagtaaaagccaacggaaatttgaaaaaaaaaaaaaaacaaatattattttcaacgggcgcatacaaaagagaagaattgttggtgccgtctgaaaaataagagaaaactgcaacagttcgggaaggcggtggaaaatcggtgaatacgactgcgtcaccaattaaacaaaaatgtggcgttaaacgctagaaacggaagaggagagctgagtaattaaaataattagatggggtagattaatattcagttctaatgttctagattgatatacaaatatactgatttttactgcacaccaaggtggtagctaaatgattcgatttcatctattcaaacactcacttacttggccaaaccaaattacgaaacgaaaaatagagaagatccgcccacgtagacacctaaaaataattcaaacaagatggggaagaattcggttctgtttcttgggggctgcatgcgatttatatgatctaagatgtgtgccgagaagaattttagacatttgaaaatattgttctcgcttgtttattgagcgattttggatgagttccagcagtgcatagcatgtttgtatacattccacatggcttccactagaaataagacatgcttcgaccacagattgcatttatgcaaatacaagaatattttaagaatggtttgctgtgcaaatttgtataccctttaatcttaaataggtgaaatagtaaataagcccattctaattacgtttttgccattgcaggtgagggtgccaagatgatcctggagaagcagttcgacgccgactgggccaagaacctgaagatcgtctatgtgggcgacgataccaccgatgaggatgccatcaaggtgctgcacggcatcggcaagaccttccgtgtgtccgagctgcccacgctgaagacctatgccaactaccagatcaagaccgtcgaggaagttggatatcttctgaaagccgtgcaggcttactacgagaagaagaagaaggcctaagcccaacgctagaggatattaagcctaagctaaattccacgcacactcacactcaacacacatcataattacacgtaaaaaaaaaagaagaaagattcgcccatttgagttgaagtataatgcaatacaagttaacttgctggacaattgctctcgaaaccttttttgtgtctttgattttgccaaataaaatataaatacaatcttttttaaacttacgatttgggtgcttttctttaagtttcttttctatctgcatcttaaaagctttactacatttaggctagattaactttaaatttcgtttttagtaatctgatttccttattttgaaaaatagtactatattcaatatcttttttaatgcttaaatagttcgacgaaaacatgctcactttttgcttttaaaagatgcaattaagttttaaaatacatatataattgaatggttaactgatactcataaatgcagacctattacgtaaattttaaagcccaaatagtctagataacataccaaatccaggtccgatcatttgggatgtgtaaacatgtcttattaagctatgcattactgtagaggtttaattcttgatcgctaagtgctatcccgcgtctgtagaccatttaacgccgttcccccttaaggccacctcgtcctccacctccacggccgccacgggtgccaggtttcgttgtcgtttggggtgcgattgctggcgccgcagcaggagctgtggtcacggcgctctgggtggcgggagcacctggtgcagcagccaccgcgggctgtggaatgcccgtggcaccacccttagcgggcaagccaggagcaccaccaccggccggaagtcccgccggagtagcagcaggatttgccaccgcctgctgctccgcccgtttcggttcactcatattgacgctctcgttgaagaccatgcagtactcgccgatcttgaacacctcgccgttctttccggaataaagggtcagacaatgcctccagatggaggcgtagccctttgtcagtctgacaatatcaccgggtgctatcagtttgcccggctcgtcccaaa

SEQ ID NO: 10760 - DNA, 980 bp, DROSOPHILA
tcgaggaacgtccagcacggcgcgcaatatccgttagatacaaaataatctgaaacagagatacacatagaaaatggctgagcagaagaaggcaccattgctgaagaaggaggaggactacgtgaaggccctcgagggattcattaaccccgaaaccgatcaggtggccctgttgctggattacgatggcaccctggccccgctcaccgaggagctgtccgtcatgcccaaggataccgagatcaacatcaagaaactggccgccaacgagaaaatcttcatggtcgtcttctccggtcgcgaactgagcgagatcaagaaccacctgaagttccccaatgtgacctatgccggcaaccatggtctggaggttgagtatccttccggcaagaaattcaagatcgagatgcccgaggaattgctcgagaagcacaacaagctggtgtctgagctcaaggaaaaggtcgtgtgctccggtgcctgggtggaggacaagaagatctccgtgacctatcactacaagggcgtcaccgacaagttgaaggccaagctgattgccgaggccaagggactgatccaggcccatggattccagctgatcgagacaccctacgctctggagggcaagccccgcgtcaactgggacaaaggtgagggtgccaagatgatcctggagaagcagttcgacgccgactgggccaagaacctgaagatcgtctatgtgggcgacgataccaccgatgaggatgccatcaaggtgctgcacggcatcggcaagaccttccgtgtgtccgagctgcccacgctgaagacctatgccaactaccagatcaagaccgtcgaggaagttggatatcttctgaaagccgtgcaggcttactacgagaagaagaagaaggcctaagcccaacgctagaggatattaagcctaagctaaattccacgcacactcacactcaacacacatcataattacacgt

SEQ ID NO: 10761 - protein, 276 aa, DROSOPHILA
MAEQKKAPLLKKEEDYVKALEGFINPETDQVALLLDYDGTLAPLTEELSVMPKDTEINIKKLAANEKIFMVVFSGRELSEIKNHLKFPNVTYAGNHGLEVEYPSGKKFKIEMPEELLEKHNKLVSELKEKVVCSGAWVEDKKISVTYHYKGVTDKLKAKLIAEAKGLIQAHGFQLIETPYALEGKPRVNWDKGEGAKMILEKQFDADWAKNLKIVYVGDDTTDEDAIKVLHGIGKTFRVSELPTLKTYANYQIKTVEEVGYLLKAVQAYYEKKKKA

SEQ ID NO: 10762 - DNA, 5818 bp, DROSOPHILA
aaggccaagcgcgtcgataatgtggagcaacctatactacatacaaacagacccacgcacccactctattaacttatttaactaaagcgaattgtcgtgtctgcgcactaacaacaggatcagaattaatttaaccagaaatcatatgtacacctgtgtcgatacggtttatataatacttaatataactaaaatctgcgcgtcaaaaatttgccaatgggagcacatattatatgcatctatttgtatttgccttggagacaccatcaaattgcatgacttgtttaaatttaaagccacggaggatcgaagatccaagggcttgctgcattcgtttatataactatcaatctaagtgtacgtttaaagactaaaccacattggatggtccacccgatgtcattcccaaatgtttctaatacttagtaaaaacattagaaaatcatgcattgcggttaaagtgaatatacatttgttttacgcttttatttcttctctaggcgttgagttccgtggttagatggcgttccctaatccgttgaaaagccaattccaaatttatttagtactaaatatttgtgttacgatcagagcttgcgtgcaaataacgaaaatccattggtaaacttaagtggatgtagtccgtactgctgaagattgagaaagagacgaaatcgcacccaatttgttgctaatgctgatcaaatttgctatatgtgtatgaaatctttgaataaatgcaaaaatttttgccccataaaaatagcgatgtctttttgataaatgatgtttgggagtatatgtgtgattaccttttcaaacttaaactacagctaatgaattaaaaaaagttaatttccaatttcatctgtcagctttaaatatcccgccaaaaattataataaagttgacaactctgatttaacccagggatcaacgtaaaacagctgtttgctttgacgaggtggcaacgccatagagggttcttgcatacttctcaattttttcttcaggccacaagaaaatctttagatatgaggaattttaaatgaaaacagcgagcaaacagaacgcatcgtgatgccggaaacctaatcaaccactccgaagtaaagtgcaattaaattacatagttttatacaactgaaagcggctggccagccgcataaagtattcgcctacaccagcattgttctaaatgctaaaaagtttattactcattaagcatttgtgtgcctagttagttaattaatcgcagccgaaagatgaacttgacgtacttgttcgtgcttatttggctggccttcctcatcagcagcggcgtgatgctcttctcgcggggattcctattggcccgggtgtccaaaacggagacgagcacctgtcgcaggttgtccacaaatcccaatgctgtaagtactaggtaatgaacgaaatgggatgcatttcaaatcctttgtcctcaaacaggagtacgtactcaccgatgaggttgtgaacgaaatctttaaggatgtcaacgcctcctccaatctgtgtcttccgcaaaagtcgaaggttattgtcctggttgtggatgcacttaaatatgaatttggcctgtacagggcgaatgctacggatcctttgccatatgaaaacaaattggtggtgctccaggagctgctgcagcagaatcctgaccacgcccgcctaatgagattccgagcggatccgccaaccacaacgttacagcgcctgaaaggactcaccaccggcagccttcccacattcatagacattggctccaattttgcctcaccggagatcaacgaggataatatcattgatcaaatagtcaagaacgatctaccagttgtcttcctgggggatagcacctggacggatctgtatcctcatcgcttcaaacgatcgtactcctatcccagtttcgatatattcgatttggatagcgtggataatgagatattaaaacacctgcccaaggagctggaaagtaaggattggcaagtgctggtagcccattttctcggcgtcgaccactgcggacacaaacacggacccatgcacgaggaaatggcgcgcaaattgggcgagatgaacgaggtgataaggtaggcggcatcacatttattggtaaccgcatatcatcatgtccatcattcatttagatccgtggtggcggccatggacaacgacaccacgctgctggtgatgggcgaccatggaatgacggcttccggcgatcatgggggagacaccgatgacgaaaccaacgctctgctgtttgcctactccaagcagcacagattttatggcaatgattcgggctcagatagcgaaatgctgcagcaggtgagataagacaacgtttaatcacggcgcgtcacgtcacagtgataagcaacgatatttgctttccagattgatctggtacccacgctggccaccattctcggcgtcccaataccgtactccaatctaggcctggtcaacttcaacattgtacccgatctgcgagtaccgcatttaaacaagtttcagacccttttgcttcattcctggcagaatgcccagcagatctatcgctacttcttccagtacgctttggagaacaagcgcacattcaacgtggaacagatggaccatctagagactgaattcatactcctcacccaccgagtgcaaaccgtttacaacgaggttgcttttaaatcttttgtacgtgacttgaacaccaatctgcgggacatcctgggcacatgtcgcgaaatctgggtcagatttgaccccactcagatgtcgcagggcctgctgtttaccttcctgccgttgttctttatcttccttgtggtaaacaactctcggccagcggattttccgcacatcttcaaagccaaggaggtcttctatgtatacctaatcaacttggccgctggagtatttggatatcggtatttcaagacattctcctttaaaacagaggagcaaggagtgatcttctttacggcaatatccagtgctgtcatcctggctttccatacactacgtcactggaccagcattgccacgaattggtcagcagtcaagcgatttggacacatgcccacgcgtctgctgcttttcggttccatggcggtgttcttctcgaacagcttcgtcatccaggaggccaagatcttatcgtacctcttggcagcagcgatactactgctctcccacgaacttcttcggctgagtgcccgtttggattttaggacaaaattcaaggcatcacaatttctgcgctccacagcgttaagattgatcctggccagcgttttggcgatatgcttaatacgatttgcctacacgctgtttcgttgccgcgaagaacaaggcaactgctcggattttgtcaacaccggcggagccggattctcccttaaaaagccgggaacgggcaagacctacattctcgccgtcgtggtgctcgtagtgtacaccacgctcacacgattgtatctgcgttcctgcggtaatttgactggcaacttgccaaacgtattgctggctcgctacggacccacggtggcctcgatctgcgccggcggccatatcttgctggccaacagctccatcaaacacatccagcgcacgcatatcgatgccatggctctggtgatctatggtctgctattggtgcagattatcgtactttcatgggctcctctaatgacctttgtgcttcctccgaggagttcccatacagtgaccatcaatggaaacgaaagcattgttccggaaatctttaggaaaatgaagcggatgtacgagggcgatgacgacgagcggcgtagtcacatcccggtggtctacggactagcaaccgtttactcctccattgtcattgcatttggcgttttcttggccctggtaatgatagttcttctcgaaccgcgtgcttccatcggcttggttgtttgcgtggccgtgggagctattctgctcagcgtgcacagtatattacgctatcgaactgccactagttttggtaagtgtttgattttgtagtttcctaaaaacaaattaattacttatgcctactattacttatcacttccctacagagagctgtgtacagccaacttttacggctctggttggctggttcctgctggcgcatttctgcttctttgccacctcgcatcagacgacgctgtcacagattgagtggcgtgccgccttcgtgggacgcaccaccggcatcggacagtcgaatttagtttctggtgccttggtcattttgaacaccttttgtggcccgattttcttcttctgcatgtactccctgcttagtacagagactttttcgctgttcgcactgtttcccaatctcatacgaagctgccggagtggtggcaaagtggatgcgagcacttccatgtcagatttggccaacgaagctgtcggctttgatatgactcgtggcgaactgtcgctgtacgagtacgaagatgtttttctgggaactggcttcaagttggctacccagtttttcatgctacagggactcaaggtaagcgttagcagccatcaaatatcttggttgcattctgatgaagtttcgcattttagattttttgtgccatgttggcctgcaccattcactgccgtcacctgatggtgtggaaaatctttgcgccgcgattcatctacgaggcccttgctaccttcgtcagtctgcctgccctgattgtgggctatcttttggtgttacgcatccaccgtggcgtggacaccctcattaagcgcatcaacaaggccaaggtccactagtctcagccaattaattatttatttcggccttaatacacaaacacgtaataagaaaatgcaactgtttggtggtcttgtagttgtaatcttatttagttaaaatgattgggttcacaaattttccaaaagacacaaaaacgtcatatgatatcgcggatccatggatttacatagttactagtgggtatggcttacaaaattaacacgagcaaacatgacaagaaaatttaagtactggtggggctcccaacctccggttgcgattaagctacaaactatagactcgacacatacgcctctagagtttacgcttccttcatcctcctgcggttaagtacgcaaataagtaacagggtgtgtggacgttttaggggggtagttttggggggccagagcactgattgcttgttggcttggaacgacatccgttccggttttaaaattttttttgttttgtacatttcattgccaggtcattggtgttcttataatttgcttttgccgtgtaatatgcgtgtgcaaaagagattcagggacagttcggaagcctactgaccattgaggagcagcggcgtgctcgagactccattagcggcgcccttaactacaaaatcaaaagagaaacatagtcaggcgaaaatcaaatccaaaacgattacaatcaatttgaaattttgaaaagaatagaaaatgaaagtgaaatgaggtggcatgcattggagcaacgaaagatagaagcttatattatgtacagcagtgaaactataatcttttggttccattctctttggctatggattatgttgactcctggcctcatgccctaatcgctgttctcgtcatatggatgatactgctttgccggcactggcgactgctcctcctgcttaccgtgcgtcgccgatcggcaaaacttcttcgtggtgctccagtcctccttgagggatagattaaacatggagtagtccggatcgccggtcacctcctttacaatgttcag

SEQ ID NO: 10763 - DNA, 3499 bp, DROSOPHILA
attttttcttcaggccacaagaaaatctttagatatgaggaattttaaatgaaaacagcgagcaaacagaacgcatcgtgatgccggaaacctaatcaaccactccgaagtaaagtgcaattaaattacatagttttatacaactgaaagcggctggccagccgcataaagtattcgcctacaccagcattgttctaaatgctaaaaagtttattactcattaagcatttgtgtgcctagttagttaattaatcgcagccgaaagatgaacttgacgtacttgttcgtgcttatttggctggccttcctcatcagcagcggcgtgatgctcttctcgcggggattcctattggcccgggtgtccaaaacggagacgagcacctgtcgcaggttgtccacaaatcccaatgctgagtacgtactcaccgatgaggttgtgaacgaaatctttaaggatgtcaacgcctcctccaatctgtgtcttccgcaaaagtcgaaggttattgtcctggttgtggatgcacttaaatatgaatttggcctgtacagggcgaatgctacggatcctttgccatatgaaaacaaattggtggtgctccaggagctgctgcagcagaatcctgaccacgcccgcctaatgagattccgagcggatccgccaaccacaacgttacagcgcctgaaaggactcaccaccggcagccttcccacattcatagacattggctccaattttgcctcaccggagatcaacgaggataatatcattgatcaaatagtcaagaacgatctaccagttgtcttcctgggggatagcacctggacggatctgtatcctcatcgcttcaaacgatcgtactcctatcccagtttcgatatattcgatttggatagcgtggataatgagatattaaaacacctgcccaaggagctggaaagtaaggattggcaagtgctggtagcccattttctcggcgtcgaccactgcggacacaaacacggacccatgcacgaggaaatggcgcgcaaattgggcgagatgaacgaggtgataagatccgtggtggcggccatggacaacgacaccacgctgctggtgatgggcgaccatggaatgacggcttccggcgatcatgggggagacaccgatgacgaaaccaacgctctgctgtttgcctactccaagcagcacagattttatggcaatgattcgggctcagatagcgaaatgctgcagcagattgatctggtacccacgctggccaccattctcggcgtcccaataccgtactccaatctaggcctggtcaacttcaacattgtacccgatctgcgagtaccgcatttaaacaagtttcagacccttttgcttcattcctggcagaatgcccagcagatctatcgctacttcttccagtacgctttggagaacaagcgcacattcaacgtggaacagatggaccatctagagactgaattcatactcctcacccaccgagtgcaaaccgtttacaacgaggttgcttttaaatcttttgtacgtgacttgaacaccaatctgcgggacatcctgggcacatgtcgcgaaatctgggtcagatttgaccccactcagatgtcgcagggcctgctgtttaccttcctgccgttgttctttatcttccttgtggtaaacaactctcggccagcggattttccgcacatcttcaaagccaaggaggtcttctatgtatacctaatcaacttggccgctggagtatttggatatcggtatttcaagacattctcctttaaaacagaggagcaaggagtgatcttctttacggcaatatccagtgctgtcatcctggctttccatacactacgtcactggaccagcattgccacgaattggtcagcagtcaagcgatttggacacatgcccacgcgtctgctgcttttcggttccatggcggtgttcttctcgaacagcttcgtcatccaggaggccaagatcttatcgtacctcttggcagcagcgatactactgctctcccacgaacttcttcggctgagtgcccgtttggattttaggacaaaattcaaggcatcacaatttctgcgctccacagcgttaagattgatcctggccagcgttttggcgatatgcttaatacgatttgcctacacgctgtttcgttgccgcgaagaacaaggcaactgctcggattttgtcaacaccggcggagccggattctcccttaaaaagccgggaacgggcaagacctacattctcgccgtcgtggtgctcgtagtgtacaccacgctcacacgattgtatctgcgttcctgcggtaatttgactggcaacttgccaaacgtattgctggctcgctacggacccacggtggcctcgatctgcgccggcggccatatcttgctggccaacagctccatcaaacacatccagcgcacgcatatcgatgccatggctctggtgatctatggtctgctattggtgcagattatcgtactttcatgggctcctctaatgacctttgtgcttcctccgaggagttcccatacagtgaccatcaatggaaacgaaagcattgttccggaaatctttaggaaaatgaagcggatgtacgagggcgatgacgacgagcggcgtagtcacatcccggtggtctacggactagcaaccgtttactcctccattgtcattgcatttggcgttttcttggccctggtaatgatagttcttctcgaaccgcgtgcttccatcggcttggttgtttgcgtggccgtgggagctattctgctcagcgtgcacagtatattacgctatcgaactgccactagttttgagagctgtgtacagccaacttttacggctctggttggctggttcctgctggcgcatttctgcttctttgccacctcgcatcagacgacgctgtcacagattgagtggcgtgccgccttcgtgggacgcaccaccggcatcggacagtcgaatttagtttctggtgccttggtcattttgaacaccttttgtggcccgattttcttcttctgcatgtactccctgcttagtacagagactttttcgctgttcgcactgtttcccaatctcatacgaagctgccggagtggtggcaaagtggatgcgagcacttccatgtcagatttggccaacgaagctgtcggctttgatatgactcgtggcgaactgtcgctgtacgagtacgaagatgtttttctgggaactggcttcaagttggctacccagtttttcatgctacagggactcaagattttttgtgccatgttggcctgcaccattcactgccgtcacctgatggtgtggaaaatctttgcgccgcgattcatctacgaggcccttgctaccttcgtcagtctgcctgccctgattgtgggctatcttttggtgttacgcatccaccgtggcgtggacaccctcattaagcgcatcaacaaggccaaggtccactag

SEQ ID NO: 10764 - protein, 1077 aa, DROSOPHILA
MNLTYLFVLIWLAFLISSGVMLFSRGFLLARVSKTETSTCRRLSTNPNAEYVLTDEVVNEIFKDVNASSNLCLPQKSKVIVLVVDALKYEFGLYRANATDPLPYENKLVVLQELLQQNPDHARLMRFRADPPTTTLQRLKGLTTGSLPTFIDIGSNFASPEINEDNIIDQIVKNDLPVVFLGDSTWTDLYPHRFKRSYSYPSFDIFDLDSVDNEILKHLPKELESKDWQVLVAHFLGVDHCGHKHGPMHEEMARKLGEMNEVIRSVVAAMDNDTTLLVMGDHGMTASGDHGGDTDDETNALLFAYSKQHRFYGNDSGSDSEMLQQIDLVPTLATILGVPIPYSNLGLVNFNIVPDLRVPHLNKFQTLLLHSWQNAQQIYRYFFQYALENKRTFNVEQMDHLETEFILLTHRVQTVYNEVAFKSFVRDLNTNLRDILGTCREIWVRFDPTQMSQGLLFTFLPLFFIFLVVNNSRPADFPHIFKAKEVFYVYLINLAAGVFGYRYFKTFSFKTEEQGVIFFTAISSAVILAFHTLRHWTSIATNWSAVKRFGHMPTRLLLFGSMAVFFSNSFVIQEAKILSYLLAAAILLLSHELLRLSARLDFRTKFKASQFLRSTALRLILASVLAICLIRFAYTLFRCREEQGNCSDFVNTGGAGFSLKKPGTGKTYILAVVVLVVYTTLTRLYLRSCGNLTGNLPNVLLARYGPTVASICAGGHILLANSSIKHIQRTHIDAMALVIYGLLLVQIIVLSWAPLMTFVLPPRSSHTVTINGNESIVPEIFRKMKRMYEGDDDERRSHIPVVYGLATVYSSIVIAFGVFLALVMIVLLEPRASIGLVVCVAVGAILLSVHSILRYRTATSFESCVQPTFTALVGWFLLAHFCFFATSHQTTLSQIEWRAAFVGRTTGIGQSNLVSGALVILNTFCGPIFFFCMYSLLSTETFSLFALFPNLIRSCRSGGKVDASTSMSDLANEAVGFDMTRGELSLYEYEDVFLGTGFKLATQFFMLQGLKIFCAMLACTIHCRHLMVWKIFAPRFIYEALATFVSLPALIVGYLLVLRIHRGVDTLIKRINKAKVH

SEQ ID NO: 10765 - DNA, 3067 bp, DROSOPHILA
gtgttccaccacgtttatggactacgaagatagtgacgccccacacccggatggaagtaacaacggggaaaggaatgctcatacaccacaaaacacgtacggcagtgggagtccacattatcctgggacggcgtccaatatgcagtttcatacttcatacggaatgagcggctgcaacaattgtgactcggaaatggatataaaaccatatattcctgcagaacaccatagttttcaaattcccgccattagatccgaggagctagtcaatccaaactgtccttggtccagaatgcaggaaagatttcgaagaactccaccagcgtctttcacagatgatgagagaaatgctaatgatatgcggcataaattaaaaaaagcacaaaaagaatgtttatttagcacagcagcgaaagtttttcaccatcacatcgaaggtcgcctgcgaaaactcacgagcgcagccacatgacaatacgaatccgagcctcacgcttagcctcaaccaaaaacatcattcattgtacaaagcctgatcgtatcccctagaattccatgttgagaagcagcattccattgtaatattacttactagtgtgttcgctaggtgataattagtcaaaccgtttttatggcatccataacataactggcgctcgtcagcccattttaaaaagattgattagggttaatagttgattagtgggaggaaagttcgtattttacgtattttgtaggtatccaaactgatagattgcgtattgtactttttttaacgtaggataagaagaggaattatgcgcatccaaaataggttttaagaaaagaaagcaaataatttaagaaaaataaaacaaacatattttacaaagttatttaatctttttgctattaatcttgtgcaaacctttggccgtggcaacaaaaaggccatattcaaatatcttcctaataaaactcaccgtgacagtgctatttattccattagaaagataaactgttgttttcgtatttgtttgtaaacgactatttgtgtattttgcttttaaacaagttgtcttaacaagttgcacattaaagacttctctgctttcggggtcttggaggattgaaggaaacatgtgtgttgtcggtaatggaaacgatgttcagcccacccatttgcagtcctttgatggccgactgaatcaaaacatttaattatttttaagtgacatgagagacaaaaagtattgaacataccattcttccagggccaagaccacgaacctttactcgcactgtcttccagcccaattcaatggctttctgaaatacaatttaagttttttgttttaaatgattctatgcccatattatactattcaaatgcatatatggtatacaactataatggagattatctcgatgttctatgtagtttttgaccatcctactttggtaaaacctgtttcttgtggaaatgacttactccactaatggtaaccgctgtagcttgagctgctatgttggttcccttgcgagtgtttttgaatccctcaattccacaggatcgtatcagccggaggactcctggaaagagggatactttagatcacagttagagtaacgttccagatgacccacctttgtgatccgtgacggaaataattgtgttgttgggtgaaacgcgaatgttgcagatgggcagctcgttgaagggtattccattgaataacgtgttggcggtgctggcatccgggaaaaacttagccttgctaaatggaaaattaattgaattcaagactatttacaaatgtaaaattgaattccaaccggttgataagtgtgtcgatgtccacggtcttttcgcccacggttccttcgtctttggccggtaaagatgccagcatttccttgcggtcctccgccttccgccagcaagcgctcgtgtgtatcctagaagtctggagcggcacagcgggcatagtaatactccgaagagcacttagaaatacacttttcagtgacattattaatttacttcgcagagggttcacaaaaaccaaattacatcacactgccagtctggcaacactggcagtgttggctagcacgccacaacaagtggccacgcttcgtggtgactgacaaaaagtcaagaagaagactattttcacgtgttcttgttttaagttggttttgattccggttatcctcgtgtaaaatggctttaaaaaggttgaagagtaagtaatagtatatatgtatatacattaaatgaagctctacatctattgtcaaaatccacagccaagaaatccaagaggctcaccggtcgcttgaagcacaagatcgaaaagaaggtgcgggaccacaacaaaaaggaacgtcgcgcagccaagaagaatccaaagaagggtagcaagaaacagaagctcatccagatcccaaacatctgtcccttcaaggatgacatcctcaaggaggtggaggaggccaagcaacgtcaggaggccgaacgtttggctcgccgcgaagcctttaaggcggaacgcgaacagaacaagttcaagacgctggagtccatggtcgaggatgcagacatgcggagcaccgtgcacggaataatgcacgaaaacgatgcccaggatcaggacgaaaagaagtacaagaacgccgtgaccaaagagcagtcattgaagcagtacttcaaggaattccgcaaggtgatagaaaatgccgacgttgtcctggaggtggttgatgcacgtgaccccctgggaacccgctgcaatgaggttgagcgcgccgttcgcggtgctccgggcaacaagcgactggtcctggtgctcaacaaagccgacctggtgccgcgagagaatctgaacaactggatcaagtacttccgtcgcagcggacctgtcaccgccttcaaggcttccacacaggatcaggccaaccggctgggacgccgcaaactccgcgaaatgaaaaccgagaaggctatgcagggttctgtctgcattggcgctgagttgcttatgtccatgctgggcaactactgccgcaacaagggcatcaagac

SEQ ID NO: 10766 - DNA, 732 bp, DROSOPHILA
actggcagtgtgatgtaatttggtttttgtgaaccctctgcgaagtaaattaataatgtcactgaaaagtgtatttctaagtgctcttcggagtattactatgcccgctgtgccgctccagacttctaggatacacacgagcgcttgctggcggaaggcggaggaccgcaaggaaatgctggcatctttaccggccaaagacgaaggaaccgtgggcgaaaagaccgtggacatcgacacacttatcaaccgcaaggctaagtttttcccggatgccagcaccgccaacacgttattcaatggaatacccttcaacgagctgcccatctgcaacattcgcgtttcacccaacaacacaattatttccgtcacggatcacaaaggagtcctccggctgatacgatcctgtggaattgagggattcaaaaacactcgcaagggaaccaacatagcagctcaagctacagcggttaccattagtggaaaagccattgaattgggctggaagacagtgcgagtaaaggttcgtggtcttggccctggaagaatgtcggccatcaaaggactgcaaatgggtgggctgaacatcgtttccattaccgacaacacacatgtttccttcaatcctccaagaccccgaaagcagagaagtctttaatgtgcaacttgttaagacaacttgtttaaaagcaaaatacacaaatagtcgtttacaaacaaatacgaaaacaa

SEQ ID NO: 10767 - protein, 200 aa, DROSOPHILA
MSLKSVFLSALRSITMPAVPLQTSRIHTSACWRKAEDRKEMLASLPAKDEGTVGEKTVDIDTLINRKAKFFPDASTANTLFNGIPFNELPICNIRVSPNNTIISVTDHKGVLRLIRSCGIEGFKNTRKGTNIAAQATAVTISGKAIELGWKTVRVKVRGLGPGRMSAIKGLQMGGLNIVSITDNTHVSFNPPRPRKQRSL

SEQ ID NO: 10768 - DNA, 3456 bp, DROSOPHILA
ttgggcaaaacgagaacaacaaattattttgaacacacacacgtatacatatgcgtacatatgtacgatttcatgtgtgtttggccctacacgcacctttgtttttgttagcacagattcttttttttcggcctcccttttcgctccttcggccttggcaacaataacaacaacacacagcagtggtaggcgtttcgcactgattttcgattccaaaaacacaggtgctgtattctctttaaccgcgagctaattctttgtctttatttcggatttttctatttgttaatgcacattttccgcgcgattctcggactccgcctgcgaagctccaaagagcaattgacaaaaacatcgagaactgcgctcggcgttgccatgctgactgcgctgccagacggcgtgggtggagtccacgctggaggtaagcccagaccgcaaccctctaactgtggcacagtggtgcaaattaagagaggactgctgtcaaaaattgtttataaaatttgttccagagccgttatgtcattgtttcgtcatgtcaattgtaaaagaaagcaccctttcaaaacgttgtaaataatttcaacaagtgctacagatatttgtgttattcactggcatacaagttcgtttaaacaaaatattaaacataaataaacattaaaatatattattaaacaaaatatattcttgacttgcaatagatatgccgtatcactcataaatgcaatacaaagggtaaatcattatttcctggcttaaaattgtaatgaaacggataatgaatcacatagctattcagttttagagaatttgtatgcactttgtcatatttaacgttaaagtcgatcactttttatttaaggggctaaagttgttttactttatttgcctaatttaaatttttgctccttatattcaaaaatgcaggctcgataccatctcgaccgcgatgatttgtttgggttggcaacgccccgacgtttgtggcgcagccaacttcacgcgagacgcagcgaaaacaaaaaatactaagctgaagttaattgagaaaaccccaaataaaacgcgagtgaaagggaccatgaacttagacctgcgttcgtactcacgccactggctcacggagtttatcgagcagtaccaagaggaggagtgcctctggcagcccaagcacaacgactacagcaatcacacagcccgtaacaagtcctacgatcgcctggtggagaagctaaaagaagtggagcccaatccggacagggcgatggtagtaaggtgagaatttccatgtcaaatgtgccacagttcagtaaacacaattcacgctttacaggaaaattaactcactgcggtccgcttttcggcgggaattccgcaagacgagtaccaaaggcgactacgcaacgcgtttgtggtactacgacaagctgcttttcatcgctgaccacaagcccaagcgccacgaactcggctccaagcccaagagagaactccatatcagcttcgacgacgaggagtcaatggagttcgaggacgactcacatcacacgggcactcagtctcagcacatggagtccataatacccacgtccccggacgatgtggaagaagtcgcggcgacggccaacaatgtggtcgtcagcagtcagggcgccactctgagcaccatttcggtgacgcccgcggaatgtgtgacccttgtcaagagcgaggagcaccaggcggccgaagcagcggcagccgcagcccaagcacaccagcaaatggtagcccatgcagcagcccagacctccattgcggcggcggcggctcagggacatgccgtgaaggtcttagagatcacctccctagactccaactcccagcgcgagatacaacaagtgagtagctccaaagcagtgaagagttccttagggtcttcaatcacctcctctccccacgcaggcggtcaatcatctggagcaccaccagcagcagctccacctgcagcagacgaatggccaacatcagggcgttcccaccatccagataggccgcgatcactatcagccattgtttggcaatgccggcaccactgcctataccaccacagcggctacgagcacatcgcaccggcaagacgacgagtacgatgccattggcgtgaatgtggcgagcaaactgcgctccatcaacccgacgcagcggatcgtggccgagaaactgatcagcgacgttctattcaacgcacagctgggcaacctcaccgttcactcggccctcacgcagtaatctctcttgtccccctagactaagtatgtgtagtctctggctttatatctccattttgtctgtgtcccaacctgcagcccggccaacatgtgtcgcccgggcagcagccgattgtaccatacagtttgcatgtagttttaattattctatacaataaatagattgtatgtcttaagctcatcaccagagggtttgtcattccgtcgaacttcctgcgcccgttagcttgttccacacaaacctggcaaactggacaaaaagaggagctgctgtcttgaggtgatcgccttaagaattaggactaacataccgtgaccggcggcatctcgatctgttccgcctccgtgaccagttttcggttgctctgcatgtagctccagcccagatggatccccaccagactggggatcatcacgacggccaccaggttgcgcgacacgaacgagggctgcttgctcatctttacaaaattcgtaaaacggaattattattatttaacagctatcacaaatcaacaatgacgatgtgaccgcattgcgatgtttgtttaatcttatcaacgaaaaataccaacctataacgctgccccaaaacgggcggctagttttgaataaagtttctatctcccccaacttggtccaaagtccaacgttttcggggataataatgggaaactaaacgtctcgcaattctttgtctgggacttcgattgcttgggcagataagcatctgtcattagtttgttgcggtggctggttttaataacaaatgcggtggaggtggttagagtagatcaatggcattgtaaaggggaacttcacttctcgtagggtatattagttgctgcgaaattctttaaagactttttgtgattatagaaggcctgaagtaactggtaaggtccttcgcttttataactaacataagattataatagttaaaaaacaaaaatgtgtaattatactactttacgtacaagttaaaattgtctaagctttgaattcaaataacagaaagatgaaaaataattttaggtgcttaaagttcttagtggacaaactaattcggaaaaattagaaaatatgtatgaaataattataagctgaaatctgaaattttaacttaatctgttttaaaaaccgtaaaataagctataaatttatcgtcacaataaaacca

SEQ ID NO: 10769 - DNA, 1334 bp, DROSOPHILA
aacttcacgcgagacgcagcgaaaacaaaaaatactaagctgaagttaattgagaaaaccccaaataaaacgcgagtgaaagggaccatgaacttagacctgcgttcgtactcacgccactggctcacggagtttatcgagcagtaccaagaggaggagtgcctctggcagcccaagcacaacgactacagcaatcacacagcccgtaacaagtcctacgatcgcctggtggagaagctaaaagaagtggagcccaatccggacagggcgatggtagtaaggaaaattaactcactgcggtccgcttttcggcgggaattccgcaagacgagtaccaaaggcgactacgcaacgcgtttgtggtactacgacaagctgcttttcatcgctgaccacaagcccaagcgccacgaactcggctccaagcccaagagagaactccatatcagcttcgacgacgaggagtcaatggagttcgaggacgactcacatcacacgggcactcagtctcagcacatggagtccataatacccacgtccccggacgatgtggaagaagtcgcggcgacggccaacaatgtggtcgtcagcagtcagggcgccactctgagcaccatttcggtgacgcccgcggaatgtgtgacccttgtcaagagcgaggagcaccaggcggccgaagcagcggcagccgcagcccaagcacaccagcaaatggtagcccatgcagcagcccagacctccattgcggcggcggcggctcagggacatgccgtgaaggtcttagagatcacctccctagactccaactcccagcgcgagatacaacaagcggtcaatcatctggagcaccaccagcagcagctccacctgcagcagacgaatggccaacatcagggcgttcccaccatccagataggccgcgatcactatcagccattgtttggcaatgccggcaccactgcctataccaccacagcggctacgagcacatcgcaccggcaagacgacgagtacgatgccattggcgtgaatgtggcgagcaaactgcgctccatcaacccgacgcagcggatcgtggccgagaaactgatcagcgacgttctattcaacgcacagctgggcaacctcaccgttcactcggccctcacgcagtaatctctcttgtccccctagactaagtatgtgtagtctctggctttatatctccattttgtctgtgtcccaacctgcagcccggccaacatgtgtcgcccgggcagcagccgattgtaccatacagtttgcatgtagttttaattattctatacaataaatagattgtatgtcttaagctc

SEQ ID NO: 10770 - protein, 355 aa, DROSOPHILA
MNLDLRSYSRHWLTEFIEQYQEEECLWQPKHNDYSNHTARNKSYDRLVEKLKEVEPNPDRAMVVRKINSLRSAFRREFRKTSTKGDYATRLWYYDKLLFIADHKPKRHELGSKPKRELHISFDDEESMEFEDDSHHTGTQSQHMESIIPTSPDDVEEVAATANNVVVSSQGATLSTISVTPAECVTLVKSEEHQAAEAAAAAAQAHQQMVAHAAAQTSIAAAAAQGHAVKVLEITSLDSNSQREIQQAVNHLEHHQQQLHLQQTNGQHQGVPTIQIGRDHYQPLFGNAGTTAYTTTAATSTSHRQDDEYDAIGVNVASKLRSINPTQRIVAEKLISDVLFNAQLGNLTVHSALTQ

SEQ ID NO: 10771 - DNA, 2956 bp, DROSOPHILA
cagttcggtggcttgttagccgtatatacatacatattatatatgatattattgtgataaatatttatcattgactcatttaaagaattttgagaattcacgcgtttgtagcacattcaaaatttttaaaaattattttattcattttagactgggttatttgatatggttttcttataattagttcttgaagaattctttgtagtattttaatatttgtagatacaaacagtaattttttttaaccataatattttttttttattttactttgcttttatttattgaatcttcttgtataagaactaacaataagtttaaaaatcttaactataacaagtattttttgaacagttgtattatttttccaactgttctatgtttaaacggccctaataatttattcgctgggttggtaggtcctttcgccggagacgggaacggctgctgagctggattagacctcgcgctaggtggttggggtgcgtgtgaagcgtgtgaaccataatatgatatgaaaagatatgatatttactataccaatattttcgaaatataaatagaataaataaataaatacatatatactacaaaggtatatattaggtatatttgaaacaaaaatcatattttaacgataacagatgcagaaattgtatgaaagacaaaaaataatatttggtgaatattatattagcctgtggtcaggctaaatataaatgtaaataaaattctttattgttcttacggaagtatttccaactgcctaccagcagcatttttggattcaaatggtctccaagcaggaatgaatgcagtcactaattggaatgtgttcaccagcatagcgagtccaatttaaaatccattcttcaaatcagaattgtacagagtagccgaatttaactatacttacaatggtcattcaatttgggatttttcttttccaaccttattcatattatttcatatcagttttcagaataaagagacattagaatttccttttttcgatttatttatttcttatatgatattagtgtttatagctaaagttttacatggaagacaatgattcttagcctaattcttatacgaagaccctaacaaacaaacatggaagacaatgattcggctaagactaacttaaggctaataagacacgataaatcacaatgagttaacgatagtaacgcttgattgtgataattgaatatcaattagagttgtgtttcccttgggacgcgagcccaaagaatccaatctatgcctaatatcaccctgagattacgaacatgcgaagctgaacccgcatccatccgacgaccaatggacggagacacttgcacttaaagctgccaattggagtttttcccggtgcatcgagaagtggaactgtgcatcctggcgatgtttaggcctgaacccaacggtcgaactgctggcgcaactgctgttcgtggtgctggcgagctccctcggctgaggtccagaagaaggtgccgctggtggtgcgggcgaagtggaccgggatgaaggtctgctccggatggacgggcacgatgctctgttgctgaccctgctgcacgatcatggccacgttggtggggcactggcggagatcggtgtacagtcgctgctccagctcctcgttggccatgttatcgcaactggccgccggatctttgcgcatgtcctccagcgaggcgttgactgcattttggttctggatctcggccagagtcttccggagtagctgcttcttcttcaccagtcgcagaaggggtttgaccagtttcctcagactccgcatggccatcgtgtgctgatctgatttcggctccatcaccttgctgctctcaaacttgtattcccgtgtgatgaacgacattgtgttgaggattgttgagatttataataaaacttgggatcttagttggttgcactcggttgagagttggtagtattctggttttcctgctgcacgaccgactccttatatacgatttgctctctttggtttctctcggcgggggagaattctcgcacagagcggcggttctctcgatcgatggacccagccaatgggaaggcagactgcctgcaggtggttgcacaaacagtgagagcgggagacaaaagagagccaagagaaagcggtctcggaatcaggagcatgtccttacccttgagaaagcagggtatgatgaatttttgagtctgtgcataaaaaatagattttacgaaaaataaggttaatatgtttttattgtgtgtatatcttttaagtgtattttttctaaaaaaaattatttataatagtaatattgaaaggggccatataaggttgaatttaattgaattgaattcattgaatttataataactatagtaataagatcataaacttgatgaaaaatatcaatatttaaggactctattaaaattaaacttaaaagactagcaagaataaaatgtatcctaaaatatttggtatacaactaaattaaaaactatttaaaattaaataattaagatcggcacagccttacaaaaaaagttttccttaacagcacactgctaaattaaggtatgtaggaagtacatcggtaaaattacaataaatacaaagagatcgttgtatatttaacaattatttagtattttactaatggtatttattttttggaacatagcataccatactaagtcatttactttaaaatttcatatgtttcccacgtgattcaaatgctgggtattacccactcgagttgctcattcactgcaggtttttaacggattttttgacagtcgcatagatctcggtcggttctcgatctttcgccccctctgagagtaccatgcctcacaacctctctttacctgctcgactctgtcgcaagaaaagtagaagtccctaaatcccaaacgtaaaattccaggagagtaccga

SEQ ID NO: 10772 - DNA, 956 bp, DROSOPHILA
tctcaaccgagtgcaaccaactaagatcccaagttttattataaatctcaacaatcctcaacacaatgtcgttcatcacacgggaatacaagtttgagagcagcaaggtgatggagccgaaatcagatcagcacacgatggccatgcggagtctgaggaaactggtcaaaccccttctgcgactggtgaagaagaagcagctactccggaagactctggccgagatccagaaccaaaatgcagtcaacgcctcgctggaggacatgcgcaaagatccggcggccagttgcgataacatggccaacgaggagctggagcagcgactgtacaccgatctccgccagtgccccaccaacgtggccatgatcgtgcagcagggtcagcaacagagcatcgtgcccgtccatccggagcagaccttcatcccggtccacttcgcccgcaccaccagcggcaccttcttctggacctcagccgagggagctcgccagcaccacgaacagcagttgcgccagcagttcgaccgttgggttcaggcctaaacatcgccaggatgcacagttccacttctcgatgcaccgggaaaaactccaattggcagctttaagtgcaagtgtctccgtccattggtcgtcggatggatgcgggttcagcttcgcatgttcgtaatctcagggtgatattaggcatagattggattctttgggctcgcgtcccaagggaaacacaactctaattgatattcaattatcacaatcaagcgttactatcgttaactcattgtgatttatcgtgtcttattagccttaagttagtcttagccgaatcattgtcttccatgtttgtttgttagggtcttcgtataagaattaggctaagaatcattgtcttccatgtaaaactttagctataaacactaatatcatataagaaataaataaatcgaaaaaaggaaa

SEQ ID NO: 10773 - protein, 158 aa, DROSOPHILA
MSFITREYKFESSKVMEPKSDQHTMAMRSLRKLVKPLLRLVKKKQLLRKTLAEIQNQNAVNASLEDMRKDPAASCDNMANEELEQRLYTDLRQCPTNVAMIVQQGQQQSIVPVHPEQTFIPVHFARTTSGTFFWTSAEGARQHHEQQLRQQFDRWVQA

SEQ ID NO: 10774 - DNA, 20629 bp, DROSOPHILA
atttcacttttttctttctcagctaaatgtttgtgagttttgtcggattgttagctttgttggctatgttggctttgtggttttcgtgggtttcatgggctcggtggcacctgccctgttttgttgacacctgctaccggcccgcttccattttccatttgccatttggtgtgttcggcgatgccagcgttgatgcaataaactggaagaaagtgtcgtcttcgcggctttctgtttctttttgttgccacaagaggaaagcagcgacaaacgagcaaagacaaacgagatccatccacaaatgcccggtattttcgcattttaatgctggcggcgctgcttctcagctttcaattaatgtgtcgccgtgtgtattgtttctcttagcattattattatgattgttattgtttatttgtgccgcggaaacggcaatcaggtgagtcagcagcagacttgacctggtttagtgattcggaaaagggcactcagtgaatccaagtgcagcccaagatgcgcacaaagatgccatcaaaattaataaccatcacttcccccggccaattaattaattaaaagttgtgcctaaatggctgtcaagcaaacaatttaataacaatgagcaattttcgtgggctatattgaacatgctactagatttgcaacaagagtaaaaaaaaaacaattagctattagtaaagagaaaaatgaaataaaagtgaattttaaggaaatttgtaactaatttgcttcgcaacaaaggtaaacttatatattatttagtgttcctagatattagtaaaaaggaaggcgttaaatgaatttcaataatatattaaatatttagttttaaaattgtgttgcactttcttggcaagttcgtgtcttaagtccttagcttagtgtgtaagtttgtgtcttaagtcatttgtttggggtgcagaaaagtagactgcaattggagatacaaagcaagctgaaaagtatgcaatattttttctctgctgacccttgtcaaaggagatcgggaaatgagatccctcggttgccttctattgagcctccttggtgggcgagatctgttaagagcgctggccagccgatttctgtcgcgctccagcctgtcatggtatctgctcgagtgctggtttatctcgtcaaataccgttgctagtttgaggtctttgtgcagggttgtgttccttacgaaccattctgctctacataatttggctaataagtcattaagctactttcttacaaattgttaattattctattccttattcctttccatcctgcagaaccataaacgattatgcgctcaattcgaatctgcacctaagccacaacaccaaactaaacaatctgcacagcaacaagctcctccacagcaaccaaagccacagcagcagcatcaatccgagcacaaggatgcactcccaccagctggattcctacctgggcggagtgggcagtatgatgaatctgggcggcatgggccaagttggccagatgtaccatccggggagcgtttccggcagcgaaagacccaacggaggagctctggcccttcactatgctgccgcacgtggttgccttgattgtgtccaactgctggtcgccgcatccgtggatatttggtaagtagatgagttactgtcccaaaggagtatagtatatgatgaccaaaagttgcatcgcgatttgagtgcggggtgaaagctcttgcaccagccgttcattgtttttatgtgtcggggaaatcgctcgacgatcgatggctccactttgtgttttatttttcccccatctgtctgcatttccattcgatgcggtttctttccatttacttgcgacaattattctcattaggggtttcttatctgattcgattagtataagagctgaaacaagtgaattagtggctgtggaaatctaactaaatttggacttggttataaaatccatttcgaaacgtatggtggtaattatagcaatgctttaaaaacaagattaagagagaaaaacgaccaatgtatgtatatatattttgaaaaaattaaagaactggtaatcaatattttagaatactcttttcttaagcgaaaatgatatttggcaggtttatatagatttccaagtatcaattccgtacaaacgtattattaaaagtattatattgttcgatttatgtacaccattttgcctagttgtaataatcattcaaatggaagcatttaagtgtattaagccttcgtaacgatctgattatcataaactgaatcaacgatgatgtcgatttgagaatttatctacctggtaagctgggagtagtcattaaatgcactaattaaaacttattagcccatccaacaaagtagaaagaatgaaggcgagtggtgaaaaactaggaaaaaggcaaggaaaacctggcgaatatcttggaaaatctatccgctaagtgggttaccgatccgtggccagtgtttgattcacctaaattcctgtgctccaacagcagcacgcgtccaaagctgattcatttaattgggaaatgggaatgggaatccaactggccaaggcgagccagccaagcgagatgcactccatcttcagccctccttggccccctgaatcgcctacgatcccatgccatcccatcgagtccaggccaggtttggttctatcgtgtgctattttcaattggagtcaaactggaaaactcacagcggcacaaagcaccgttgcaacaagttttcctcactcgccacgaagtggagcaactccggactgactggccaaggaatcagaattggactcagaatcacagtcggaatcggagtcagaatcagtgccactgcctgatccccacctccctcgatcgtccccagctatattcatatttacaaagcgccaaggcagatcaattgacatgacaactgacatggcgacacagaaaagagcgagagatgagaacgagggcggctctgtgtataaaatgtattgtacaataactcgtccctttttaacgttaataatagggatttttaaagtatttttatttaattatttaggctaaggaacaaagggtattaagtactgactattttatcacgaggtattattcctataatcaccattctattttaattacattacatcgccattcatttggcttaaatgtggcctaatgttatttatcttacaatcttttcaaccgaccctcgtcacaaaccgtttgatagttttgcgtacagagacaccacgatccaaacagctggtgcttcttgtattaatactgcaaagaagtaggcgagggcagtttcatgacttcttataaagaataaaataaaattttaaaatttaaatttctgttaaaatttaaatgaaattagtttaatgtcaagaagcaaaaaaatttgaacattttagagaattgtttacgtatgatttattatctcatgatcttgctccgatgctattgtaaataatattgaaaaaaaaactttccctaaataagaaatttaattggaaagcacactaattttaaaggcttcagaaattgatgatttcaaattttttttcaaattatttagggtgtcataattaaatggcacctatgtacttccgggtgacttgtgttgaactgtcaatccgccctctccactggccatttgataataatgcgtatggcgacagctcggtctcgagttacctgatttgcccccgtcatgccccctgcgtcaccaaaagaagagcaggccgaagaaaaagaagaagtggagggagcaacaccaccagcaccaccagtggttcgcggtggccactcgatggcgcttggcgttcggtggtgctggctattcgcgtttggctagtcgaggcgaacggtgctttcgttcgtgggtcttatatcgtatcggtctcgtgcagcataatacaacacatatatttcaaacaaatatatagagtgatagttggtgttaaagttgttactgtttaccagctaccgttatgcagcagcaacatgcggccacggaatgaatttgaattttgatttcaatggtgcatttagtgcggtttcgttgtgaagctcgatgcatcagcgcggccacgcccccgcgactgtccgttggtcagccagcagaagcagcatcagcagcagcatcagcagcagcactagcagcagcagcagcagcaacagcagacaaaatttcgcgcttcaaagtatctcaaatgcagttaacgaatcggaacgcgaattaattaacagtttcagtgtaccaaagaactgcaaggcacaaaggcagctaaagcaaaagcaacatcaccatcaccatcaccgtctgcaccccgcaaacagtagccacaacatttggcttaatgcccaagccagcagcaacatccgcagcagcagcagccgcagcaaccgcaaccatgaaaaggtagcaacggctgcttttggccaacattcagttgccactaatcgattggccaaggcagcgagtaaatcgaattggccaccgggacgccaaggatgccgagctaatccaatacgctttttttttgccagtgtgtttgagtgcggaattaaatgctctaaaatatatgtgcgttcagttgtggtgcttgtgcttggtctcagaaaaaacagtttaatgatcatttaatacaccaataaatatattcagaaatgcagcacatcagtaaatggaaatagcagtaataattataatttattgaaaatagaaagcctagttgagcaaataacttactttaaacaaattggatgtagaattgagctggactgtgattaatcatcttgactcgtctaataatgtttataaggaacaaaattaacatattcttagtgagaaaatcttctatacttcaaaaaagaaggagtcacgaatcaaaactcaaatttgtatggtatagaagattaacacatatttatatgtatgtaggtggtagttgtttgctatgagccagtatgcataccctttcctaggatgacttgaatcttaaaataacccagataagacttgataattgttagagaattcaagcggcacttgctgcccacatcttaacgtatccactaatcgccgcgtaatactaacatcggctattgtatctgtatctttgtatctgtttatctccctggagtctttttgtgtcactcgcatgtctttcattctgcattctctcagcgatgggcaatcgacgagtctggattgtggatcgccaattgttgatcgtccatcattggattcgagcacgcaaatgttcaattaaataaacgagtctataactgtcaactggcatttctaacgaggctcctgcttcgcctcaattatttcgctttttaaaaccacttgctgcctcggcccccagacacattaaataaattaaaaaataattattaaactgcaaatagtgagaaagaagacaaggggggcaaacacaaaaaaaaaaaaaaacagcaaagaggaaaaaattggcaatgtatatagaaatatgtttcgtactgtattttcacctactaaagaagccacaacatacgaaaataaatggcgggatggagtggatgaagatgaaaaatcaactttaattggtttacaattcatttctaagcgagaaaagctggaaaatgtaacaagtagtccgaagtcggacgaagaaagctaactccgccgccgtgcgcaatatccatgaagtcgtaagccagttgactaagtgaacagatactagtatccgtacccatataaccatcatcatcatcatcgcctccgacgcctccgttcggccccgaatcttctggagctcaggggcgaaagcacagtgggaccatggttcgaccatttagggtcgaatctaaagtaaaatggtttaggcaatatttgggataagtaggagggcattgttcaatacaatactagtaatactagttaactagtaaaaaaataactataaatcagatcattaaagtaaattctccataattatactgtttaatggattcatagaatatgcttaatattaaaattgatgaaaaattatgaaaaaggtttcaaaagtaaaaatcaaaacaagtatgtattttttgtctcagaattcgtttatggagttctggtgcctgatttattgcttgcgaattgtgttaacaattaaatggtgcgcaagttggtaaactattttcctaactctgctcagctgcctgttaggcaattgagagttggaaaggcctgaccaaattcatggcgttttgctggtctataattttggcgctagccaaattggcgtgatcacggtgatcagtggccattataattctcccgttggatggggcactcccactcttgccccactgtggcatgaggaaagccaggccaagccaactaaacggtaacaccagcaactccagctagatctacacgagtggcagacgccaagacaagtgcagactttagactgggagtcaggcgtaactactcgtggagagaaacctcctcccccttgacggtttctatgtttgtttcgcttttaggcgttaatttcacctaaaaatgtatatagatgtagatgtgaggcaagaagcataagtttgtcgagcagatcgagcatcgagggtttaatcacagcccagacatcgcagcgagatgtcggaataatgccgactttcggtttcagcaggtgtatacatatgtgatccataaagaaattgtacaaataaagtgaaaaacaaaagactgcagccgaaaacttgctatgcaaatcaaagcatttaagtgatttttcctaaaccagttccataaatcgaactcattttttttcccgtgcctgtgtgtgtgcatataagtgtgtttgtgtaacggtacaaggaaaatcaaagctacacgaaaaccggaaaatatataaagtctagtgacaaacgaaagtaaaatttgaaatttcgaacgtgaacggtaagccaaggcgaataaattaaagttcaccaaataagttcaattaaaacaccagcgcaccaagagcactgccaattcgaacccattcaaatataaatcaatatatacatatatctgttaaaagcaaaggacccactcaaacacacaccccagtcacctgaccaccaaatccagtccacttcctcatcgtcaccatcctcctcctcattcgctagctacttctccacgatcaacgttaagaagggcctcctaggccgcatgaccacaagtctgacctcctaccgccgcagcaagcagaagtccaagtccaacaatgacatccacaccatcatcgcaaccgaggtggtgacggcggccattctcagcagcagtgtccacagcagcagcacaggatcggaaatcggggacggcggacagggcaacaccagcctcatcgaggaggcagctgcccaggatcagagcagcgaggagcaggatcgccagcatcagcacgccaaggatccactagcccaaacggagatgaatcatcacccgcactcgcaccaccagcggaagtccgccgtggaggtggtgcgccagcagatggacgacgacggggatcaggactccaacgatgacgacgagaccatgcccatgatgagcggcgtcgggcgcaaggagcaaaacaatcgacgcagcgtcgttaggtgggatatcactaaaagatcactgatgatcttgggtgatcacaaaactttttacctacatatacatacgcaataaataatacaggtcaagtagtatagcagtatatgtctggggctaaataataataattaattccattctcgttgctgcaaatgactgcctttttgtcttggtttaaaaaagaaaatggttaagatcaataagaatttataagccgttaagaaagttttcagttacgatcgtgcgcttgcacttactttcgaattacattttcatagatgcttaaaatgaatcatgaactgaaaccatgtactcatataaatatgcctccgattcattggtttgaatgactaatttatattattaaaacatttacataaaatattgtgtctcacaaggcgatcaattggtttaatgcgattaaaattttaaacttatcatttaatagaggcctatagatttcgacataatctggaaacttgttacccaattcctatcaatggcagaccacatttgatgggattatagtcggctgaacaccgtgacaaatcggtgcataacttttcccacacattctccaaagattaccatttccattggcggtggagttgattaatctctgcctaccgtccaccatctctttgtaatcgatcgatcaatgatattccgcaataaaaacgagtgaaaaaccggtcaaagaagaggaaaatgctgagtagagattttccagtgacccagtgcgtttctatcgattaactgcagttatatgttatagacactctatatgccatatctgcgataggaataggtgccttcgaaatgagagcacttttagctatttcggtgcaactttttgttcattaagctgcccctttgtacgagtatactataccacctaattggatgacaagtaatgagccttttttccgccgcattgcagcgccaatacgcaaatggacaacgatgtcacgcccgtttacctggcggcgcaggagggccacttggaggtgctcaagtttctggtgctcgaggccggcggctctttgtacgtccgtgcacgcgacggaatggcaccgatccatgccgcttcacaaatgggctgcttggattgcctcaaatggatggtgagtagatggtgcaccaaatgcatcgaattcggtcttttaatccgatctgtaagcagctaactgccaacttggctggccatcttggccaactgcagcagttgaacgcaatgcaggtcaattgctacgttaagtgcattggccaaaactgaatgttgcattaggattgaacagaaacgagcaaaaacagaaagggtttttaataatattatttaatattattataatataatccgatttttagggtgggattaatagatgattagtaatctaaaatgagcaaattgctgcattaatatcaatttacaatgcatagcattgaaaatccatcaagcttgtacattctaagagtctactttcattgatgcagaatactattctattactcgcaaaagggacatggattgttcttaacccattcatttttctcagtgcggctgtgaacccgtttctttttgctaatgtctgtgggtcctgtttttcaatagttttaacggggttctcgagtgggattcccggccagtttgtcgccaggccagcgccatttatcaatcggggaatgcgctcgatggaggagggagcaagttaccaagtagccaactagcgaagtggacaagtgaccgaggagcggagagagtggcttatgcaaagccacatcttccagtgctgacaatggcctcccaataaccagaatgcaatttcaagatcatcgccagcggcagtggaaaaccgcctttctaaattgaactaaatagtttccattatagccgcaacgcctgccggctggcaaaccactttccacatacgcagtctgtgagatacttaaccgccgaaagacattgagttgatttagtggacaaggagtcggcatttcgatggacagcgcggaatgaatacctcaacatctcgtcaagacatcgtgcttttagatggataagctgtaataaacatggtcaaaatgacagttgtgcttcgaactaaagagacgttgatggatcgttcggtttcgggtggtttaaaaacatattcattagtcacttataacagatagtaaatcattttattgcacacatattatatttgtttttccctcttatcccatcaaaggtccaggatcaaggtgtggatcccaatttaagggatggcgatggagctacgcccttgcactttgccgcctcccgtggacatctatccgtagtccgttggctgctcaatcacggagccaaattgtccctggataaatatggcaaatcgcccattaacgatgcggcagaaaatcagcaggttgaggtcagtgttgaactagaaaaatttcaattaaacatacatattaacatattaactatttacccctacaattttttcttgtttagtgcctgaatgtcttggttcagcacggcacttcggtggattacaatggcaaaagtagctcacagcggcacaagtcgcagcagcaactgcaccagcagcaccagcaacagcagcagcaacaacagcagcagcacctgagcagcagctgcaactcgaactcgaattcctcgaagcagacgagtcgcagcaatacgatcaagtccaagtcctcctcgactttgagctccgacgtggagccattttacttgcatccaccggccttagcaggcggatcaggaggatcgggaatgggcttgggcatgggaatgggcatgggcatgggcatgagcatgggcctgggaatctcaaggaagaacagcgatgccttgtactcgcaacaatcgaggagttcctccgagaagttgtacaacggttcgtcctccttgggcggcaatccgggtggcaacagttcttcgggaggcggaggcgtcggaggaggaggtggaagcggtggagccctgctgcccaacgatgggttgtatgtgaatcccatgcggaatggcggcatgtacaacaccccatcgccgaatggcagcatctccggggagtcgttctttctgcacgatccgcaggacatcatctacaatcgggtgcgggatctgttcgtggactccgattgcagcagcagtgtgaaacagcatggcaagagtcacgcccaccagctgctacagtcgaaagcgggcaacgctatgaccatccaggcggacgtccactccagctccagcggagcgggcagcggctccgacgagtccgtctccatctcgtccagcttcaactcgccgaagcagcagcagcagctgcgcagccagagtttcaatcgccacggtagcagcagcaacatcagcgccagcggcaacatcaagaacaacaactacaaggcgcacaagggcaagcccagcaatcagaatggcggcggggatcacgactacgaggacatatatctggtgcgcgaggagtcgcgcaagcagcaccagcagcaacagcaacaccagttgcagcaacaacagcagctgcagcaccaggccacccagcagcagcagcagcagcaacagcaacagcagcagctgcaacacaaatacaacgtaggacgatcccggtcgcgggacagtggctcccattcgcgatcggccagcgccagttccaccaggagcacggacattgtgctgcagtacagcaaccacgtaaggatcatttgttattgcaacagaaaggtctaaaagtatgcaagaaaatattttaatttaatgcaacaaacaacatatttttaaacctgatatgcatttgctacttaaagacacctttcaatgtgctaattaactaaattatgttttagacttatattataacaattccttttgatccttcagcatttgaacaacaagcgcaacatgaacaacaacagcaacatgaacaacagcagcagcaacatcgcacagagcagcagcagcaacaacaacaacaatagtctgctgaatcgcaataaatcacattcgattattggactgcacagcagcaaatacgagtcctcgctgaaggacaactacagcgcaaagaacgtcaatctgaagaaccaactcctcaacggcggcatcaagagtgatacctacgaaagtgtctgtccgccggaggatgtggccgagcggaccaagcagacgcacaagaactccatgatccgcaacaatctggcggatgcctccagcaacaacaacaccagcggcagcatcaacaacatcagcaatattggcaacatgaacggtggcaatcagagtagcaggaatctcaagcgggtctcctcagcgccaccaatgcaaaatctggccgtgggtgagtacagaatatttgaaaacaataaataagaagataacaaacttttagacttaatatgattacttattgactttagagtaaatgcgtctgtctcttgagcaattctctgtatgaaaatgttgatttaaaactcttgaaaaatcctcttctaatcctttagtgaatggaccacctccaccaccactacctccaccattgagggcaccagttcaacagcaacgcaataacttgagcgtcgatcaaccgaacagcatgaccggcaacaatggcatctacaagaagaatgtcttcggaccgaatcagggtccaaccaacgccaatggaacaggtggtgcagctcctccgccagttccagcacccaatcccgtggccactgaagcagtggactcggattcgggacttgaagtggtcgaggagccgagcttgaggccatcggaactggtgcgcggcaaccacaatcgcaccatgtccaccatatcgggtgagttctaaatgattaaaattatatactctactctatcttccactaatcaatggagttaaattagaaaatctcgaatgattaatgtagtttatatcaaaattgtgcactggttggagttatcccaggaccccatgaccattatcacaccgagaaatccatccgctataatcattgattgactgattgattaaagttccctaaccgtttgccaggtctttgaaccccatgatttttgtggggggttccgcatcgtcgatggcttgtgaccactgtccacttgtccgtcttgattgatcaattaggggaaattcgccagtcatgttcggctgatggggggaaaatggctgtgaagtgccctgcagtgaaaagatatagaaacgagttgctcgaggagaacctgatgtctgagcggcagtcgaaggctgtcgattggatgggataatggttacatcttgattgaagtgttggctttcaagcagtgttagcaaatggctgtgcgaacaaagccatacaaataatgtcgtcagtttggaaaatattatgattgatttgtgtgtagccatatggaaacaatttctccttatttcaacaaatgcagcttggcaattttctgtccactacttttcatcacctttcaggatgcctttgctaattagttaaaaatccaagtggtcgttttcctagccgatttgttgaagcccgaagacaataaccctcattatcacacaataaatatcgggtatttacttaattgcaaaaataggcgtaactacgcaagcaaaaaacaactgaaaaatgcgaataatacctgccatgtttgacatgtgttggctccgattttccatttgttaattgcccattatgtccgatggggcaggagaaatggagagaggctttaattgagccgacgttcacacgataaggcggcgaagatccgtggaaaatgtggccaaaacaaagaagtggaagtcgggttttgtgctgaaaaagtggaaaactgaaaaagtggaagtgccaacgatgaaacaatcccagccacttgactgccgtataagacacaagtcattcgatataagctacactcagcgaaaagtcgtagctcatatgctcctttcacacgggaaaaaatatgagggggctttcttataaaggtacgcaatctaaaatcctggtaactgtctaatctctgtacatctgtacatctctggcttataacccaattgatttaacatcattttgataaagagtttttaccaattgataaattcggtagatgtgaattatttcgagtgcattaacctacaacatagtcgattgtcgttgggttagaggccttcaaaagacgtatgccatatacccacagtggacatttgggatccccggattcgcgatgaggaagcaatttgccacaactcgcgaatgtcccacacatacacacttgcacataacaattggcgaccgtcgagccatcacccgcaccaccgctcacatgggccacgcccactgcgcctcctccgccttttggcaatcggctcgtggaacttcgcatctgccaactgcgaaagttttacccacgaaagtgaacgtgtttctgcgaagcggcctctctcgtgtctccaatgcgatccgtcgtcatggtcttgggtgaataactttggcgatggcttgaacccagttcaggctgccaacggagctcgcccaggcaacatcgtcacccggagttgagagccgcgactttttcaagcctccaccccgacttatccggccgtccgtccatatcgcgttgaacattctgataatgtgcattgattgaacatagataacagaatgaatatgctgggctcggttaagatgcacaagaattcgcgccgaaactatttcacgctcagcttccatcggttcgatatttttcggtgtaagtgctcccaactgaaatcggtgttgtagataatcccaaagggttacagcccgtgaagtgtatttactttaagtttttctgtgtttttgttaagtggttttagagctacattctttgatggctttaaataagaacggctacatttgatgatatattacaaacgagtaatatatttacgttatgtgttgtgcaactggtaccttttctgcttaacttacaatttgtttttataaattttgtaaaataaattttaaacatataccgcttaaaatgtagtgagcccacaatttcttaaataattaacgtaaacacattgtattctttaatacttacacttttctaacagattaaacttaatatttattgcttaatattatgcaatactaactcttatgattgaaatgtttaagcattagttcctaaatcgtaatattttatcgagagtggacagctcttaaagaaatgtgatttgcactttgtaagccaagccaattaagtcaatttaaaaactgataccatgaagatcaggcattgcactcgtaaaactgcaaacgaaaccaaactggacatcaactccaatttcgaatttcaccgcgaacttgacaagtacaagccgctttttgctccgcacaaattaatagataaaatgtgtggggacatgtggaaaaatgaaaaaatgtgcttttcgttagctcgcttgagttgttttttcaaatcgaatgaataaattcaatgcaaactggctggactcgattgcgagtagttttggccataagagtgcagccatgaatctgcaccaccacctcgtatggtctcgtccaaaccacgtaatgatcgccgtggaaacgggttaccaaaggccgtgaaagttggggacccgatgcgatcgggtttagatggtgtttggccaattaaccggctgcctggaaattgaatgcagagaggcgacttcaatggaaacggcggctaattcaatttttatgggtatactcccacgaagacgttggcggggaacttattcttccgtgtctgcggatattaatccaactatataatatatatatgatttcccaggaagcaaagcgagctttccatcaaatctgagctgcttccaggcaaacaataaggaaaggcattgaattgggacacttgaatgtttccgacatgccaatatctaaattatgttctatccaatcatgtgcggacttttagccacattcgttggccacctatctctgttccttggtctcaccatttatcaaaattggggtatcgagcatctctcgattacatatacatttaaccaccaataagttatcatttatcaacttgagattctgaagtttggttaccaattaatatgtatgcctaaaattaattgaaatataaatattttaaataaactgcagtaaaagtgaacccgacttgatttggaagccaaggaaatatttaaaatatattcattttttgaatgtatatataaatgattattatagttcccaaaatgagctctaatttcaaattatttgcattccaatatgcagcactcatttaacatttctctccgttagacttccacacaaaagtaatttatttgattcacttgttcgtatttttatatgcaactgggttgcaactccgtctccttctcctcgcaaatctccgtctggtggtgaaaggcgcctacgcagcgatccattgtggtttgggcttctcgtagcttcgtagtttcatagtttcgtattttcttcagtacatttgctgtagtttatttgctggctgctcaagttagcatgaccagagtcagactgctgataactgctaacccacaaaactcataaataaattggttcaattccagcgaacaagaaagccaagctgctcaatgccggcagcacaaatggtagctccatcgccgccagctcggatgactcccagtcccgatacggaggatctgtacatgctgccaatggttctgcggccaatggccacttctatggctactcggagggcaacaaaaaccaggggagcaatggcaatggcaacggcaacggcaacggaggtggcggcaactatcacagccatcccaatcagccacactacgcgactggccagccgcatcagtacacgcccagcctgtacggaggaggctcctccgccgaggatcactacgaacttacacagcagcagcagcagatttacggggaaacccatttgcccagcggacagaggacgggcggacccaatctggtcaacaagcagctggtgctgccttttgtgccgcccagttttcccaataaatcacaagacggcgtcacgcatctcatcaagccgtccgagtatctcaagagcatcagcatcgacaagcgttcgtgcccatcctccgcccggtgagtagtgtttattcaccaaatacccccatgaatcgcagagtatatgtacctactcgtatatatcctccatcctccgactttcaattagcacatggcagccgatttaatttggctgaacatctcgtgcaacggctttttataattagtatcggcggtactgttgcctcgcctcaattagccaaaatctaaaaaaaaaatatatatatatataaaaagatacatggcttcaaagacgcttggctgccgctgagcaattagcagctagcagatggctagatctctgtgctgcgccaatttgcagcggaaaatggctaaagaaaatatagctagattttctatacccaacaagagtttttcttacaaaatgcaatttgagacaactcaatttgagataagcgtagctgctgacaaattgatgtttaatgtgccactcatcagtaatggtattgaatttacttggtaaaacaagctcggattgaagaaaaagtcagatgcgcagcactgtagccgagagatattcgcgacttcctctgccgatcaagagtgcatgaaattttatgcgtgccactttgcggcctgccacttttcttaccacagatgcgatgttgcagccgccactgcaactcagttgcaatccgaagatgatactgcgcacacgccacacctggcgcaggtccgccattcgcctactggccacaacccacccccatctcccaactgccctctgccaattgccattttccagtgaaagtagccgagatctctacctaatccaacattttcccccttttgttccaccaacagctccacggatacggaggactacatgcagatacagatcgcccagcagcagtcgcatccgcaccagcaccagcaccacccccatccgcatccacatccgcaccatccccaccagctgcatggaatgggcgagcagccgccgttgccgccaccaccgccgcctctaccccacggaatgttacccccgcagccaccgatgggtccaccgatgggtgtagcaggtggccaggacgcaaccatgtctggcaaatcacacaagcccaagaagccacacggatcggcacccaatagccaggacacggccaccaggaagcagcaccagccactctcggccatctctatccaggatctgaacagcgtacaggtgagcaattggcactccactgtggtcaggaacacatattattaggaaggctcataagaaacaattgtgcttaacttactacaattcctggaccaattctccttcagctgcgtcgcacggacacacagaaggtaccgaagccctaccagatgccagctcgcagcctgagcatgcagtgtctgacctccagcacggaaacctatcttaagtccgacctaattgccgagctaaagatctccaaggacataccgggcatcaagaagatgaaagtggagcagcagatggctagccggatggactcggagcactacatggagatcaccaagcagttctcgggcaacaactacgtggaccaggtgagttctggccaactggtgccagccgaaacacaagcgaacggtggttaagaggcgggtcaaagatctacttgcagataccggaaagggaccaggccggcaacgccatacccgattggaagcgccagatgatggccaagaaggcggccgagcgggccaagaaggacttcgaggagcgtatggctcaggaggcagagtcacgccgcctctcacagattccccagtggaagcgggatctactggcgcgacgcgaggagacggagaacaagctgaagtaagtgggtgtagtggctagtggggagtctcctgacccctggcctcaattgtctgaccttcttctagggcggccatctatacgcccaaggtggaggagaacaaccgggtggcggacacctggcggctgaagaaccgcgccatgtccatcgacaacatcaacatcaatctggccggtatggagcagcactatcagcagatccagtttcagcagaagcagcagcaactccagttgggcaacaaggagaaccatgtcgatcccaagggagctgatcaggatcaggagcacggagttggcattggcagtggcgttggtaacgctaattctggcgtcattggaggtcaggagctcatcgacccatcggagggcagccagggccgcgccgaggaggaggaggataacatcatcccatggcgcgcccagctgcgcaagaccaacagccgtctcagcctgatctgatctgcatccacgtacacatacccaaaaaattaaatccatttttcaatcgactcctaagcggtgtattttttttttttttttttttgtggattaacttaaagcatgtgcaattataatgagaaaaaccctaaatataaagcataaaacctaagcctaaggtctagctacttacattgtactatatgcataatcatttttgcacctccatattttttttttttttcgccaaaacgaatattgttattcctagtgggcagtacagtatctcaaggcgaatcaaacgtatatatctaatcttagctgctgtgcttaagttctatttcggttttgtattttaatcacttatactctctattttttgacatttttttttgtgacttggcttgaatttatttagtactggaattaatttaattgattggttaagcattttttattgttatttgtttttatatacgcggctcaaacaatattacttttaataatataaatacacgaatacatacaacacatctatgaatgaaaaagcgaacgaatgaaacaataaatacatatatataatttaaaacaaaagagagaatgctttagtcgagttccccgataattatataaccgtgtctcagctagtgtgaatgcgagcgcgaaattttattatttttctgggatatcgataggaattggaaaataaaataagaaaaattgatcaaaagtgtgggcgtggcagttttaggcggcttgtgggcggtagagtgggcgtggcatcgtgggccccatgttttcctttgccgttggcggtgtggtaagtttttcttaattttgtaaatcaatttttatacctaaaatttccagccaccgcgctaaccaactcggtgtggctaaggaattttggtcggaacgtatcgacgtattgtatacttgacatggtcggagaccaatacattttcaacgaatctagtatacctttttactctacgagtaacgtgtttactcccttcatattctatttgttgcttttgttggagtccagacccattgataccgctggcgcccatcatttgaatcatcgagtacagaatatccaggaagtctgtctattggcaatagaattaagatttttgaacatataacatccttttttatgggtatagaacataaggttgaaggtggttaaagtcaaataagtcagttagtaataatgagcacatcgatttccaaagctctgtatgtgtcacattcgtttaaaagtttgaaacagcaaaaaaaagccatgtttgtcggtccgtcggtatctcgtgatctgagacactatacaggctagaaaggtgtataagatatgttgtcacaccccgaactcccaaatcaggaagaaagcatctgctttgctcataatttcatggttttattaccaacttatgtcatgctggctatgcaggtattgatgttgggcacaaaggcgttgcagccgtcgaccaccttcttggtggcatcgacgtagcaggaagaggtgttgaagggcagggctgcgccctgcttgatcaatgtgttcatgcggcggacaagggac

SEQ ID NO: 10775 - DNA, 5309 bp, DROSOPHILA
tctgctgacccttgtcaaaggagatcgggaaatgagatccctcggttgccttctattgagcctccttggtgggcgagatctgttaagagcgctggccagccgatttctgtcgcgctccagcctgtcatggtatctgctcgagtgctggtttatctcgtcaaataccgttgctagtttgaggtctttgtgcagggttgtgttccttacgaaccattctgctctacataatttggctaataagtcattaagctactttcttacaaattgttaattattctattccttattcctttccatcctgcagaaccataaacgattatgcgctcaattcgaatctgcacctaagccacaacaccaaactaaacaatctgcacagcaacaagctcctccacagcaaccaaagccacagcagcagcatcaatccgagcacaaggatgcactcccaccagctggattcctacctgggcggagtgggcagtatgatgaatctgggcggcatgggccaagttggccagatgtaccatccggggagcgtttccggcagcgaaagacccaacggaggagctctggcccttcactatgctgccgcacgtggttgccttgattgtgtccaactgctggtcgccgcatccgtggatatttgcgccaatacgcaaatggacaacgatgtcacgcccgtttacctggcggcgcaggagggccacttggaggtgctcaagtttctggtgctcgaggccggcggctctttgtacgtccgtgcacgcgacggaatggcaccgatccatgccgcttcacaaatgggctgcttggattgcctcaaatggatggtccaggatcaaggtgtggatcccaatttaagggatggcgatggagctacgcccttgcactttgccgcctcccgtggacatctatccgtagtccgttggctgctcaatcacggagccaaattgtccctggataaatatggcaaatcgcccattaacgatgcggcagaaaatcagcaggttgagtgcctgaatgtcttggttcagcacggcacttcggtggattacaatggcaaaagtagctcacagcggcacaagtcgcagcagcaactgcaccagcagcaccagcaacagcagcagcaacaacagcagcagcacctgagcagcagctgcaactcgaactcgaattcctcgaagcagacgagtcgcagcaatacgatcaagtccaagtcctcctcgactttgagctccgacgtggagccattttacttgcatccaccggccttagcaggcggatcaggaggatcgggaatgggcttgggcatgggaatgggcatgggcatgggcatgagcatgggcctgggaatctcaaggaagaacagcgatgccttgtactcgcaacaatcgaggagttcctccgagaagttgtacaacggttcgtcctccttgggcggcaatccgggtggcaacagttcttcgggaggcggaggcgtcggaggaggaggtggaagcggtggagccctgctgcccaacgatgggttgtatgtgaatcccatgcggaatggcggcatgtacaacaccccatcgccgaatggcagcatctccggggagtcgttctttctgcacgatccgcaggacatcatctacaatcgggtgcgggatctgttcgtggactccgattgcagcagcagtgtgaaacagcatggcaagagtcacgcccaccagctgctacagtcgaaagcgggcaacgctatgaccatccaggcggacgtccactccagctccagcggagcgggcagcggctccgacgagtccgtctccatctcgtccagcttcaactcgccgaagcagcagcagcagctgcgcagccagagtttcaatcgccacggtagcagcagcaacatcagcgccagcggcaacatcaagaacaacaactacaaggcgcacaagggcaagcccagcaatcagaatggcggcggggatcacgactacgaggacatatatctggtgcgcgaggagtcgcgcaagcagcaccagcagcaacagcaacaccagttgcagcaacaacagcagctgcagcaccaggccacccagcagcagcagcagcagcaacagcaacagcagcagctgcaacacaaatacaacgtaggacgatcccggtcgcgggacagtggctcccattcgcgatcggccagcgccagttccaccaggagcacggacattgtgctgcagtacagcaaccaccatttgaacaacaagcgcaacatgaacaacaacagcaacatgaacaacagcagcagcaacatcgcacagagcagcagcagcaacaacaacaacaatagtctgctgaatcgcaataaatcacattcgattattggactgcacagcagcaaatacgagtcctcgctgaaggacaactacagcgcaaagaacgtcaatctgaagaaccaactcctcaacggcggcatcaagagtgatacctacgaaagtgtctgtccgccggaggatgtggccgagcggaccaagcagacgcacaagaactccatgatccgcaacaatctggcggatgcctccagcaacaacaacaccagcggcagcatcaacaacatcagcaatattggcaacatgaacggtggcaatcagagtagcaggaatctcaagcgggtctcctcagcgccaccaatgcaaaatctggccgtggtgaatggaccacctccaccaccactacctccaccattgagggcaccagttcaacagcaacgcaataacttgagcgtcgatcaaccgaacagcatgaccggcaacaatggcatctacaagaagaatgtcttcggaccgaatcagggtccaaccaacgccaatggaacaggtggtgcagctcctccgccagttccagcacccaatcccgtggccactgaagcagtggactcggattcgggacttgaagtggtcgaggagccgagcttgaggccatcggaactggtgcgcggcaaccacaatcgcaccatgtccaccatatcggcgaacaagaaagccaagctgctcaatgccggcagcacaaatggtagctccatcgccgccagctcggatgactcccagtcccgatacggaggatctgtacatgctgccaatggttctgcggccaatggccacttctatggctactcggagggcaacaaaaaccaggggagcaatggcaatggcaacggcaacggcaacggaggtggcggcaactatcacagccatcccaatcagccacactacgcgactggccagccgcatcagtacacgcccagcctgtacggaggaggctcctccgccgaggatcactacgaacttacacagcagcagcagcagatttacggggaaacccatttgcccagcggacagaggacgggcggacccaatctggtcaacaagcagctggtgctgccttttgtgccgcccagttttcccaataaatcacaagacggcgtcacgcatctcatcaagccgtccgagtatctcaagagcatcagcatcgacaagcgttcgtgcccatcctccgcccgctccacggatacggaggactacatgcagatacagatcgcccagcagcagtcgcatccgcaccagcaccagcaccacccccatccgcatccacatccgcaccatccccaccagctgcatggaatgggcgagcagccgccgttgccgccaccaccgccgcctctaccccacggaatgttacccccgcagccaccgatgggtccaccgatgggtgtagcaggtggccaggacgcaaccatgtctggcaaatcacacaagcccaagaagccacacggatcggcacccaatagccaggacacggccaccaggaagcagcaccagccactctcggccatctctatccaggatctgaacagcgtacagctgcgtcgcacggacacacagaaggtaccgaagccctaccagatgccagctcgcagcctgagcatgcagtgtctgacctccagcacggaaacctatcttaagtccgacctaattgccgagctaaagatctccaaggacataccgggcatcaagaagatgaaagtggagcagcagatggctagccggatggactcggagcactacatggagatcaccaagcagttctcgggcaacaactacgtggaccagatctacttgcagataccggaaagggaccaggccggcaacgccatacccgattggaagcgccagatgatggccaagaaggcggccgagcgggccaagaaggacttcgaggagcgtatggctcaggaggcagagtcacgccgcctctcacagattccccagtggaagcgggatctactggcgcgacgcgaggagacggagaacaagctgaaggcggccatctatacgcccaaggtggaggagaacaaccgggtggcggacacctggcggctgaagaaccgcgccatgtccatcgacaacatcaacatcaatctggccggtatggagcagcactatcagcagatccagtttcagcagaagcagcagcaactccagttgggcaacaaggagaaccatgtcgatcccaagggagctgatcaggatcaggagcacggagttggcattggcagtggcgttggtaacgctaattctggcgtcattggaggtcaggagctcatcgacccatcggagggcagccagggccgcgccgaggaggaggaggataacatcatcccatggcgcgcccagctgcgcaagaccaacagccgtctcagcctgatctgatctgcatccacgtacacatacccaaaaaattaaatccatttttcaatcgactcctaagcggtgtattttttttttttttttttttgtggattaacttaaagcatgtgcaattataatgagaaaaaccctaaatataaagcataaaacctaagcctaaggtctagctacttacattgtactatatgcataatcatttttgcacctccatattttttttttttttcgccaaaacgaatattgttattcctagtgggcagtacagtatctcaaggcgaatcaaacgtatatatctaatcttagctgctgtgcttaagttctatttcggttttgtattttaatcacttatactctctattttttgacatttttttttgtgacttggcttgaatttatttagtactggaattaatttaattgattggttaagcattttttattgttatttgtttttatatacgcggctcaaacaatattacttttaataatataaatacacgaatacatacaacacatctatgaatgaaaaagcgaacgaatgaaacaataaatacatatatataattt

SEQ ID NO: 10776 - protein, 1409 aa, DROSOPHILA
MYHPGSVSGSERPNGGALALHYAAARGCLDCVQLLVAASVDICANTQMDNDVTPVYLAAQEGHLEVLKFLVLEAGGSLYVRARDGMAPIHAASQMGCLDCLKWMVQDQGVDPNLRDGDGATPLHFAASRGHLSVVRWLLNHGAKLSLDKYGKSPINDAAENQQVECLNVLVQHGTSVDYNGKSSSQRHKSQQQLHQQHQQQQQQQQQQHLSSSCNSNSNSSKQTSRSNTIKSKSSSTLSSDVEPFYLHPPALAGGSGGSGMGLGMGMGMGMGMSMGLGISRKNSDALYSQQSRSSSEKLYNGSSSLGGNPGGNSSSGGGGVGGGGGSGGALLPNDGLYVNPMRNGGMYNTPSPNGSISGESFFLHDPQDIIYNRVRDLFVDSDCSSSVKQHGKSHAHQLLQSKAGNAMTIQADVHSSSSGAGSGSDESVSISSSFNSPKQQQQLRSQSFNRHGSSSNISASGNIKNNNYKAHKGKPSNQNGGGDHDYEDIYLVREESRKQHQQQQQHQLQQQQQLQHQATQQQQQQQQQQQQLQHKYNVGRSRSRDSGSHSRSASASSTRSTDIVLQYSNHHLNNKRNMNNNSNMNNSSSNIAQSSSSNNNNNSLLNRNKSHSIIGLHSSKYESSLKDNYSAKNVNLKNQLLNGGIKSDTYESVCPPEDVAERTKQTHKNSMIRNNLADASSNNNTSGSINNISNIGNMNGGNQSSRNLKRVSSAPPMQNLAVVNGPPPPPLPPPLRAPVQQQRNNLSVDQPNSMTGNNGIYKKNVFGPNQGPTNANGTGGAAPPPVPAPNPVATEAVDSDSGLEVVEEPSLRPSELVRGNHNRTMSTISANKKAKLLNAGSTNGSSIAASSDDSQSRYGGSVHAANGSAANGHFYGYSEGNKNQGSNGNGNGNGNGGGGNYHSHPNQPHYATGQPHQYTPSLYGGGSSAEDHYELTQQQQQIYGETHLPSGQRTGGPNLVNKQLVLPFVPPSFPNKSQDGVTHLIKPSEYLKSISIDKRSCPSSARSTDTEDYMQIQIAQQQSHPHQHQHHPHPHPHPHHPHQLHGMGEQPPLPPPPPPLPHGMLPPQPPMGPPMGVAGGQDATMSGKSHKPKKPHGSAPNSQDTATRKQHQPLSAISIQDLNSVQLRRTDTQKVPKPYQMPARSLSMQCLTSSTETYLKSDLIAELKISKDIPGIKKMKVEQQMASRMDSEHYMEITKQFSGNNYVDQIYLQIPERDQAGNAIPDWKRQMMAKKAAERAKKDFEERMAQEAESRRLSQIPQWKRDLLARREETENKLKAAIYTPKVEENNRVADTWRLKNRAMSIDNININLAGMEQHYQQIQFQQKQQQLQLGNKENHVDPKGADQDQEHGVGIGSGVGNANSGVIGGQELIDPSEGSQGRAEEEEDNIIPWRAQLRKTNSRLSLI

SEQ ID NO: 10777 - DNA, 2759 bp, DROSOPHILA
atgcttcgaccacagattgcatttatgcaaatacaagaatattttaagaatggtttgctgtgcaaatttgtataccctttaatcttaaataggtgaaatagtaaataagcccattctaattacgtttttgccattgcaggtgagggtgccaagatgatcctggagaagcagttcgacgccgactgggccaagaacctgaagatcgtctatgtgggcgacgataccaccgatgaggatgccatcaaggtgctgcacggcatcggcaagaccttccgtgtgtccgagctgcccacgctgaagacctatgccaactaccagatcaagaccgtcgaggaagttggatatcttctgaaagccgtgcaggcttactacgagaagaagaagaaggcctaagcccaacgctagaggatattaagcctaagctaaattccacgcacactcacactcaacacacatcataattacacgtaaaaaaaaaagaagaaagattcgcccatttgagttgaagtataatgcaatacaagttaacttgctggacaattgctctcgaaaccttttttgtgtctttgattttgccaaataaaatataaatacaatcttttttaaacttacgatttgggtgcttttctttaagtttcttttctatctgcatcttaaaagctttactacatttaggctagattaactttaaatttcgtttttagtaatctgatttccttattttgaaaaatagtactatattcaatatcttttttaatgcttaaatagttcgacgaaaacatgctcactttttgcttttaaaagatgcaattaagttttaaaatacatatataattgaatggttaactgatactcataaatgcagacctattacgtaaattttaaagcccaaatagtctagataacataccaaatccaggtccgatcatttgggatgtgtaaacatgtcttattaagctatgcattactgtagaggtttaattcttgatcgctaagtgctatcccgcgtctgtagaccatttaacgccgttcccccttaaggccacctcgtcctccacctccacggccgccacgggtgccaggtttcgttgtcgtttggggtgcgattgctggcgccgcagcaggagctgtggtcacggcgctctgggtggcgggagcacctggtgcagcagccaccgcgggctgtggaatgcccgtggcaccacccttagcgggcaagccaggagcaccaccaccggccggaagtcccgccggagtagcagcaggatttgccaccgcctgctgctccgcccgtttcggttcactcatattgacgctctcgttgaagaccatgcagtactcgccgatcttgaacacctcgccgttctttccggaataaagggtcagacaatgcctccagatggaggcgtagccctttgtcagtctgacaatatcaccgggtgctatcagtttgcccggctcgtcccaaatcgaaacattgatgcaggccgtaggatcgcccaccttataaacattgttttcactatattatttgtttttatgtgaataatgcaacgatggacccaccttgaagttcctcacttcgcggttttcttttgtaacggtggccacgcccacttccaggacaataaagataacattgatgttcttcagacccggctttatgtccttaataggaatgcattccacgttatacattgcagaatgagcaagagtttttaaaaagtacaaaaatgatttgttttgttttggcgtagtgcagcgttgccagacgttgaaacggctttagtgtgacctcacctaagacaaccaaaaatactttagtttgctttggaactgattattccagttgtttcatccaatttttttttaaattttatttcttaccatctaatttgaattgttatatatacatttattttatttatcgtttagtaaattaaaaatattaattttttttcttgatcaatcatctcataataagtacagcgaatgttgaatagattctatttcaacggaaggataactttatatttacaagcaaacattactttatcaattttgttagttcgtgattagaaaccctataagtaattcaaaaactaacacacaagcaacaaatttaattgtggtcactaaattagggaaccaccctagataaaaaagctttatcatttccggcagatgtgaatcattttaaatttctacatatatcattcttctgactgtgctagctttcgattatttcaacataggggcgtagataaaatctacaattaaccagataatttaattggaaacctccagagcagttaagttcaataaaccggtgaaagtgggcacaaaaaagaaattcctggaagagcaaacaagttgacattaattaatcaagtgatgattatctaacattacagccgttactcgtagagaaaaaaagtatacctcattcgttgatgaatatgcaacaggtaaatggaattctcatttcggatcattagttgatctggccatttccgtttgtgattttggttaccataaaagctataaagataagatcgagcgtgcagatcctataaacgcaacgcaagtttgtttcagaagatggacacgcccaatatattttgattttattatttaatttgttaaattctttatatatacgcactcccgctagctgagtgatctaatagtggaggatatcgactttagcgctgatttcagaaatgaagtatgtcattaagttgaagtacatatctact

SEQ ID NO: 10778 - DNA, 696 bp, DROSOPHILA
cactacgccaaaacaaaacaaatcatttttgtactttttaaaaactcttgctcattctgcaatgtataacgtggaatgcattcctattaaggacataaagccgggtctgaagaacatcaatgttatctttattgtcctggaagtgggcgtggccaccgttacaaaagaaaaccgcgaagtgaggaacttcaaggtgggcgatcctacggcctgcatcaatgtttcgatttgggacgagccgggcaaactgatagcacccggtgatattgtcagactgacaaagggctacgcctccatctggaggcattgtctgaccctttattccggaaagaacggcgaggtgttcaagatcggcgagtactgcatggtcttcaacgagagcgtcaatatgagtgaaccgaaacgggcggagcagcaggcggtggcaaatcctgctgctactccggcgggacttccggccggtggtggtgctcctggcttgcccgctaagggtggtgccacgggcattccacagcccgcggtggctgctgcaccaggtgctcccgccacccagagcgccgtgaccacagctcctgctgcggcgccagcaatcgcaccccaaacgacaacgaaacctggcacccgtggcggccgtggaggtggaggacgaggtggccttaagggggaacggcgttaaatggtctacagacgcgggat

SEQ ID NO: 10779 - protein, 204 aa, DROSOPHILA
MYNVECIPIKDIKPGLKNINVIFIVLEVGVATVTKENREVRNFKVGDPTACINVSIWDEPGKLIAPGDIVRLTKGYASIWRHCLTLYSGKNGEVFKIGEYCMVFNESVNMSEPKRAEQQAVANPAATPAGLPAGGGAPGLPAKGGATGIPQPAVAAAPGAPATQSAVTTAPAAAPAIAPQTTTKPGTRGGRGGGGRGGLKGERR

SEQ ID NO: 10780 - DNA, 8026 bp, DROSOPHILA
cacaccaagagtaaatatttttcaataaaaaaccatcaaattgctgttcaaacagcatcaataaattcttttctctgtagtgcgccgggtaaaatgtaataaatgatcagcaaaacgacaaacacacacggcttggagaggccagacaagaggaccaccatgatggtgatggtgatggcagcggctacaaatgggcaaagcataaatacacaaaaagatgccaaaaagcggagacggagaaaaaacaatttcaatcatcatgatcataattaaaaggcagccagccagcgcacacacacatagcgaatggacccagaagcaacatgttgctgctcctccgctgactgtgcaacttcgcacttcagaattaaacgcaattagagcgagctggcacaatgtgaagagagagagagagagagagtgatagtcagcgcttcgtgggcggagccatggcatctggaaaatcgagaggatttttcaaaatggaggtgccaaaccagagcgggacggctagctcccgcactccgtacactgccacagccaatcgatggtgagcagcaggtaatctcgatcaatggctcaagacggaaacgagtcaagctcgttccattcagctcgatcgagagatcgctctgccagcggaacttgctcagttgaaatgcgaacttggcgagctcaagacacgaccgtcgcccaaagatacaaaaaattctctcaatatatttgtggtaaaataataacccacgtacgcgacaccgggcctaatcaaattaacacccacgcacatgagagacttttgtgtgccgtgatttgcataattgacgctaatcggcggcgtctcgtgctcggctaaaaagtaaacccgggctccaaaaaaatagacaccgccatatgttgtgacagtgctttttgtgtgctggggaacaattgtgcaagtgacaaacgccaaacaaagaagtttcgggcaaagatttagtactatttttggacccaacacatcatgatcaccatgaacgagctggtggatctgcgcatgcagcagcacatagcacacgagatctatcgccagcagatcatgcagcgcataccaggtaaactgcttgcccccttcatatcactcatccgccccgttacgcgtgcggcaaagctgttagccatcattagcattaatggtcgtaacttttggcaaactgcttttgtttctgttactgtctcagcccaccaaagttggccaagatcagcggggtgtgtgcgagtagcggtgtttatggccagcggatcataaagctgagtaatgtgggaaagtgatcgccgatcgagaaacttgatatcaaatgcatttttcttgttgccgacggtcgttaaatttcgggatcagcgtacccctaaaacaaaatcgttgtttgccaaagtatcgctccttattttgtggataccagatggagggcattaagtttggtaatcgggaaagaatcggtgttcctcgttcgccaaataagcgtttttatataaccccatgtttgttcgtttgtttttatgacaaatatgtcagtcatcatatggatttatgccgtaagatctctttggataagtcagaaatgtcacactttaattcagacccacgctcttaaactaatggcgactattaagttatttgaatgggtttcattttagccaaataccatgttaatatgtttacataatttcaataattcttaattttctttgttgaagactaagtagtttgttagattgcttgagcttttgttaacctataagccccctattgattattgttcttttcagatccgtttccgccgatgctgccaattccgatgccacggcacgtgatcatgccacctcgagtcacgttgcccggcgtggagatgaccctgcagaacgacgatctatggaagcagttccatcaaattggcacggaaatgatcatcaccaagagtggcaggtaggtttagaacagagagaaaagatctttgatgatgaaaatgatgaaaaaccaagagtgggggaatctcgagatatacagactttagagatcgggaacaaacatagatgtagcgatgcattagcacgaacatgaaaactaataccccagacgcagggcaaagaataataaaccagccaacgggcgcgggcacttaaagcaccctataacgatccctagcccgatccctggcccgatcccgattccgatccgattcagtagagtccagcgaggatgtgctgctgttaaaggctcattagatgcaggcgcctgcaaattgtttacagcggcgtcgcgacaacgattttcacaggcaaacaaggcggaaggatgcacttacgtcggcaggatgtgaaaatcgaaaattgaaaattgaaaatcgggaaatggaaaagcggttgcaggttcagccaaaattgatgcgcactggacatcggctatcgcacgaggcgtaaagcgaacaagttcgccggcactttgcgtgctcagatcgtagatagtacgaatcaaaggcatagcgcgatcgcccggagctaatttatcgtgtatctatgagtatcagatcagatgcacgactacttgcacaaaggcgactacctaaaagtgtccggcacttgttcgaatgtgcgtaaagtggcgtcatcgtaatttattgtagaccgaccaactggaccgatcgggcgagcgccgagctcagtgggacgtcctgtcggttcgtcggcgctcctttatgcctcgcctggcataaatcttcgcgtcaaggatactttgtcgtcatctttgtagctcttagcgtttttattgtggcgcctgtctgcgcagcgaacaacctgcggccccgaaatatcttcgcgttctgcattctataagatgctcgtacatatctgtatcttttggcagtgacagtgaccacagcttgtcgacagatacgagcaatttcacacttgccctcagttcgagccgatcaaaaagggttcccaaacgcattaacataaacttttggtctcgaaatgcattgaatgaatacacttcgagccacgaacaacccttttgttttatatatgccatgaattattcatatagtctgcgtattaaatactttttatgctcatcaaaaatgttttatgggcatcggtggagaggtcgcgatgcaatcgatttgaatttttaatgattaggcgccagagtgccaccgtctgtccaatcgcatcccaatccccgtttcatttcccatacggatacgatcccaagtccaaaacctatgcctatgccaagtggcgctcataaaaactaattagttgcttgtctgggctccgcttgccacttgaaccgttccatctttttgggtggtaaaagcgcagacggccattaaagttagatagaacaaaccgtatcgcttaatgtctgatactggcggcaaatgaaatgactttgtcacgatgcttttagactgtgtgggctcctccactcaccaagagaggcggtaaacagaagcgacacggtaacttcgatgagaagcgcaaatatacccagaattttcaattggattcaaacttttagttgcagaaagaaaaaaagaaaatattttaccctttctctaataagaaatgttattcctagtagactcattcaaaactggcttacgatctgaagagttcaaaatttatgtcgtttgcttccagttttatagctgtcaattaataaatagtctcactcttaatttcctaaatatgctaattctgggaatatcaagcagctatttatatggaattgtagggtaaacattggagtgagctctggatatttccagagtacccttcgggagtccgagatccgatgctccgtcgcattcctggcttgtgtccctgcacctgcgaagcgtcaagcgccaagtcgaatgccgtcaagtggtcagcatgctccttactcgcagtagaaaattccactggtaattatgcgcagacgcgccaaagatatcgatcttaacaaatcgtttgtccaaatccagacagcggactcttgccaaaaaaataaagaaaaaaaaaaacaataaacaaaaactgagagcaagcaaattgaaaatgaaattctaaaccgcacaaatgtcgaaatatttcggtgccgtgctctaatggaattcaacggagctgaaaaggcagacccgaagccagaatcaaattaaatgttagcaaaccgaggctctgtggatttcaattaattaatcatcggttgagggaaacacgaaatcattgccaaaaacaagaaaccattcgaggatgaggacgctgttgaggatgaggacgaagggcaaacatttttcggccaggcgccaagtgccgtgaccacctgctgttcctgcggcagcgacttggagttgaaggcgagggtcagggcctcgcatccttgttagcacagggaaaacggcccctactccaccgggcaatctctatttgaccagtcctaattacatggcgcatggaagggaaatctcacaattaaatatttgtaacgcccacgctggaaccgggaatgggctccttttgtcgttctagcatgactatatttgagtttgttcggtaaacaaaggctctaaggttttccaggcgttttcctggacttcccccgctcatctgacacagaggaaaatgttgtaggaaagcagtataccaacgatttggtaatatttataagggaaatatctgtaagataactctcatgtctaatatggtatatacaaaaggttatgctaggttttataacaactttgaaattagccatttatcaaatagtaaaatataccatataattatgatattaaagtcttatttgtattaataatataatgaaaaatgattttgtcttatataataagagactgattaaactaataagatgcttttcctttcccctaaagacgcatgttcccctcgatgcgactaagtgtttccggcttggaggacgagagcaactattgcgtgctcctcgagatggtacccattggcgactgccgctacaagttctccggctcccagtgggttccagccggaggagccgagccgcaaagtccccagcggatgtacctgcatccggacagtccggccaccggtgcccattggcaggcgcagcccatactgttcaataaggtcaagttgaccaataacacgctggataacagcggccatgtaagtgcggccagggctttgaagtcgtctccagttactaatccaagtccaaacccctttcgccatccccattcgcagattgtcctggccagcatgcacaagtatcagccgcgtctgcacgtcatacgcaccgctgatctggcgcagattccctgggccccacaacaggcctttgtgttcgccgagacggagttcgtggccgtgacagcctaccaggtaagtggtgtgccatccccatccctactccgtttaccctctcaatgggcgccatcattttggtaatgagtctagctcaatgtctaattagtactctcaaataaaatatatatctttgccacacgatgagaatcccttctagttcaaaatcacctcatggtatcctatctttgattaattcacatgttattcacagacttatccaaggttgtctaaaatcgcactattaggtatttaacaaaaatgtttcgtccaagagtattcgagtcatgtgtcctcgaagttagccttcctacttgtgtgtgcatttttttttttgccaattcattgagcaaagagactggaaacgatcacactaattggttaattttgggcaaacgagcggcgatcgctcacgccgtgggtagcttggtcaacgtctcgaattagcatggaacgcctccgtggatcgtgtagttggtgggcagggcaggcagaaagtcagcgggtcggattgttgttttaggaagttggatagccacatccttgtaaatttgagcgcctcgctgtgtttttgtctaggtctaggcccattgacagccgacgccagtctgcctctaattagcaagatcgccgagagatcggagattcggtttgagaaagatccgaaagatcacaatgttgtcaagtcatctggagtggaactgagcaccgagaactggaaacgcagtctggtgtcaagtggccatgttacttaacgccagctactggacgccagtgacttatgtgatgagtcttcttctccttctccatctccatctccccgttgcccaagattatgctggcggcaatcgtcatatttcacgctcgtcttgttgccttcttccgcagaacgatcgcatcaccaagctgaagatcgacaacaatccgtttgccaagggcttccgcgaaacgggacaatcgcgctgcaaacgcaagatgtcttcatcgccaacgggcgaggatcaagatcagtcgccgtcactatcccattctcagtcccaatccgagtctgacatgtcgccaacgaaaggaggcggtgagacagccggaggaacatcgtcgatcggcgattcggatggtccgcaaatcaagcgcctgagatcaaatggctcagcctgctccttatcatcatcgctggacgatcagtcggtgcctggcgccagttctttggccctgggctctccaccgccccatctacattcgcattcgcatccgcatcccctccaggcgaggagtgcctccagcgtttttatgcagcactttcagcagaatatgcagagcctgctgaggccatcgcttgtggatttggcatgtacctactttgggagaccccatgagtatggaggagcgattcaggcctcacctatgtatccaccagcagcgatgctacaggcgggtttgggcccacatcctggcctgaaccttccaccaggcgtttccggcgcggatctcatttccgatgagtcgggagccgaagaactcgaactggatgtgggcagtgaaacgagcacgttggagcagtctacgcaggaacagccactggaacaaccatctacaaggagcaagggcttcagcatatcggccattttggggggaggaagttagagatattaaagttttaaaacggggtatacctatagtttaattgtctatagattaagttctctaaatcatttatacatatatactcatagtactcattttgatattatacagattctagcctgattagtacctaagttcagcttaacgttaagccattaaagttagcttaaaatataagagaatcaatttgttttatttcaattaggattatatagatcctcctgctgggctgagccctcaaacccagaacgcccatccatcgctgtaggtaaatgaacatatctgaacataggaaaaatactaccggcagttggccctctatcattggccgatcttgggctgaaaatcacaacttccgccagacattaatcccaaccaatttacaagataaacgttcgggtttcgacaacatcatcagggcatcctccgccgcaacatccattagccacacagagatgcgactggctagaacataatttgtttgcaattaaatagctcgacaaggcatgaaattcggttgcagccctcacttggtcggatcggatgctaccctagagaatcggatccgtagtcggagacgaagacgaaggcccatgatatttatgaaatgggcagagactgagacgaagccaaagaaaatacacaattcgttatgtaagttgccgatgagctggagaggatctagctcaactgccgaagggctgaacggagccaatgatgaagtttacgatgacatgcgtcaccacccacgtctcgtctggattcgagggccacaggggcggtgcagacagcgctgcccgcccagccatcggaaaaacaaacacggttgaatcaatttggcacactggaagaaatgggtttgagatactaaagtacactccccttaacaaaaacgtaaaagcgtacagattacacattaaagcaagaggtattcaatcaaaaatataaattggtatcaggatctgagtctagaacatattggtgtacaaagtcaaacatt

SEQ ID NO: 10781 - DNA, 1410 bp, DROSOPHILA
atgatcaccatgaacgagctggtggatctgcgcatgcagcagcacatagcacacgagatctatcgccagcagatcatgcagcgcataccagatccgtttccgccgatgctgccaattccgatgccacggcacgtgatcatgccacctcgagtcacgttgcccggcgtggagatgaccctgcagaacgacgatctatggaagcagttccatcaaattggcacggaaatgatcatcaccaagagtggcagacgcatgttcccctcgatgcgactaagtgtttccggcttggaggacgagagcaactattgcgtgctcctcgagatggtacccattggcgactgccgctacaagttctccggctcccagtgggttccagccggaggagccgagccgcaaagtccccagcggatgtacctgcatccggacagtccggccaccggtgcccattggcaggcgcagcccatactgttcaataaggtcaagttgaccaataacacgctggataacagcggccatattgtcctggccagcatgcacaagtatcagccgcgtctgcacgtcatacgcaccgctgatctggcgcagattccctgggccccacaacaggcctttgtgttcgccgagacggagttcgtggccgtgacagcctaccagaacgatcgcatcaccaagctgaagatcgacaacaatccgtttgccaagggcttccgcgaaacgggacaatcgcgctgcaaacgcaagatgtcttcatcgccaacgggcgaggatcaagatcagtcgccgtcactatcccattctcagtcccaatccgagtctgacatgtcgccaacgaaaggaggcggtgagacagccggaggaacatcgtcgatcggcgattcggatggtccgcaaatcaagcgcctgagatcaaatggctcagcctgctccttatcatcatcgctggacgatcagtcggtgcctggcgccagttctttggccctgggctctccaccgccccatctacattcgcattcgcatccgcatcccctccaggcgaggagtgcctccagcgtttttatgcagcactttcagcagaatatgcagagcctgctgaggccatcgcttgtggatttggcatgtacctactttgggagaccccatgagtatggaggagcgattcaggcctcacctatgtatccaccagcagcgatgctacaggcgggtttgggcccacatcctggcctgaaccttccaccaggcgtttccggcgcggatctcatttccgatgagtcgggagccgaagaactcgaactggatgtgggcagtgaaacgagcacgttggagcagtctacgcaggaacagccactggaacaaccatctacaaggagcaagggcttcagcatatcggccattttggggggaggaagttag

SEQ ID NO: 10782 - protein, 469 aa, DROSOPHILA
MITMNELVDLRMQQHIAHEIYRQQIMQRIPDPFPPMLPIPMPRHVIMPPRVTLPGVEMTLQNDDLWKQFHQIGTEMIITKSGRRMFPSMRLSVSGLEDESNYCVLLEMVPIGDCRYKFSGSQWVPAGGAEPQSPQRMYLHPDSPATGAHWQAQPILFNKVKLTNNTLDNSGHIVLASMHKYQPRLHVIRTADLAQIPWAPQQAFVFAETEFVAVTAYQNDRITKLKIDNNPFAKGFRETGQSRCKRKMSSSPTGEDQDQSPSLSHSQSQSESDMSPTKGGGETAGGTSSIGDSDGPQIKRLRSNGSACSLSSSLDDQSVPGASSLALGSPPPHLHSHSHPHPLQARSASSVFMQHFQQNMQSLLRPSLVDLACTYFGRPHEYGGAIQASPMYPPAAMLQAGLGPHPGLNLPPGVSGADLISDESGAEELELDVGSETSTLEQSTQEQPLEQPSTRSKGFSISAILGGGS

SEQ ID NO: 10783 - DNA, 13583 bp, DROSOPHILA
aattaggactaacataccgtgaccggcggcatctcgatctgttccgcctccgtgaccagttttcggttgctctgcatgtagctccagcccagatggatccccaccagactggggatcatcacgacggccaccaggttgcgcgacacgaacgagggctgcttgctcatctttacaaaattcgtaaaacggaattattattatttaacagctatcacaaatcaacaatgacgatgtgaccgcattgcgatgtttgtttaatcttatcaacgaaaaataccaacctataacgctgccccaaaacgggcggctagttttgaataaagtttctatctcccccaacttggtccaaagtccaacgttttcggggataataatgggaaactaaacgtctcgcaattctttgtctgggacttcgattgcttgggcagataagcatctgtcattagtttgttgcggtggctggttttaataacaaatgcggtggaggtggttagagtagatcaatggcattgtaaaggggaacttcacttctcgtagggtatattagttgctgcgaaattctttaaagactttttgtgattatagaaggcctgaagtaactggtaaggtccttcgcttttataactaacataagattataatagttaaaaaacaaaaatgtgtaattatactactttacgtacaagttaaaattgtctaagctttgaattcaaataacagaaagatgaaaaataattttaggtgcttaaagttcttagtggacaaactaattcggaaaaattagaaaatatgtatgaaataattataagctgaaatctgaaattttaacttaatctgttttaaaaaccgtaaaataagctataaatttatcgtcacaataaaaccaattttatttcaaattatgaattaaattagaaattaagtatgaccgtaacctcccgtctcaatccctgttctggtcacactttgcaggcaaggcgaagaggcagttaactaactgttaattgatagcccactgcgtcgccaactaaccttttcccatattcccaactcaacccattaagtgcgaaatccacacccgcgtcgccggaggggcgtgggcgggatcggatggggcgctggctttggggccaagctggaggctaagacgcggatgcggtctatgcactttgcgcacacaaacaacaacggcagcggcagtaacaacaacaacgacaacagtgggccaaaacaaacaaattctgttatagacgtcgacgtcgctgccgttgttgttgctattccattttggacagcacctgcaatttgagttgtagtttcagttttagttttgggttcctggcgagcagacgctccattggacagtttatacacatacacatacagacctacatatttgtatttttggttgatttgcaagtgagttctcccacccatagttgtgccacctgcccctaaatccgacctttttgccagtgctgaaatcgatagtgaccgtcatccgtttgcacctggaggagctgtggctcaggtaagcgaatcgccggtgcgcaagaaccccgccccaatcactcatcctgcacggctactactccgcctgtcggaacaggccaatcaagcgattacgttcaaggccagggaatagaaattattattagaaatagaaatccatagaagaaaacgactatcaccttcttgtcacaaagaaaagaggtcaatggacaactgcagaatcattggagaatattgcatcaaggacttaaagtgtagagtgcgttaggacttcttgtgtagacaacatatagctcgatcgacattaaggtcaatatttgataatcagttagatcttatgatattatgatctacttgatggaagctgtggaaagaatgttttcacgtattgacgcagtctaaatttgcttggccggtatttacctattctatttttcgaaatgatatcaaaagtctataattctgcttaagcaatatattattcatatccatggagcttggtttcatgtaatctttctatgtatatcgctgaaatctgaacattaccctttgaagaccgtttataagaccgtttcataatggctcatgcattgtttaaactactgccttaaactaaaggcgcgcatattgttcttaagcccattttcagtcgtagtagttataccatgtaacattcgtttcggaatttcagcttagcctaatttcgatttctatagagatatcgcattttgagtttgtgagatactaattgacgatatttaacgaacgtgtttttgattatagctttaagtgttgacgtttaatccagtatatttcaccccgaccaggaaatagctttctagccgtatttgtttggttgcgtatacatcgtaccttaactaggtaaaaatcaaaatgtttacagtcatttacttcatgatatttacgacacatacgagattatacgaaaaataatctttgccctttttcatggtcttttgaccccgtcgtagaagttagcaaatcgagttctaatgaaattccgctaacgactttgtattacttagctatcagatcgttagtccagcctcttcatgttattcgttgcatttttatgagaaattgtcatttattttttaaggcctttagtcggtctaatggtaaatgcatgattatcactaaaatattggtcgcaaaagaccatataaagcagtatatatcagaggatttaggaattcaaatcactttagactgtccgaaatcccaatcgggttactgaataatgttatccttcttcagcttggccagctcatccggcccgtaacccagtagttcgcccagcacttcatccgtgtgctggccaagaatcggaggagctgtccgggcatcgtttcgcgcttcgctgaaggtcacaggaggaccaaccaccttgactgtttcgtccttgggatgccgcaggcttttcaccaggccaatggcttttatatgctcgtcctcgaagacctcgggaatggagttaacaggtcccacgggaaaggaggcgccctcgaaaagtttcatccagttgcgcgaggtgtcctcggatagcatttgctctaggattcccagcagctccactcgattggtcacacgatccttgttggtcttgaatttgggattctgcgccaaatgttccacttttaggcggcgacacaggtccacaaactgaacatcactgccagtgcccagggtgagatagccgtccttcgtcttgaagctctgatacggaacgatgctggagtgtgcggtgcccatccttcctgcttcgaccccggaattcaggtagttgctacccacgttgagcagcagggagcagcaggtggacaacaggtcgacttcgatcttctggccacgttgcgtgcgggtcctttgatagagggctgccaaaattgctccatgggcgtacagtcctgtggacatatccgtcacagccacgcccaccttgctgggcggtccatcccgctcgccggtgatgtgcatcagtcctccaaccgaggaggcaatcacatcgtagccgggtcgcttggcatacggtcccacagagccataacccgtcattgagcaatagatcagtttgggattcaccttacgcaactgctcgtagcccaggccgtaacgctccaaggtgccgggcacataattctccaccagcacgtcgctaatctcggccaggcgatgaaggagttgcgtgccgcgcttgatatcgatgcagatgctccgtttattgcgattgggagccaggaagtaggcggcatcgttgctgttctttagaaagggtggtccccacttacgcgcctcatcgccaaagtgtggacgctccaccttgataacttccgcgccgagatccgccagaaccatggtgcaataggggccggcgatgatgcgcgataggtccaaaatccggataccatgcagcgggtggcgttcgtccacatcgctggcattagcattatcggctgcgttgtttttatcgccaacggctgcgaagtttctcaagctcgggcggcaaactccgtaattaagcaatccccggacgaggcgtaaattctgtgacaacatggttctttttttgttgctacttgtgggtcaactaatctgtcgccagtacacatgtgtatgttgtgtgtggaaagttttgcgggccgacttgatccgcggccacttttatcgtcactgaaagtggccctccatccaaaagtcgtcggaagctcgtagtcttatctctttttagttgctcttaacattcgcctaagagtgggagctttttgtttactatctaaagactgcgataaacaacacctggaagcccaaaaacaaaaagaaaaaaagaaaagagtctctctctcattgcgcttcaccttggggagtttccaccgagaatgtcgcgcatcctttcggtttcatgggggggaatcgcctcagctgaccaccagataatgagaggttagtcatccgcgatggcatgtcattaagtggagatcgaatgcctcgctttgcattgttttctgttctgtactccgattatatcaccttgctgacatcttggatagcgtgatcttatattaagcgatccgcttggaatcaaaacaagcgttttgcctttcttgaaatactgacaggccacgagcctaatgtacggcaattattccctaatgaccagcacaattaaaatgtaatttgaatgtcgtggctggataacttacgcctcaatgctcaccataagtgtcaggcggattagtaatccgcaagtacaacgtttagtgatcttaattgttgggcagaactggttcatccacgcgcagacgattaattaagattcatgctcagggaaggaattgtactcaaattaattcgtagaactcgattttcaataataataagacattttattcaaattgatatgtaataactagattagcatacaaagtatgaacgtgacaaacttttagggagcaataaactatctataagattcgtttgcaattttgatagatactaatgaattcatgttaaatattttttttgttctattggttcttatctgagttgtgagcaaattagaataaccagtagtatcatcttaaaagtaaaagtaaagtataagcgtaggcacattattatctcgccaagatcactgcccacatcttggggattcagtttaaaatagcttggtcttttccataattattgctccttatcggcaaagtcgacgtagccatcagttcttgaggaccatggccttgaaatagttttctcttgtatagaaattctagctaattttagaaaatacctgttcctgaccagttactaacttgttagcggggtgtaagagtaggttcaaggttctagttccttggaaatgttttctcaatgcgggcttttcccccggaaacctcgcctcgtggaatcaatatttattttcagaatgacgttgcactaatatgtgcgcagtgatctcagttttagctggtactggggtcagcatacatggcctaaacagctcgatacgatgcgaaagccatagacatagcccatttgctctcaccgatctgtgtaattacgatgggagtcctccctttgttcgcaacgttgtaaacaaggcgatatcattgcaagattcgaatataactttaatcacttgggatcaagagttcaggccatgtaattgtcgatctacggaatgacgcacttgctcgctttatggccatttcctttgggccagccgggaatcacgttcacaatcacgccggtcattatgcccaagcggatcttaagagacagcctaagagaaccagtttccgagcagatagagcttcgcagcgtttgggagattgggaaatgggagagtcggactttaaatactcggtggcaagcttaaccagcgtttatttactcagctcgtcttgctcgcgtcggttcggctcgtggatccatcagatacacacgtacagatatatatacatatacatatatatagaaagaaaccgaaagcgataccgattcagatgcagatgctgatgcagattgagataaccagtgtgttttgagtgaaacaaaatgaaagccggccaaaggctgggcatgcgtcggcagctcggctgttcccaatcggcttattcgcgagtgcatcccgcagataccactgccaactacgattactagcggccaatgcagtccagaaagccgcgactcgactattagccaactgaccaagccaaaaagccaaaagcatctcgtcgagctctcaactctcggtacccaaaaaaattgtgcaagccaaaaagtcgattgcagtcgtcagctgcggattgccgattgcggattgcacaatcctggcaacctgttgctgttcgttggctgctgctgtgtgtgtgtgtgtttggtgtctgtgttagccgcgttgtagaatcttgtatccagcgtatccagtcggtgatacgcagatcacatcacattttcccccatcgagtggtgcgttgagagaaaaccgtcaaaattgctgtgctactctgttccaggatcctggggtacatcatgcgccgcttcctgcgctcggccatgatcgtcttcagctggttcgtcgtcccctacagccggtacaccaacatcaaggtgatccggcgcaaattgccgcccatccggagccacctgctcgagattcccgccgtcgacctggccaagctgattcgcaccagaaaggtgagtacttgcaatcctcaactcccccaaaaaattgggtcacttacgcaaagcaaagcagcagcacctggtaaatgggtcggctcaaaacttgccaaatcaattggaaagactgttgccacagtggcggtttttgttgccacatttattggatactggtgaataataactattgcttgcaaccaactcccggggagttggagaaatagatagtttcgctttttttttttttgcagaaagtaaaaacgcagacgagacaatgacgcgcgtttctaatttttcactttataagacgcggagcactggcccctaacatttcaattagacaagtaagccattaaaaaggtcgagggtagaacgaatggacgacaagcaaaggggtaaataccctaaccagactaataaattcaaaaagaactgaagactaaaattcaagtcaggttcaaagtctatgcgtaccttaaaaaagaaatgtaattataagatgaatttatattttagtttgcttcatcaaaaggtcagcctattactgtcaataattacttgttaaattcaaattcacaaccattcgagtttacattttaatgatggcgaacagaatttattatttattattttgaggtcataattaggtggcaattgcttcacattaagccaattatttctgcgtagccgtatagccaaacttcaggggtcaataagctcagatcaagtggctaaggttcataacacataaaagttaccagcgaaaaagagcgaaaaaaaaaccgcgcgcagttttgtttataaattcagaataacgatgattcttacttttggaagatttcgtaaaaaattccaatggcgaaatttgccaacatttaataaaaaaaaaaaacgtttttattcaaaatcctgtttttaatacgtcttttcgacgcttcgagaagcataacatcgcatcgagtgaccctaggccagagtattaccgccagatgaaatcgaaatcaatttgggtttttttccctccatttctaccgacgtctcgccatcgcaagcacttaagccaattggcccaaaaccaaaacaccgagggactgggatatagacgcgaggcattgaggaaaccggcggcttagtcatctaaagcactagccaagcatttttttatgacgccagcgccagtttcgcaaatcatcatacatatgggcaaggcctgagggtctcactctctgcaagcgaagctgtatctgtatctacatctgtatctatatctgtatctttatccatatcatatcaaaatcaaagttgaagatacgagcttttcgggctgccaattacatgccacatgccacatgtgtctttgtttttgagtgtacatatccacgggatgtgcaacatctatgggtcgttcgttggtccacatcgtgtgaggtcaccactggcgactgtgggggggagaccttatcgtaacaccaagcggcgaccaccacccgccctccagttaccatatcgtgatcagtgggctgcctttgtttaatcgctgtgcgctgctgcatggaaaaaacttgcacttgaatggatggatagtagttgggtttttagtgcacgtccgtctgaagtacgaatattgtactttatttattttttagtgacgctttttacggcttctgtcttctttcggcaaggcggtcatatggtgcgtacgagtgctaaatattattattttaattatgcatctttatatgtttttttgttgttgtgtttaaccctcttaattgctcgttggtttcattgccataggttaggcattgcctcacagcgagccaagcgtaatgattttgcaattggcattatatcagaacgcgcgcgtctagttggccgatcaactactagcgaattaaataataataatcaccgtttcagcgaccagaagttgcatttaagaaagtgatactgctaattgcccttgtccgcttgtgaacttaagtgaataccctaggttttaggtttctgggtagatctatctgcaatcttaaatctgctcatgtggattcgtacttgaatcgcataattcgtgtttcgtttttttgtgtttttctttttcgcttcgcctgttgactcttttagcacgtacttcatacaccatatagtaccatcatacgtacttataagcaccacttgaatctgtgtgtctgtgtgtcgcgatttctttatactatatactatatactctatagtatatgatctatactctatactctatgccgtgccacaagatattttctacattgtaaacatcagagcgttggatcgttggtatcggttcggaatcggagtcgaaagcgcttttcggtcgctgatttcgtagcatgccccccttggtgaagccctcgcgacttgccattattggttgcatgctattggccggttgcagcgtgtttacctggtcggaaccccctctggccaccagtggcttcttactacactggaagtcattgaaaaagtcaagtagccttaattttaattatacataggcacatatgtacatacatacgtacatacgagttgctttcatatacgccggtgcatcatttgtgcgttgcatgagcccgaaattaaggcgaagtaagacggcaatttatgtctcaatcgtaataaagacggggcacatggaaggccttctgcctccgattacccagattaactgaaatcaagttcagaggttaccctcgatggcagaatgtggtttgctatgccaactacgagtatgtggtttcgattgagtgatacccatttgatttgagtgcaacgaagctcggtttgattgataagtgcttccccccatcaattacctaatcagatatctgaaaagcgggtgagaatgtgattaattacattatcggctgcatcacagtcagtgcttacgactctaagtgttgttgatcatgggtgattataattgtatcgattctcggtataattataagtttattcactgctaattccatggctaatatgtgagtcatgagagaacatacgtgttttgatctattgatcgctttattatcctctaatatcgaaattctttgtattcacaatcccattcatatacgcacgcttatattttattgttttgtttgtcagcctatttggttttatcgctgcaaatggtttctttgtgaattaattgtgacacataaatatggatggcaaataattgatcaagacgtgctgaagcccatggattagctacttattgttcgttcccttttatttaaataatcgatcaacgctttgtcaacattttgttgtgattaacacatagagaacttgttttctgccttagaattctaatttactcaagatattgcacaatcttacgaccataatacttctattattatctccgtgactttagttggcgttgagtgttttttatttccttaatcttaatttgattgatacattgttgatcgcctgctcaatccataaagaactcttcacgacaacaaatctattgattacactgaggaataacacggaaatcagtctgaatgaatgcctcaatcgacatatggcactggattatgtattttagcatatttcgatctatgtattgacaagtgaatcaattccaagagtagcctctttgaactgagaccccaagagttctataccccccatggtattcgcacattactcatacgtcatgtggccgctgataatgggcggtcgaaagtgcatgtatcgcacgatgaacgtcacgactgcaagttgtgtttgggtttgtctttttattgattttaatttaactcaaattgctttttgcttcgccactgccactggccgcttcccaatagactgctgaattgattgctgggaatttgaattaaaatggggtaggggtataggtacgggtatgggtatgggaatccgagaggaatgtgagctgttcggaatgcgaggtaacctgcggaaatactcaaacattctatgctttccacttgcagattaaaagcgaagaagtcgtggaagcctacatcgaacgatgtcgacaggtgagtttataatgggtatcatatcatggtattatagaataaatatccattctaccaggtgaaattcctgtctagaactatacttatgtgaattttagcgtgttttacttcccataaaagagttcaattcctatatcgttaaacttttaatggctggacattaagttttacgattgtcatttacagagtaataacaaataagtgaattaattgtatgtgaagttttgtataatcgccggtaaataaaactaattttttattagttatcctaaaatatctataatattaactttacactcatccgtatatattttttttttgtggtcaataataaagtataggtatgctttataatttgattttgtaataaatattaaaaaattatttgaaatgttgtttacttttctgtgctctaaacttttccgtttgatttcttgcaggtaaatcctctgataaatgccatcgtccaggatcgcttcgaagaggcattggaggaggctcgggagatagacaacgtgatagcgatgggcattaacagcgtggagtcgatggaggagctgaccccgttgctgggcattccggtgaccgtgaaggagagcattgccgtcaagggcatgaccaaccaggcaggtcgcgtcttcaagacgccgcagatagccaagtcggatgcgccggtggtggagcagatcaagcgctccggcggcatcatccttctggtgtccaacacaccggagctttgcctgctgtgggagacgtacaacaacgtgacgggtcagacgaagaatccgtacgacctgaagcgcactccgggcggctcatcgggcggcgaggcggccctcctggccagcggtgcctccctgctgggcctcacctcggacattggcggctcttcgcgcctaccggccatgttcagtggcatttggggccacaagcccacaccgtatgcggtctcctttaaaggtcatcatccgacgagtgactttcccaagtggggagatttcttcaccatcgcgccgatgacccgctacgccaaggatctgccgctgctgctcaagtgcatgagcgatcccacgggtcccaagctaacgctggacaggcctatcagtgtgaatggtatccggttcttcttcatggacaacgacgggccatcgggcatgatgcggccgctgagcagggatctgcatgcggccatcaaccgcgtggccaccgatttcaatgccaagcgggtgaacatacgcaagatgaagtggtcgctggacatctcgctgtccgccatgctgaccatgaaaaacatcgagaccatctaccacaagacggaggagggcgagcagcccaagaccgtgtgcaaggagacggtcaagtacttcttcggatgctcggacagcatcctgccgtcggtgatctttggccatctgcagaacttcatgaagatcatcccaaactcgcgccacaagcacctggccagcatcatcgaggcgctcaagactgaattcaaggagatgctgggcaacgacggcgtcttcctctatccgacctttcccaacacggcgcaccagcattaccagatctaccacaagctcctggagcccatgtacatggccatcttcaacacgcttggcctgccggttaccaactgcatgatcggtctggaccggcgcaacctgcccatgggcatccaggtggtggccaatccaggccaggatcaccttagcctggcggtggcccgcgaaatggagcgccgctacggcggatgggtgcgtcctccgtccgaggacagccacagcagcggtgggagcagcaagcagcgtggctagggtatggcctgtatatatcctgtgcgtgattcatttgtactttgttttgttattagctaattgtacactgtcgagcagttagggaatttcagagagactttaaatggatttagacaaatcactgttatcagccgcagttggctgaatggtagaaaggaaaggaatccctagatcagcctccatactttatcagcattttattcgaccattacaccatcacaccaccaaatgttcgttcgggaccttcgaaattagtaatccctcaatcgcgagtcattaccacccattgtattaaattattgtcaaaaaaaaaaaaaaaactccaatgagctgtacatcgtattcgtattcgtaatcgtattatctttacctatatgtaaatattcgtctagcatctaagtgttaggtttatgtcgcgtccggcagagatcgataaatataaccagtatgtgtacgttttgtagcatctctcgcttaaacaacttgaaaactttacaacttttgcaaagaaccaaattcgttgaataaatacgtaacagaaaaaatattaaccgaattttcaacttctgtggcgcaattgccgccgaaaagcagttggcctccacttggaagccatcgagggaggtccgagttcgagtccgagtccgactcggagaatcggagtccgcgctagtgcttggaaattgggcccacctgagcggtggacccgaagacatagtgaaacaagtattagacggctactagagacaatacacgctcggatacgtgtaccacttaataaatggttccacttcgctgcccgtcatggagaatcttactacagtcggacctgtttttgccaaattccgatactaactaactgattggaataacagatttaatatagtcagcagaagactccagacattttgacgacttccagttttacgctgtgaactttgatcgtcgctattagtacttaattaatggtttattatgaagaatataatttttaacttct

SEQ ID NO: 10784 - DNA, 1998 bp, DROSOPHILA
ttaattgatagcccactgcgtcgccaactaaccttttcccatattcccaactcaacccattaagtgcgaaatccacacccgcgtcgccggaggggcgtgggcgggatcggatggggcgctggctttggggccaagctggaggctaagacgcggatgcggtctatgcactttgcgcacacaaacaacaacggcagcggcagtaacaacaacaacgacaacagtgggccaaaacaaacaaattctgttatagacgtcgacgtcgctgccgttgttgttgctattccattttggacagcacctgcaatttgagttgtagtttcagttttagttttgggttcctggcgagcagacgctccattggacagtttatacacatacacatacagacctacatatttgtatttttggttgatttgcaatgctgaaatcgatagtgaccgtcatccgtttgcacctggaggagctgtggctcagatgcgccgcttcctgcgctcggccatgatcgtcttcagctggttcgtcgtcccctacagccggtacaccaacatcaaggtgatccggcgcaaattgccgcccatccggagccacctgctcgagattcccgccgtcgacctggccaagctgattcgcaccagaaagattaaaagcgaagaagtcgtggaagcctacatcgaacgatgtcgacaggtaaatcctctgataaatgccatcgtccaggatcgcttcgaagaggcattggaggaggctcgggagatagacaacgtgatagcgatgggcattaacagcgtggagtcgatggaggagctgaccccgttgctgggcattccggtgaccgtgaaggagagcattgccgtcaagggcatgaccaaccaggcaggtcgcgtcttcaagacgccgcagatagccaagtcggatgcgccggtggtggagcagatcaagcgctccggcggcatcatccttctggtgtccaacacaccggagctttgcctgctgtgggagacgtacaacaacgtgacgggtcagacgaagaatccgtacgacctgaagcgcactccgggcggctcatcgggcggcgaggcggccctcctggccagcggtgcctccctgctgggcctcacctcggacattggcggctcttcgcgcctaccggccatgttcagtggcatttggggccacaagcccacaccgtatgcggtctcctttaaaggtcatcatccgacgagtgactttcccaagtggggagatttcttcaccatcgcgccgatgacccgctacgccaaggatctgccgctgctgctcaagtgcatgagcgatcccacgggtcccaagctaacgctggacaggcctatcagtgtgaatggtatccggttcttcttcatggacaacgacgggccatcgggcatgatgcggccgctgagcagggatctgcatgcggccatcaaccgcgtggccaccgatttcaatgccaagcgggtgaacatacgcaagatgaagtggtcgctggacatctcgctgtccgccatgctgaccatgaaaaacatcgagaccatctaccacaagacggaggagggcgagcagcccaagaccgtgtgcaaggagacgaacttcatgaagatcatcccaaactcgcgccacaagcacctggccagcatcatcgaggcgctcaagactgaattcaaggagatgctgggcaacgacggcgtcttcctctatccgacctttcccaacacggcgcaccagcattaccagatctaccacaagctcctggagcccatgtacatggccatcttcaacacgcttggcctgccggttaccaactgcatgatcggtctggaccggcgcaacctgcccatgggcatccaggtggtggccaatccaggccaggatcaccttagcctggcggtggcccgcgaaatggagcgccgctacggcggatgggtgcgtcctccgtccgaggacagccacagcagcggtgggagcagcaagcagcgtggctag

SEQ ID NO: 10785 - protein, 507 aa, DROSOPHILA
MRRFLRSAMIVFSWFVVPYSRYTNIKVIRRKLPPIRSHLLEIPAVDLAKLIRTRKIKSEEVVEAYIERCRQVNPLINAIVQDRFEEALEEAREIDNVIAMGINSVESMEELTPLLGIPVTVKESIAVKGMTNQAGRVFKTPQIAKSDAPVVEQIKRSGGIILLVSNTPELCLLWETYNNVTGQTKNPYDLKRTPGGSSGGEAALLASGASLLGLTSDIGGSSRLPAMFSGIWGHKPTPYAVSFKGHHPTSDFPKWGDFFTIAPMTRYAKDLPLLLKCMSDPTGPKLTLDRPISVNGIRFFFMDNDGPSGMMRPLSRDLHAAINRVATDFNAKRVNIRKMKWSLDISLSAMLTMKNIETIYHKTEEGEQPKTVCKETNFMKIIPNSRHKHLASIIEALKTEFKEMLGNDGVFLYPTFPNTAHQHYQIYHKLLEPMYMAIFNTLGLPVTNCMIGLDRRNLPMGIQVVANPGQDHLSLAVAREMERRYGGWVRPPSEDSHSSGGSSKQRG

SEQ ID NO: 10786 - DNA, 5820 bp, DROSOPHILA
tcgggaatttggtattgcgtgtttgttttttgggagagcaaccgattcgctgtgtggtggcacgcagagaactcttctacgcgcggtgcacgtgccgtttaaggttatgcctgtggaactcgggcaactcctgtggctcctcgtgcttttctgccgacctggtctcgatcctggtctatgaatcctggagatccagctggtggctcggactcgtgcgctttgcaatttaaatgacgcactggcgcgctgaaatcattcccagaatttggattgcgcgggatgctatcagaaagtctgatgacggagcaggaggaactttacaagtttaagtagacggcagcgttgcacgctactttcacaatctgtaccacattcgattgtttgggcaatatcaaagtttattcgacttgggatggtattgcatttttactagttgacaccgcatccgttaattacacaagcgaataacagaatcttgtggaatacctgtgccgacggggtcttatactgttggaatgaaatgcggccgcatttggattgagggaaaacggtgaaattttatgcaaatggtcacactaatatgaacagtgatataatttaataactttaagttaaaataaacgcaattataaatatgtacaacaaatatatgtatagatacattgtttacttctttggatattaaaaactcataaaatggttttttttttataaaaatgtatttcgaattggcttgcttcaaaattgtattttttttatttaaaacatacacagataatgtgagttgaaagttttttaatttaatttaagcagatggtgctataacattctgattaaagttcttttatgctaattagaacagtgcatattgttttaagtgcctcccaacttaattataaaaaatgaaatacactatcgatagccaactgtgcaatcgatagcgtgtcatctctgactcaaatgcactcgaatgcagcatgaccgtttatgccagttatcgataattccacggccacactgctcaaatgttcagttctaaatttaaagcgtagtttgtcgcacacgaaacgatgcgcgagtgtaatcgactgcaataattaaacaaatcggcagcgtgccacaactagtgaaattgcaatagcctagcggggaaaattgacgagcagttgaattagcaaaggaacaaacattttcacaaaccacgtaacgtaacacatgtgggtgcgtgtgtgtgtgggtgcgagcgagaggcagtgtgtgtcaaaatgacagcagtagcaacaacaacaatagaaacagaagcagcagaaatcaaatgaacaacaacagcttagttaaccagctgtgcgaggtcgcttcagaccctcctcccacctttcccacagaaaactgaaaaaccaaaaccacatttgacaaaagtaacaaaattgttctgttccctgtggcaggcaagatcaagcaccaaattgttagttacgttatcaaaactcaaaactcatcgagagtgttatgaacatactaaatccaggcaaattcaagtgtatcgtatttgaccaactgcgtcacacttggacatttcttttgtttatctgcgacttcctggcgaagatttacaggacgcctcgtataactgcccaccaggagcagctggccaaccataataataacaacaacaataataacgatctgatcatggaacaggacatgccagaggaggaagtgggtcagccagaggaggctctgccgcagcaggacaacggtgaggttgtcgaccgtttcaatgccattcaggctgccgtggagctcatggacgcagccagcgatttggacgaggaagaggaggaagaagacgacgacgtggacgtggatgtggactacggcgatacagattcggagtcagaattcgaagagatgtactccgacgagtggaccagttccagcgatgagctggacgagggtacagagctatctaagagtgtcttgaatgtcttcctctcgtcggataaacagcaatctcaaatggccggacagattcccatgtacgccttccagccgttgcgtctcgtcaagtgccagtacagggataaacatatacccggtggattccctctggcacgcagtggccaccggatcattgcctccaattcgcatctgtattccctgggtggctacaatccgcggagcgccatgtctgcatcacgccacggccgatgtcttctcttccaggagctgtggagctacaactttgccacgagaacctggaggctggagctgaatgcgggcaatgccgccaatatgcccgtggagctggcctccaatgcattgaccattcacaataacgtgttgattgtgagtatctatttgatgctaatcgctgcagatgggggacggggttcgtggggttttaggcagacgaaaatagatgagttggattgtctcttgctcgttgggtgtgttggtaaacacaaagaaaaaccaactcgattgaaaattgtgatcttcaaagagaagcagaaaaggtctgtagttgtagatttctttgttttatttcgttcaaattgctagtacttgaagtgatcatatttctttctgtgtaggttaggcaaactatcaattgcaataaaaaaaacttgtttgtgctcaagtagaaaacacaattgaatggtgaaatgagcagagaaatcaggcacagctgatcgcggagatctcgaaagagagcagtgaatagtagagtagtgagagagggctattctgggcaatgaaaatcgccagggccaatgccacgccctgttccgcgtctcaacaccgccgcctttgctttttgtttatgcattctaaacacccgaaatgtcaacccaaacagctgcccatggccattgccgtttgcctctcactcggaaggcacctccttcacctccaccatctcctcctctgcctctgcgcatgccaggcaaccctctttttccattttggttactacgcagttgttgtttatgctgctgccacatgcaacaacttgttttccagctttccccacctcgcgctcggctggaaaaactgaaaacattgtatttaccatttttacccacccagcagctgagtgcgcgcgcttttttagttttcgggaggaaaccgaaccgaaagcaaagtcaaacgggagctgttggcatttcatgctggcatcaatgcccttcccttgcattccacaattagctataatttgatgacgaatcatgccccgatacatacacaaaaacacactggagacacatgtttccgcttatcggggctgcagctcagcctccacccccctcccacaatactgctggtccctccccattttcccatttctctgctctttcaccaccaggcgatgataagctgctgcagctcaagtatctgctaattaaatgcattggcagcaatgtcagggacgtgggtgccacccgcttaactctacatacatacatataactatatattgaaaaaatccagaggtttagaaagctaaattgtttaataaacaacgagttttttacttcttagaagagtcataacgatttaaatgtaaagtctaggaaagtgggcttgtatacattttgtttactctttattattattttctatatatcttagtgtcagcttttcttgaaaagaaattaaattctaattttaatactactctttcagtctcatggcggcactggttatccatttggagtatcctgctccaacgactgttacgtttaccgaacggccagcgctggcgcgacaccgggcgtggatcgcctccaggttaagggtgacctgcccacggctcagtacggaccgggaatagtgatccacaagcacttcctctacacaatcggcggaacgacgggatttgattacacttgtgatgtttatcgtttggatttgcgcaccggtatatgggagaatgtgtacataagtcgtccggagatgcgagacgacccagaagggcgctaccgtcacgaggtcgtttatgatggcaagcacatctttgtgctgggcggcggcacatcgcactctgtatacgatttgcagcgcattccggcttacaacctggaggcgaactgctgggattactttgaaacgtatcccgatcagcgtgcagctgatgcggacgacggcaacagaggctatccaaagccgcgcaagtgcttttcctgtgtgcagcaccagtcctccactggggacatcgaggctttcatcacgggcggtctgcaagtgagttatactttataaaatgatattaacaaagatgatagcagtaggactttttaactttgtggagttcagacagaatttataccacttcctcttgaggctgtcaatgcagcaactaatgcgaaatccttgacttgcagggcgacttctccacatatttttcggacatctggaagcttaatctgcgcactaagcattggtatcgcatcgagaccgccatcctgccccgccccctttacttccactcggcggcccactccgataatggatgcatgtacgtattcggaggcatcgagtacattgacaaggagatgcgccgccgcaacgatctgtataagatgtggatgacagtgcccaaactgagcgaaatgtgctgggacgccatcacatactataacgacaatcttgatttgtacgaccgaaaaacgctactggaagccggtataccgaaacgttttacggaacgcctgccgccgcagcgcaggaggcgtttggacacgagccagccagacccgtccatgctaatttcgctgtactcgaacccgaaacgtgcccgctcctcgacgcaataggcctgttactgttcccacaaaaataaatcgaaatcaaggagggtagcggacccatactcgaaactctttcagttgcagaactttatgttatcattcttttaaagttttgtttcacattgagcgcgcgctgtgatcgaacatgaagataatatatatcgaatatatagttgtacacatgtgtatttttatacttgtgtttcctatgcggacatgtttagcatgtaaataagagtgtaattaagtttagctagcacaacaacagccagatacaagccatgcgtatgtattctaaacttcagcttacagatcagccagcgcaccgcgaaaacggagcatcggaaaaattcgctataaatctataaatcttttacctggtcctcaaatcttacttgctatatcgaaacacggccctgatataatgtttcaccctcattaaatccaacacacatcccactttgcacccaaacaaaacaaaacaaaacaaacaaacccataatgaaaggctacaccaaacaatgtcatatagaggggggacatccccgatgtatttttgtcaaagtgtacataatacttagcggtagtaatatttaattaacaataagactccatcaatattgcgatatcatgtaccatgcagtacgtaggctactgctcgcccccgtggcgaacgttggtttgctcggtttacattacccaagactaaatttggttgaatctaagttaataaataaatttctaatgcaacacaatcgacttttcattcgtaccattcgactcctggcgcagatcatccacggcgtacttgccaatgacccagtttcttgaatttgcagccaaacaaaccctgtccctgctccgaaatttctcgagaagatggggggcaggcaggcagccaggcggtggtgctgagtcatgcgcaatttgcaatcccaaaatgcaccctgctaaccaggattttcggctaactgcgtagcaccagcgttcaaaagtacaggtattc

SEQ ID NO: 10787 - DNA, 2339 bp, DROSOPHILA
ataattccacggccacactgctcaaatgttcagttctaaatttaaagcgtagtttgtcgcacacgaaacgatgcgcgagtgtaatcgactgcaataattaaacaaatcggcagcgtgccacaactagtgaaattgcaatagcctagcggggaaaattgacgagcagttgaattagcaaaggaacaaacattttcacaaaccacgtaacgtaacacatgtgggtgcgtgtgtgtgtgggtgcgagcgagaggcagtgtgtgtcaaaatgacagcagtagcaacaacaacaatagaaacagaagcagcagaaatcaaatgaacaacaacagcttagttaaccagctgtgcgaggtcgcttcagaccctcctcccacctttcccacagaaaactgaaaaaccaaaaccacatttgacaaaagtaacaaaattgttctgttccctgtggcaggcaagatcaagcaccaaattgttagttacgttatcaaaactcaaaactcatcgagagtgttatgaacatactaaatccaggcaaattcaagtgtatcgtatttgaccaactgcgtcacacttggacatttcttttgtttatctgcgacttcctggcgaagatttacaggacgcctcgtataactgcccaccaggagcagctggccaaccataataataacaacaacaataataacgatctgatcatggaacaggacatgccagaggaggaagtgggtcagccagaggaggctctgccgcagcaggacaacggtgaggttgtcgaccgtttcaatgccattcaggctgccgtggagctcatggacgcagccagcgatttggacgaggaagaggaggaagaagacgacgacgtggacgtggatgtggactacggcgatacagattcggagtcagaattcgaagagatgtactccgacgagtggaccagttccagcgatgagctggacgagggtacagagctatctaagagtgtcttgaatgtcttcctctcgtcggataaacagcaatctcaaatggccggacagattcccatgtacgccttccagccgttgcgtctcgtcaagtgccagtacagggataaacatatacccggtggattccctctggcacgcagtggccaccggatcattgcctccaattcgcatctgtattccctgggtggctacaatccgcggagcgccatgtctgcatcacgccacggccgatgtcttctcttccaggagctgtggagctacaactttgccacgagaacctggaggctggagctgaatgcgggcaatgccgccaatatgcccgtggagctggcctccaatgcattgaccattcacaataacgtgttgatttctcatggcggcactggttatccatttggagtatcctgctccaacgactgttacgtttaccgaacggccagcgctggcgcgacaccgggcgtggatcgcctccaggttaagggtgacctgcccacggctcagtacggaccgggaatagtgatccacaagcacttcctctacacaatcggcggaacgacgggatttgattacacttgtgatgtttatcgtttggatttgcgcaccggtatatgggagaatgtgtacataagtcgtccggagatgcgagacgacccagaagggcgctaccgtcacgaggtcgtttatgatggcaagcacatctttgtgctgggcggcggcacatcgcactctgtatacgatttgcagcgcattccggcttacaacctggaggcgaactgctgggattactttgaaacgtatcccgatcagcgtgcagctgatgcggacgacggcaacagaggctatccaaagccgcgcaagtgcttttcctgtgtgcagcaccagtcctccactggggacatcgaggctttcatcacgggcggtctgcaaggcgacttctccacatatttttcggacatctggaagcttaatctgcgcactaagcattggtatcgcatcgagaccgccatcctgccccgccccctttacttccactcggcggcccactccgataatggatgcatgtacgtattcggaggcatcgagtacattgacaaggagatgcgccgccgcaacgatctgtataagatgtggatgacagtgcccaaactgagcgaaatgtgctgggacgccatcacatactataacgacaatcttgatttgtacgaccgaaaaacgctactggaagccggtataccgaaacgttttacggaacgcctgccgccgcagcgcaggaggcgtttggacacgagccagccagacccgtccatgctaatttcgctgtactcgaacccgaaacgtgcccgctcctcgacgcaatag

SEQ ID NO: 10788 - protein, 609 aa, DROSOPHILA
MNILNPGKFKCIVFDQLRHTWTFLLFICDFLAKIYRTPRITAHQEQLANHNNNNNNNNDLIMEQDMPEEEVGQPEEALPQQDNGEVVDRFNAIQAAVELMDAASDLDEEEEEEDDDVDVDVDYGDTDSESEFEEMYSDEWTSSSDELDEGTELSKSVLNVFLSSDKQQSQMAGQIPMYAFQPLRLVKCQYRDKHIPGGFPLARSGHRIIASNSHLYSLGGYNPRSAMSASRHGRCLLFQELWSYNFATRTWRLELNAGNAANMPVELASNALTIHNNVLISHGGTGYPFGVSCSNDCYVYRTASAGATPGVDRLQVKGDLPTAQYGPGIVIHKHFLYTIGGTTGFDYTCDVYRLDLRTGIWENVYISRPEMRDDPEGRYRHEVVYDGKHIFVLGGGTSHSVYDLQRIPAYNLEANCWDYFETYPDQRAADADDGNRGYPKPRKCFSCVQHQSSTGDIEAFITGGLQGDFSTYFSDIWKLNLRTKHWYRIETAILPRPLYFHSAAHSDNGCMYVFGGIEYIDKEMRRRNDLYKMWMTVPKLSEMCWDAITYYNDNLDLYDRKTLLEAGIPKRFTERLPPQRRRRLDTSQPDPSMLISLYSNPKRARSSTQ

SEQ ID NO: 10789 - DNA, 11508 bp, DROSOPHILA
ttctacatcgaacacaacttacaggtgaactggaggaccgccgagcagaggtgcattgaaatgggcggccacctcgcagcattccaaaatgccgaggaatacaacgccatagtgggccaattgaacaaggcgaactactggctgggtgtcaacgatctggccaagcagggcgagtttatatccttggcctccggcaaacgagctacctacttcaagtggcgcaaaaatgaacccaaatacaataatcctacccagcactgcgcctacgtttttgggcacgaaaacattatgatcgttctgtcctgtaccactgacgttatgcatttcatttgccaatcagacagtgatgtttagttttaaagtatcaacacatgtatgaatgaatattacaacaaaaccacaaatactataattcactttactgcatttgatgcaaaaattgatgggaacatttaataacgcttttagcaataatttttctttgtgagagggtttaagggcaattttttttgacaacaagtgattgccacagataggaaattatttcgtttcaaattgtcaaaaaagtcgacatggcgccgtaaataaattggctgaaatgagtaataggcttaagagattgctgttatcgaatttattttatttgtttttctggttttggttccccgcacgtcgtaaattaagattgattcctcgttaagattattaaatttatcgtactcgacaagcactctttataagcaacaaatgaataaagaaattttcgactttaatcacaaaaactggcttatatcaattttaaaaactcctattaaacaaggcaataaactgtgtaggttcgtatttcaattaatatttgctaactaaaatatttttggaatacgatatttttgtgccctagttgcacatctctagcatattataagccgatagctccggccgattcccatggcgttccgcttggcatccacctctggccactctaatcaaaacaatacaggaaaacaggcatttttgtgtacaaatattaaaaaaaacattctgcgctacaaaaatggccttggagtccggcagcagcagctcggagtcgggcagctcatccacaagcggatccaccagttcggaaacgggcagcagctcggacacggattccagcagtgcgacgccggaggagaagccatccacgaattcctccgccaaatcccagacgcaaacacaacaacaaactaattccggaaatgcacagagaagaaagcctgttcctgcggcgtcggaggataaacccaagccgagcgtagcgccatctagcaaaaaagtaaacaatcctcccaaaagtaaactctccagcgatgacgacgaatatgaggactcggcgccgccggccaaaaagaactcacgtgcaatgggcagttccactgtaacagcggcagctgccgcctcagcagccaggagaaaaccacccgcgtccgtcaacaagccaagcaatcccgctaacaaaccgagcaatcctacccagcgatcggccaacaacaacacaaatcgatcactggagaacggcgagggcaagcgaccctcgctctcctcctcgtccaatagcacagatgactctatgaagatcgttaaaaacgggcggaaggttcccctcaaaatggccagcacggtgaggcccaaacaaatccgaggaaaattgccgccggcaaagaaaaacggcgggggaccggtgatcagcagtgacggaagttcgggctccgagagtggctccaactcgggcgacgaatcaagttcaggaagcgagtctgagggaagtgattccagcaactcctacagctcgcagccagtaaaaggaggagctaaaggtaggcagggtataaagtatagaatttatgtaaggattttaataatatttaaatttaactcttattattataggtaagagaagcggaccaacaaaaatccaaaactccgacagcgaagaagagcgaaaagacaaggccaatcccatgaggaaactgacgcgatcactcagcatgcgaaggacaaaacagcaacccaaacaggaaaccgattctgaatccgatggagacctagaagatgacaaaattatgatctccaaaagtcccgccaaaaagccagcgccctcgaatttgaacgccagcaaaagcaaagtgaaaagggaaccaatcggaatcagcagtggcgtgctgagctccattaaatcccgacccgtgtcaccgattacccagactgagaagaagtgtcccatcgagggctgcgattcatccggacatctgagtggcaatttggataagcactttttgccggaggcctgtcctatctatcacaacatgtccgcctcggagtgcaaagagcgtgccaatgagagaaaactgaggaatgaacagcgactaaagatgccggttaacattgtgacggcgccgggtaaccaaaacaccaatctcaagacgctctcgcctgagcagcgcgagtttctggccaagattcgcgagtcaagggctaactttaagccggcgaataacaattttttagactcgaaggtgaggatagtgggttagcttgaaagtccatatgagactattgctaactatttgattacgcttcaggtaaagctggaaaaagacgtaacggacgaggaccgggaaccaaatctggcaggcctggtgcctgactatgatttgcaattgttccgggaagcgcaagctcaagcatccgaaaggatcgaagacgaactcaaggacctgcccgtgggaaagggaataaagtaagtagtagtaatataacaaacttatggagatcaatttacaacccttacgtctgacagatatatcagcatgggcaagtacaagatgaaggtctggtatcaatccccttatccggacgatgctgcccgcctgcccaaaatgtatatctgcgaattctgcctgcgctaccaaaaatcagagacgggcatcaagcggcatgccgagaaatgcgtctggcggcatccgccgggcgatgagatataccgcaagggcaaactacaggtgtggcaggtggacgggaaacgttataagcaatactgtcagcatctgtgcctgctagcaaaattctttctggatcacaaaaccctctactacgatgtggagcccttccttttctacattatgacgctggccgatgtggatggatgtcatattgttggttattttagcaaggtaagtaaagtatttattcgtaatgtatattttctttggtaattgttaaaaactgaatatgctaatatgctaatcaaacatcaagcagttgaaataacaaatccactttgattttccagctcattgaattataaattttaagttaaatataattttaagttgagttacatattgaagcagttaaagtatcaaaatgaatatttaataaggagcttaatagagggcttaactacaaaaattaatgcttccctttattcctaagcaattggaaaccaaagcggaaaatctgatcctgctctaatgatttcgattcctaattgcttattatttgaatagtcgcgctgcaattgtgcgccagaattttccagaacctttatggttattccccagcataaaattgaataataacattttacagttttatgattcctttatgtctggagacggaatagagatgcgaggaatgtagaagccggtatcccagactcccagaatggcagccacagcccatgtacggtgcatacatatgtaccgtcaagcagactatatggttgtatccagatgcagacagtgagctctgccttgaccatgcccaccaaaaacagcagatgatttttccatttaatttttttgtcaacgttttcgggtaaataagcaacagacagagagaaacaagcggcgcgaacgagagagtcatttcccctggctttaaaaagcagccacggtttcttgacctcccaccagaatgtacggaaaatacgggtccggcgatacattcacgggctttggcgggatcccaccttcggtttgcagttttactgcagaatgcagaaagtttttgggcgctggcagagactgggtttgtgttacaaattgcgcatgtcgttggctgatgctgcagctgctcctcttgctctcctcccgattcactgcccctgctcccgatgatgcccctctttgcagctccttttgtgaaccctcgctgtgctggcgcagcatcccgaggcagtcagaatttggcagtttctacacatactacaagtttacatatatttactacgctcgtgctaggacattcataatttctttactaccaggacacgaaatgtacgcccatgaaaatgtttaaagaatgtatttcaacggagatattgaaacatttttaagcatatctaaggaagttaagaattatatcgcttgaatcatttaaaatgtattattttatatttcgaaatcgcttccaagagtaacttagtataactatggtagtaaattaggatcaaagctatattcctatatcatgacattgcatctgcaaactaggctgcgtataaacttgagtgaaaacccaacccccttttcgtttggcagtgataattttcggcaatcctttgtcccgcagttaacctccaactctctgactccaaaacggggtccagacagcagccagacaccgaggattggagtagggagacggattggcaggctgggcacgctgctccgatgctcggatgctggggacacgattgaggtcgtgcacctctgggccgggtccgggaatttctgattctgatactgcgtctgcgcctgctccacaaaactgcgattgcccgggctgggccaggaaaatccggggtgaaggatctcggggtgttggcggggcgggggatcagattgggaaacagggactcctctgctatgtggttgcgttcccagacatcggggcagacaaaggaaaaacgagcaaaaaaaaaaaaagcagacctcagaaaacaaaaagcaggcgtactacaaaggaaaaatcaaaatgaaaaacccgcagtgtacataaatgaatttccgaattgttgccatattccagattcagcacacaggacttaaaatgtggccacttaatggagttttagctgctctaatgatattctttaatttaagaaagtcttggataatttacccgtatatcatttattatttgaaaactatttttctaatgaggactaaactttctattaaaattattgttacatgtggtattatctcaatgattttccactgtgttgggattgtttttttggcaatgaccgtgagacaagggggctgggcatggctatatccatgtacgagtcattctgtcttgcgtatatatatcccgatccccagactcgtggtccttgtgctcctgcggcagctatatatgtatgtatgtgcgtatgtttatgtatttacgcacagttctctcgccaatttggccatctctttcacgccgctgcagccatctctgtctgactgtctctggtgctggctgtctatcgattcatttaattttgctggtcattgaactgccgaaaaaagccaaaagcgacagataaatgttgccatcatctctgccacttgcaagggaccaccccccaccccatttcccctcatcttttgtctggaaaatgtctgtctgatcccccaactctgaagtttttcgccatacctctcttcgtggatttttcccaactccaagcttcagtttccccactcctttcacgtctgccattgttcttgaacctttgtaattgatttaattttaataatatgttcgctaacctttgcttacttttaagtggattagtgaaaaccttaaattaccgcctgctcatgcctgattcgtttttatttcttattttctaatcatttcacacacttttctatatttgcagcatattcctttcctgcaggagaagaactcgttttacaatgtttcctgtattttaacattgccgccatatcagcgaaagggttacggaagattactcatcgatttcagtaagttaacacttgagattctacacaaaacttaagaattgttaataaatggggattttcttcctcagtttacaaccattctgcaatcaaatgcatcgaactcgtcttactatgattccaacgacctttatcttgctatattgaataattcatatttgatttaatatgaaaccaattaacaaagtataagtttctcccatgaatgctcaaaatgcaatactttttatctgaaatatttaatattgttcagggtgctagttatagtaatatgaaagaacaaggaacgaatataattgtttctttcttgtcagccgattaaatgtataattgacctcaaactgcgaattcttctgtggtctcttctgcgcaattctttaactggaagaacacagtgaccctgaaaatcatatgatatcaattacgttggattgagtggttgggattccactgaaattgggcttaaatgaggcttgttagtgaaaaagtatattggccactaaaatttgctgtccaaattgaatctttctttgttccccttctccgacctctttcgctgagtcataagtgtgtgtgtgtggtgtgcaggtgtgtgtgaaatataatcatcattgcatgagaaaagccaaacatgaaggagactatggctcagctttccaattgcagttttcccccaccattgcatccacttcttcttcttctccaggtgcagaacatgcaatttctgcatcaattaaacgtagacacacacaggtgcactgcatatcgcataagtaattttagcggctgcaacgaaaattgtttaaaattaatccaagcccacagactagacaataaaaacacacacaacccaaaaaaaggtagctaagtaaaaaattatgaaaaaagaattacccagctataaaagagcggaaggtggggggaaaagacaaagagagtcttgagtcatacatttacattcacaatcgacgtcgacagcgacggcggcagaggcggcggcatttgtgcctatgtaaagtcaatacatgcaatgccaggggcgtggaagcttggtgtattggccagggggattgggcggtaatgaacgaacgaaagagcgagcgaaacgacattgaccttacacagacacacgcgaaggcccacagacacaaagccaagtgccggccggcaaaaagagtaatggtcaaccagagagagagagggatcgtgagagggagagggagagggagaggaagttttgcgaagagagcgagtgaggtgcacggaaaataattgattgatctaatctatcccaggaaaatctggtataattctactttttaataagagctttgttttagagttcgaatcgattgttttattgcttaggtctttggtaagaatatgatatttcatgaggttatgtggtaatctcggcttattatcaagtggtgaaggtttcacattaaaatctctattgatccgttaactatcttaaattactatcttaatattttttactttcataattaaatatattttttataaattaccgtttcccaattgaaaattattttgttgtatgtaggagccgcgcggggcggcgtgcaaatcattttcgtcatcattaactggaattggttattttgcacatggcaggtggaaggaatacttgcagacagacaggggttaacttaacccaccggtcccccgaaaatcgaacagatctagacatatgtgttagagcggtacggccatacaccatttatgtatgtccaggtgtacaaaatgcaccacgcaaaatgcaaatgagggggccaagtttacaggttccgaacaagggttgccacctactgcattaattaacgaaactttctaaaaacccacaaacaaaatttacccaagttgccaaaaatatacgaaacgtgccgcttaaagtttgcttttatcttttgcaagtcccgcacaagcaacatacccacaaaaagcacttacagtgcgaattctataaagtaaacttcgacaataaaattttataaaggtaatgaaaaatatcgttcttgaagaattaatcttaaatatttatcggtggcagcttaaaacagtgcttagatctaaaaaaaaaaccttatagcgtataagtataaaaataacatatttggatatgaatatgttctagaaataattcaatcctgatagatattgcttgtctgtttatagaagcttgactgtggataaaatttagcagacacaacaacaccagaagagcaacaaaaacaacaactgttggcggcagacaacaaaggtcaggacaggtcacaatgaaagggcgtcgtcctctttgcgagcacaaagagcgagtaacggttactctctctttgtttcattctctcgctgcttattactcactgcttttcaaactctggtagctgcataaaaaacaagaaaaacgcatagaaataataataattagagccttgctaatttgagttaaagttgaagtcgccgtcccctattgcacatttgcgtaaattttcattctttaactcattactgttcgttcgcagcgcctgtggctatgcaacaacaatgttgctgcgtcagcggcgagtgtgcaagtgcgagcaagagcgagagctcgactctgcgaatcagaatggatcgataaagtcgtctcgacgtactcacccatactccccctttcgctcgcaccaacaccgcttccccgtctcgctgcgccaggatttataacgctgcggtgtattgggaaggggcaagaagcgagacgaagtgcggcacaaagaaatcaaagtgccacccgaaaacgccctcttctggccaaaagtcgcatcagaagctggccgagggggcttcctctcgaactgcataaaatactgcgcacagtgggccgagatcaaaagattacttactaaacgatcatgtaatacttatccaatcttttttgcgctatactaagtagtatattaaaattacatgcattgcgggtctttaaacaggcccttccgtttaaaaattgtagttataaattgagtttaaactggttttgatacctaggttccaatgttcttggtcatgcaaaaagcgaagcgctgcgtttatttttgcctgtgtgtgttcaaccctgcgctagtccagtcagtcagcaggattcttcctcctgccccatgctttttccatccttcccgtctgccttctcagctgtgtctgccattgagtgagtcctgctctcccatttttctctcccgttgcttcacagctggcgccatgggtgcagcaaggggaatacttccaaaaatattaagctctaggaaataaaaatcgcattcactgcattaagcataaaggatgcaaaaaatttctttttttattttccatcttccgcctgcttttgggcgtatcgacaactatcgtatcttactacgcccatggtaatgctctcctatctcgctctgctcctatttgcctcctcttcttctgctaactgtttttttcccgagcctgcctcagtggattttgtgttgtgtcctcgctctctcgtcctcgtcaatttacttagcttgcactcattgttgctgttggctgctcctccccgccgccgctccactcaccgccatgtggttgttgttatctagagacgggaattgttgctgccagacggctctagaatccagagtataatttcttggggtgggtccttcgggggtgacactgtcgttgggttgaatgtacgccagaacgttgcttaaatgtggatcccctgcccgcggatccctttgaatactttgcggaatcctgtctagacacaacacgaacacacttaagcacccgcacacaaacactggcgatgcagagggcgggcccaaagttggtcaccataaataatacgccggaactcgaggaactccgtttcgtctgtatctgtagcatacttcttgggtctatttttaacccgcatccatatcctttccgaattatttgcaggctatctgctgacccgcgtggagggaaaaatcggatcgccggagaaacctctatccgatctgggcctgatctcgtaccgctcgtactggaaggatgtgctcctggactacctgtgcaatcgatcgggaaacacgatcgccatcaaggatgtatcgcaggtgagtttgattgttggacattttattaaattaaaaatacattttaatatactttatatgtatcgctcgtttaggaaactgcgatttactcatacgacattgtgagcacccttcaagctctcggaatgatgaagtactggaagggcaagcacatagtgctcaaaaagcaagtaagtcccttaggtgaaaacacaaactaatttccaaactgatctatgcttatttccaggacgtactggatgagtacgaggagagggtgaagcgaaggggaaccttccccaagatcgacgactcctgcttaagatggcagcccttcatcaatatccagccgagctcatctccataaccacgtggttggaagcatgccagggcatgctttgcagacgccgacgacgatgacgaattcttggctccgaattcttgatttcaacgattttatttttgggtagacatctgaagaaccacatctccagtccttcctttgcatttatcctagcggatatatgcattaatgtagaatatgttttgtaaccactttcataaacatgatacaattggagaatggtttttagggagcttgtaactcaattttttaatatttgttggtagatcttaaggccagcctattgtaaacatatgtacgtgtgtgtgtctgtacttgttattagcgaagaattgtagtaattagagtcttaagatacatagtgaaattctcaaaacgaaaaaaagcttaaaaagataagagaaatatactcggtttacgatcaaagacttgacttgccttgagatttagatgaatcatggagaaaccgaaggcccgtggtagaagaggaagaggaaaggaagagaggtgagtcaaggagtggactgtgtgtgcgagtgtgtggcaacgcaaaaagtgcacacacaccaagaagcccagtcagtcggcggcagggaggcgagcgcattgacattgtcgcttcgctgggagagacaggtgagaggaggggcagagaggtgtgcagaccagacgggttggttttgggcgcgggtttagcggggtgtgcccaaaaagcatacacatgcaccgggaacagcgctgcaaagcgtggagcagagagcagcagccagagagtgagaaggagagcacagtgggcagttgaaaacatagctgccgaaaacctaattaattacacacaacttttaaaaaacattttctattacaaaaaaaaaaaaacattacaaatggttcttgtaatcaggactccaaagtaataaaatacgtcttgatattcaatcatcttgaaatatttattttgctacaatgctaatcgaactgtatagtaattcctagaaacgaaaga

SEQ ID NO: 10790 - DNA, 2467 bp, DROSOPHILA
gaaaacaggcatttttgtgtacaaatattaaaaaaaacattctgcgctacaaaaatggccttggagtccggcagcagcagctcggagtcgggcagctcatccacaagcggatccaccagttcggaaacgggcagcagctcggacacggattccagcagtgcgacgccggaggagaagccatccacgaattcctccgccaaatcccagacgcaaacacaacaacaaactaattccggaaatgcacagagaagaaagcctgttcctgcggcgtcggaggataaacccaagccgagcgtagcgccatctagcaaaaaagtaaacaatcctcccaaaagtaaactctccagcgatgacgacgaatatgaggactcggcgccgccggccaaaaagaactcacgtgcaatgggcagttccactgtaacagcggcagctgccgcctcagcagccaggagaaaaccacccgcgtccgtcaacaagccaagcaatcccgctaacaaaccgagcaatcctacccagcgatcggccaacaacaacacaaatcgatcactggagaacggcgagggcaagcgaccctcgctctcctcctcgtccaatagcacagatgactctatgaagatcgttaaaaacgggcggaaggttcccctcaaaatggccagcacggtgaggcccaaacaaatccgaggaaaattgccgccggcaaagaaaaacggcgggggaccggtgatcagcagtgacggaagttcgggctccgagagtggctccaactcgggcgacgaatcaagttcaggaagcgagtctgagggaagtgattccagcaactcctacagctcgcagccagtaaaaggaggagctaaaggtaagagaagcggaccaacaaaaatccaaaactccgacagcgaagaagagcgaaaagacaaggccaatcccatgaggaaactgacgcgatcactcagcatgcgaaggacaaaacagcaacccaaacaggaaaccgattctgaatccgatggagacctagaagatgacaaaattatgatctccaaaagtcccgccaaaaagccagcgccctcgaatttgaacgccagcaaaagcaaagtgaaaagggaaccaatcggaatcagcagtggcgtgctgagctccattaaatcccgacccgtgtcaccgattacccagactgagaagaagtgtcccatcgagggctgcgattcatccggacatctgagtggcaatttggataagcactttttgccggaggcctgtcctatctatcacaacatgtccgcctcggagtgcaaagagcgtgccaatgagagaaaactgaggaatgaacagcgactaaagatgccggttaacattgtgacggcgccgggtaaccaaaacaccaatctcaagacgctctcgcctgagcagcgcgagtttctggccaagattcgcgagtcaagggctaactttaagccggcgaataacaattttttagactcgaaggtaaagctggaaaaagacgtaacggacgaggaccgggaaccaaatctggcaggcctggtgcctgactatgatttgcaattgttccgggaagcgcaagctcaagcatccgaaaggatcgaagacgaactcaaggacctgcccgtgggaaagggaataaaatatatcagcatgggcaagtacaagatgaaggtctggtatcaatccccttatccggacgatgctgcccgcctgcccaaaatgtatatctgcgaattctgcctgcgctaccaaaaatcagagacgggcatcaagcggcatgccgagaaatgcgtctggcggcatccgccgggcgatgagatataccgcaagggcaaactacaggtgtggcaggtggacgggaaacgttataagcaatactgtcagcatctgtgcctgctagcaaaattctttctggatcacaaaaccctctactacgatgtggagcccttccttttctacattatgacgctggccgatgtggatggatgtcatattgttggttattttagcaagcatattcctttcctgcaggagaagaactcgttttacaatgtttcctgtattttaacattgccgccatatcagcgaaagggttacggaagattactcatcgatttcaggaaaaatcggatcgccggagaaacctctatccgatctgggcctgatctcgtaccgctcgtactggaaggatgtgctcctggactacctgtgcaatcgatcgggaaacacgatcgccatcaaggatgtatcgcaggaaactgcgatttactcatacgacattgtgagcacccttcaagctctcggaatgatgaagtactggaagggcaagcacatagtgctcaaaaagcaagacgtactggatgagtacgaggagagggtgaagcgaaggggaaccttccccaagatcgacgactcctgcttaagatggcagcccttcatcaatatccagccgagctcatctccataa

SEQ ID NO: 10791 - protein, 769 aa, DROSOPHILA
MALESGSSSSESGSSSTSGSTSSETGSSSDTDSSSATPEEKPSTNSSAKSQTQTQQQTNSGNAQRRKPVPAASEDKPKPSVAPSSKKVNNPPKSKLSSDDDEYEDSAPPAKKNSRAMGSSTVTAAAAASAARRKPPASVNKPSNPANKPSNPTQRSANNNTNRSLENGEGKRPSLSSSSNSTDDSMKIVKNGRKVPLKMASTVRPKQIRGKLPPAKKNGGGPVISSDGSSGSESGSNSGDESSSGSESEGSDSSNSYSSQPVKGGAKGKRSGPTKIQNSDSEEERKDKANPMRKLTRSLSMRRTKQQPKQETDSESDGDLEDDKIMISKSPAKKPAPSNLNASKSKVKREPIGISSGVLSSIKSRPVSPITQTEKKCPIEGCDSSGHLSGNLDKHFLPEACPIYHNMSASECKERANERKLRNEQRLKMPVNIVTAPGNQNTNLKTLSPEQREFLAKIRESRANFKPANNNFLDSKVKLEKDVTDEDREPNLAGLVPDYDLQLFREAQAQASERIEDELKDLPVGKGIKYISMGKYKMKVWYQSPYPDDAARLPKMYICEFCLRYQKSETGIKRHAEKCVWRHPPGDEIYRKGKLQVWQVDGKRYKQYCQHLCLLAKFFLDHKTLYYDVEPFLFYIMTLADVDGCHIVGYFSKHIPFLQEKNSFYNVSCILTLPPYQRKGYGRLLIDFRKNRIAGETSIRSGPDLVPLVLEGCAPGLPVQSIGKHDRHQGCIAGNCDLLIRHCEHPSSSRNDEVLEGQAHSAQKARRTG

SEQ ID NO: 10792 - DNA, 17512 bp, DROSOPHILA
gtgccagcaaggaatacttctgtacgatgtacgatattacaaactacgacacatttgaggaattcttcgccaaaaaggcagccagaatgggtgagtactatgaatgcttactgctgtacatgataataatccatttctttaccttaattataggcaaatttctaaagaagggagtgccagatgttgtggctgcagcaagaagcgttctcaacgattggaacacgggcaaaattaaatactgcacacagcctccggaagttcaggaagggcaaagtgtgcatataagtgcctcgatagtacactcagaggctcgcgaatttgatgtggagaactttgagtccatggagacggaaatcttagagcattgcgccgtgaaaacggatgacattatggagataacgtctacggggcctttagagattcgacagccgcgtgaggaagccgaacctgcagataaaataactgccagtttggtaatagacgagaaggaaaagcccgcaaagggtcgcaaacgaaaactggatgaggaaaaggagaaggttgatcccagtctactcctagaaggtaagcaaatcaaaaccattaccatggaacataaaaatgtattaacgctgtgttatttataaattctagaaaaccaatcactgaataaaggcataaagcagatgcaaaagctaaaaaagaaacagaatgttcgcaacgagaagaaaatatccaaaattacagacgttctggatagctttagcttaggtccatcctcgtccaaggcagaaaaatacgattttgatgaggactatgtgattgaataaattctgccttagttttaataattaaatctgtagatagtacactataatatagaaaggtgtaatgtctctgaaaaactaatataactttttattactttggaaggatggctgcatccatttcagaatcgcaattgtgttcccttctactgggtatttcactgtattccctcaaagaagatgaacatattgtaaatgtttaacgtggatcgcatttattcttagaacgaaatacatacaaggctgggattctaggatggcctacatgcagtttggtttggtaaggggttaaagatcatctagcgcacggatttcaaatagagcaccagttcctcgaattcgcatttgctactgttggaaatgcaaacgaagttggtgcttcgtcaatggacataaagtgattacagatttaaataaaattattctatggtattcagctcatgtaagtatcgtgttgtgatatctttttatacacttgacaaatgacagattttttaatttaaacaatgaatgtacgtaataatgacaacgaaaacagtcaaaatatcaacataaaacaaataatgttcgaacatgacgtgtgctttctaaagccgattggatcctaatgcgctagaatctaaaaccgtattgaatttgttaatggtgtttttttgttagcctaggatctatgcagattctactgaacagatttgtatttcagtgatgtttggtttcatttgggtggggtataaattatgggcttgggtttcttctaaaaacgtcgcatagaaaatgtagtggctttttgaatgtattgcatcgtaactagacttttcgccattctcaaaactattaaccctgatgtgccttctgttaagtatgtatgttagattaaatatttatacatatcatatagctactggcaatggagctctagccccttgcatcggtacgtcctacatgtgtatatatatagagtgaatcacaggatttcaatttttgctaagtatttttaacaatcaattactatgtatttcggctcgactcgctacgacttctcgtcaccgctttctctctctctctctctctctttgctctctctctctcttaatgcgactcagatgcgttaaaattaatttcgatgtgtctactagcagtaattgaaacttgtttcgtaattatgtatattaacatttaaaatgatttcttttgcagtcctttgttgttccaaattattggttgtttagtgtttaactggcggctcgatctcctgcccgccagacaacgccatctcgtcctcgccggacgataatccgtcagtgcgcacacctgcctgcacagcctggtcagcagcttctgcgccttctgcagcagttggcgcgatcgccagctgctcacctgatcgcaggcgcatcccatgcccggctcaaccaggtgctgggatgccgaatgaggtcctgccgaacgggccagcatcaggtactgtcaccgcagatgactaaagtgaacctccagccagcaggggcagcccatgatatcctgtcttttgtagtcgcgtccccagcccttgccaaagctgatcttaatgctgaagtagtcgacgggtcccatgggatgatgtccgtgatctctcatgctcagaagttcagccctgcgaaaaggaataaatatacatcataagaggctttgacaactggttaactttattgacggatcttacctattggtttcaaaggccttcagacaatagcccggcatcactttgcacactcggtccagattttcggacagggtgggtgaatcgacaaaaatggttgtattcccacgattgtagatccaaacatcgccgttctccagactcaatgtgacccctgtgaggcggaccggactccgattaatatatcttttcacgttagtaaatccttttctcttacccaatccgaccgtatgacgcgcttttggcaccaccgagtggatctgattgcctgctggtgtgaggtcacgtaggcacatgctgtccacctcactggccacaatcccatccgtgtagatattgactgcattcgttttggcgtgaaagaactccccgacgcggtgggccatctcccagtaggcgatttggcaccacacctgactgttgatgttatgatctgaaatttaaggaaaacacaatgctgtagatgcaggtatctatttggataataataattccaaaaaacagtttaagaaatcgtaattatgtatgtacatgctactgcaaagattagatatgaatgaatttacaatgtctagttaagttgcttatttatttgtgagattgtcaactcattaaattcataaagatgcctgcgataaagttattcccattaataactattattcaaatcgcaatcttgtaacccgcatacaaattgctagctaaagcggtaataactctttcgccggccaataaaatgtgatttaaaattgccataacattcaagcgatatcgggggagtaagcgctatatatcgccatatcgtttgaaaatacagaatacagcgagtctcgcattcaaatattcacattcacattacgttcacactcacttgtgtgctcagacatttaaatggtaataattttggcgccagggcattacgtaaacagaccggcgtcgcgtattctgtatgtgtgtggtattcatttgcgcatatgtatgtatatcggcccgctcggctggctgtgtgtatatatgaacatatattagtgcacaaacccacagagtctgtttatgggttcatttgtatattccgatttcgaacgcgtgtcggtcgggccaataacaaagtgagaaacaagtgccgctctttatttgaaatccttgctgacgagagttttcgaaaacgcgtgggctttgagtacaaattgtttgaaatttatgtccacattaaaccaaaccattcataaaattaaaaatttatatttaattgaatgaatatacctacgaatgcctcggaattagtaaacaaaatgcgctgagtttaacgtttgcagtcgtaaagcgagacaatgctaacattgcgtatacgccaccgtatctgtagttatgtatttatatatttgtaaatacctacttcagatgacaccattaccattgtcagcattaacacaccctcgtcttgggaatttatcaatcaacaatggcataaagagcattgtcagacaacagagtgcaaatatcgcgcatacgccatggtggccaaattgccaatggcaacaatgcaagcgggtcgatattcgattacagcggcggtgcagttggccagaacggccagagccgattcgagaaatgtgctgtgcgcattgggcggcacacataatctacacaatcgctcagcgattcagcggaaaatcgaggaaaatcgcagggaaaatgaaaaggccgaaaggcgctaaaggccaagcccaggcgcgcggctagtggcgccaagtaaaaatatatcgcaataaatccgtagacggcttttaaaattttgcatggcaaagaatgtgtcgaatggggtggcaagtggcgggcaacgagcgggccagcgggggcgttggacgctgcaagtggcgcctgtccgatgtttacctaattaggtcgacgccggcgattccgtcgcgtctcgccatggccacgaaaaattgtttaccccaccaggcagccgtcgccacctcgctcgctcaactgggagagtagcagctcgccaagattgtgggccagttgagttgatccaggcgaaaggtgaatcggaaaattggggaatcagcttggcaccctcattgtgcaaactcaaatgaaatcgaatatatctacgtagaaatttcaacaggttctgcctcatatattacacttaacgtgccatattttccgaattattggccttgaataaataaattattttggcatttcaattgaagatgggaaatagaaatatttgaataattttaatggatcgatgattcttaagaattgttgtcttaatatggttagattgagatatttcatttgaattgtatttaagtatttcgtgaaacattgcgatttacattggtaattaaagattgtgacagtgagaatttgctatgtatacacttagagctctaagctggaggagggttctgcttgaaagatctacctactgcagtttttcctgtactacacatttgtaaattcgtagcgccgcttcatggctgctgattccccttgctaatatttatgtaagtaggtacataaatgtacatacatttgtgttagatgcccgaatccacgggctgctacatcatctttaaatttagaatattttatcttcaatctgtgtacatgtgtgtgggttgaggcagtggcctgtaagtttgtcggtggcacacatgtgttgccttcggggaaacacggatgcccgacttgtgtgtgctccatttcggccgagttcgaacggcgatgaagttgcagtaatgcaattacgaaattgaatcgattgctcaagaaagctgaaattatgtgggcgatttaaacattccatagtacttatcgacgttctgcaactaatactatattgatgatgtatctaagtacctttgctttcctaattaaccatcataatatttaaaacatcatcccatcattgattacaaaattcttgagaaggccgttcgagactatcattctcagttcaaagactatgccaacaatgtccatttgacaaaattgtgatgggaatcaatcaaatcgaaatttcaatctatttttaactggcctgtcacccaatcgtcgtaaagccgcaacttaacggtccatttaaatgtaatagttttccgtcgtttcgtcgccagtacaatgccataaaaaagctaaatggacgatggtatacacacacacacgaatgagtgtatgcatgtgtgagttctggccagtttcagtttcacgggccgtctcagtcgccgggtaatggtaatgccgtgaatgatatcatagcccccataggaccccttgtaccccctccgcctctgcaccccctttcaagcactcttgtaagttagcattaaaattgtggcgccatcgagagcgccaactcacctcgctctccgcgctcactccctctctctcgctcagcctgccgccgcccgtgtttgtttttcgctcattatttattttcatttcgtttttgctgttttcgcttaaaagttaatatcaatatagaaagtgacgacctgacgcggcaagctggcgccacgatacaacaacaactggcccgccagagagagcgccgctcacacacaccactaccgggcaccagccccaatacacctaaacggcaaaataatcgcagcacttcgctctcttccactttcttacaccgaacaaaaatatcgttacatggaaaacaatatcatttagaaatatattttcattttatttggtttgtttgtaagttcatcaactatttttcaacatcgtaaatagattgtgttattaaggcagtgttgtgatgtttgattcaaaatgaaatatgtatgcctcgaatacctcgaatttattccacaaatgaaaatggattttttttatgtgctctctcccaatcgcctgataagcgggggagaggcaaaagagagtgggattttggggcacaaaactcaccttttccatcagtggtaaccgactcgtagagagccggcttgtagatgttcgaaatgctggtgctttcggcactccacgtgctgagcgctgccgactttgcatcgttctgcgagtcttcttcgaaatctgcaagatttggttttgttgattaatacacccggatcgaaaatgtatatggaaaagccggcttacctgcatctttcagtctcagcatttttgagcgttggtacggcggtgttggggattctaaaatggtagacaagagaggggatagttttagatatcttggagatacgtacatacatacggtacacttgtatgaatggtattattagttttgtaatagatgcatgataaacaagtaaaatctccatagtcttagaaatattagtacgctataagatgttgaagactgatacattttatataacaaatttgtataacagcacattaagctatttatttattgctcttttaagatcacactaacataacctgctagaaagagttaaaggtaaagaactctacaatgccattatcaataactcgattcaatcgaaatgcatgaatttgcggtagtttaaaaattcgaaatgttatcaagtaaattgaccatgttaatgaaatagtttggctgactaaaccatatgaaaattcttatctcaaccttatcggcctaatgcacttttaccaagtttcatttcggacagcaacgtgtatgattacaaaccctttcgaattaacgaaaacttcgagttataaatgcgcgtcttctagtcggggcgcatataggatgagatcatggttcgcaaaactaatacatactagtgtttgaatatttgagcagcaaataaagcgaaacaaaaacagagagagagagcaacaaagccaaacaaaaataaaggccagaaaaactaaaaaccacaaagaaagaataggcagtcgaaacaaacccaggcgtaagcgtaagcaagccaaacatcagcgcggcgatataaaaataaataatctttgcatatcaggcagccccactgggggacattttatttttattggcgcaaaaatcgtttgatgtgcggcgatctccgatcgctggtagataccagctcccatctccgattcctatggcgctgtatttaatctcgcttacattctacatcctactccgttccgtttcgttcccattctttcaattcactcccaaaaaagcaaacggaacaggtcgtttttggtgactgagatgggcgcagacaaaggcctcaatgaattacctgccagatttcgaacctctcattcaattaaataaattaacttatttatgaagcatcgcattaacattttatggcctgcattaatgtattacttaaaaaataataaaccgtgcgccatgaatataacatattttaataatatcagatcagaactttaatacaaatggaacaagttaaacaacctatcctatttttactctgaaaaattattatgcaacggatccacttcgggttaataataagatttactataaacaactttgtaagcttttcattttatgatatcagcaaaatacaagcccttagatcaaatcgttatttaaaaggggcacggcaatttgtaaattaaactagacataaagcaaatcggctttgcatccaaatatcgttgattagcttccaaccaatcgaatgcatatctatgcgatacacttgagagaatttaatattcagtcaacaaaaatcgccataaaataactgcacattaaagtccaaaagtggcaatcaaggtgcaacagatgagcccagatttcgatgggagtagaagatctgcagtaagtaatgctcttggtattctgacggcgcataaatcgcttgatgcgcctcgtcaacggcgcctggcgactcgaatcgcctcaaatgttcccagatcgtggcgattcgccaacgtcggtccccaagccccaatgtaccagttaaacctgattacgagcggccgcgtcatcgacgccaacgtcgaaaatctaacaattcttaacaaaaaaaaccataaaaacaaaaaaacgagcggcacagcgaaaccgaaactgaaaccaaagggagaaccgaccattccagaacgccgtcaacaagctgatggatcgtatgatcgtatgaccagtcggcggaataggcaactgaatatttacggctctgggtgttgggttctgggcaaaagagtaccagtccattgagtcagattccagtaattgaaatttaaaccaggcgattccataaagtggacaccgctttgtttgtcgaccatgctccagatttccccattcctatttagaatggattttaaaacgtatggggtattttagtatcaatcagccaaacagttctgataagaatttttcagttttttatgcatttaaaccatatatgcatgtatgttgttcgatgataagtactaggtaatatcttgtagtacacaggggtaactgcgtttcaccctaaactcacctccagcacacctgacataatgattaaaataagcgtaaaaccgaactccatgctattccaggcatacaacgtaattagtcaagttccctccatcgaaatcattaaatagtcccgaaacgatttcgaccagcgcaaatatgccagcataaatatgtatctgtagccgatctccagaggaacacacaaaaaccctcaacggcgcagtgcaactttatggccaagaaccgcacctctctgaatgggatcggatggatggatggggcagaggcacgcaaaatgatcctttttataggtgcctcgctgcgaggcagggacgttggggtcggtggagtcgggcggaatcggtcggagtcggagagccaatggaactgcgatgtccaaagaccaaagcaccggtcgcgggaccactcgtcgttacaattcctggaattgtgttccccgaccgatgcggatggaataacattatcgacttgtttaatgtgttcggcgccatcattaaaaaaccagtcactgtcgggacgtcgtccatccgccggccagacgacgatgacacagccagcagaaggcagccagaaatccagagagccagaaagcggtctgttgcctgttgccgattgccagttccctgttgcccgctgcccgttgccttcatccagttgccagtgcacaggcccgttgcacaggcacgctggttaagtggcacaggtaagtgcggccaggtaagggaggctgtatctgtatctgtatatgtatctggcgaccggcacgaacagagtcttcatgtttcccaaaagattgtgttttgtgcacaggaatgtcggtatagacatgcctttttgccatcacatctacagtgattatcggttaggggaagactctgaagctgctggcgaaaaagtggtgatcttaatcttagtcgctattaagtttaacatcaacaagtaaacgtatgcaatttcctaattaatttgttcgcaatcttagaatctcgcttggatttcttttgctgttgtcttcccctaattaaaggtttattttacatttataaaatggctcataaaaaagtatttatgtattcttatactaattgggactatttttttatgattcaattaacatcaaataaaatgtacacatagttttactacattgataagaatggccgttcatcgatcttaattttgtgcttctttctattagtgctttatataatattccactgatgagttcgatgggtgaaattattgtagcttcagcagaaattcttcacattgcaaaagattgggattttgtttggggttcgaggttaaaaaagctccacatataggcaccatcgccaattgatgaaaacgcacacagatgatgtattacaggcatgcagtttagtgctgatataatagtgcgattagattagcactagaacggcgatccatgtggccatacagttgtaagctcggccgagtgatacgcacgttctagataacgttcaatgtggccagtaaatctgttgcccgggcaactgggttataaataaatggcactcatcgatagctttaaaccgtgatgaaaggctagctctgcgatgtaagtgcatggcgcatctttcaatcagcatgagaaaagatgtatgtataatgcctacggatgcaattggtatgtctacgtatttttgatacgccaacgaagtgtgtgcatgcgcgtgctaaaaataaaaacaaacaaatcggaaagcgcacatgtatgtaatgcacatatgtacgatgtacatgcacatgctccgatatttgcccgaatgtacatagtgcgaatgggatctctaaacggtgcgccaactagctggtggcgacggatgcgccgcggcctcagctacagtgaagcgtctcaaacaaatcaaatcaagtattgttggaaatttcatcgaagaaatatttaaaaaatgaaatgtctcaatattaagaaagtagttagctcttttacctacaaaaatttgtcaggatttttcggtatgggcaaacgcccataagtaggcaacgtttttatacaaaatccaaaaggaagttattttcataacgaaatttatgaaaattaagtttttaaaaaagttttctattgaaaatagatgcttttctcgagttaaaaaattatttagaaaaaaattttttattgattaaatggtggtctcagaatttttttattttcctaaactcctttagcttatttgcctcgatcgtttgatttagggcagctggactgtatttcgaatgattggacgagtacttgaacgagtacgggtaatgggtaatgggtatgggcaatgggtaacggactccgccgactttgctttagcttttgcgtttgcgttggcgacgacgcctgattatttcctggcgccagtttctaaatttacgcaaattattttgaaaagaatttagtcgccgtcatgttgggccgaccgtttgcgtggcgctttcacgcacattctccgccgctctctccgctccaccacgtgtctgcgtgtgtgtgtgttttggtgctcgagtgtggtgtgtgggccgtgataaagcggaattaatgagccggagagcggtggatccggtgggtgtgtgagtgcgctgtggtgtctatgtttgcgtctgggcaaaagtcaaggcggcggcgcacagtgagccaacacagaaagaaataataatgcagtgctactagcctacatcttggaattgttacgtttaaaacatgttgcatgctgcatcctgcttctcaagaaaaattagcagcgcagttaacagcattcaaataactcaatcgtgtttaaaattggtcttttgagactgaaaagatagcaaatgcattggacagcgatggtaattgtggttcagttacgttattgtacgtgcaaaaatgtagaaattgcactcatcacatgacaagctgatatgtaaaagcatatgtaagtatatttctataatctgatcattttctttacactttcttttctgtgcaggaacttgaaattcagtttaatgcatacggatacagatacagatgcaccttgtatctggctcttttggctgcgctctggctctccagactgaagaacactcactcataagtacgaatataaccacaccactgcagagtgcagcccatgcttgtttgcgaaaaataaaaaaaacaaaattggcgagcagcggcatgttcgtatggatgcgaaaggattgcctgtctgtgtgccctggcgccaccgaatacatgctcaccacacaaccagtgcattagtgtgtgtgtctgtgtgccttcacctacagtggtgggcatgagtattggcacagctggcgcttagattgctatttgcttttcctcccgccataaagattcgaataaggtgcgaatttattgggggggaaaccaattgcaaatgaattttcgatcgatctacatatgtaagtccagtgtaaacgcaatttgcaccctttttgcggtttagataccggaatcgatcaatttgaagtttccaagaacttatctgatacttttatttatccagcgaagtttataagtaaaaacaatgtctagcgctctggaggtgcacattttaacttattggattccgaattatatgtacattgggaatcgattacagttctgaagtggcatcttaaaatgattttaaacgtcccataatctatgttcaaacatattcttgtcttaagcttggatactttatagaagtagatccctgtggcagcagtacagtggtcctacctgtttcgggctggtgcaggatgcgaaaccaatgcagcggattgcagcacatgtagatgcagtcgcgggcggcgggacaagtgggcagtcgcttcagttccttggcgttccacaattcccgccagaaaaacaggcgactggcggtcacgtgcggctcccaaaccgtttgcgttttgcacggtatcaggatgcactgcaggtaggtgggtgcggtggtggtggtgggttccacgacatcgcgctgcgtcttggtcggcggatctaggcgactcttgactgcaagcagaagttcgtttctctgcttgcgcttgagttgcttcattagcgcttcgaaatcctcgcgaaatcgtttgccattctgggcttgcgtttggggaggatgagcggtggctctggacgtgctgactggaatcgtaagtgtggatccgctggtggactccgttgcgccgccgcagcatttccgaaacatggtcgtaaaggtggtggcacttatcatccggcggtccaccggctgaacctgtccctgatccggactccgatcctgatccagatcgcttccgtcgatcaacatatcgtcgcaggagcttgcgcagctgtaaccaggagcggtacagcagcggtcgcacgctgacggaggcggcggcaacacatccatgtgatttggcagacggcggtacggatggctgttgttgttgttgtggccttgcccctgactcagactcaaactctggccacaggagctggagtttgagctggagcagtccatcccgcaggctatcgaactgtaaggcggcagcggcgtctgtcgcattgccaaggagtcctcttcgttgcaggaataaccaaagcttggagtacactgatgagggcggggtcgatgtggagggggaggcggccgtggtggctgagcgggcggtgctgctgacaccccattgctcggattgttgctggacgcataacgccataacaccttcttttctcttgggaatatcatggagggacatacagttttgcggtaacatcgatcctattgtatgcgcattatttgtagttgactaacttggttcgcggactcgacggggccggctagtcacggtagttcactttgtgttcttcttagctactccgattgcacgggtgggtgtctgggaacttgaacttatttcggggcgggcgagggattcaggggacttgggaacttgtcaaactgttttatacttctcgtatcactcgttgatatgtatactttcgacgggcttgatatgtactgtccagtggtgtgcactctgcaatgaaagaggagtacgatgattagtcactggcctaattggtcttccgagcatcgttaaatgcactcgtggttaagtaaagcgggggcggagtctagagaggggtttgcctgcacctaatcttcaaaacataattaaactggtccctaaatctgtattatttagatgtaaccaaaacatacatagctaaaccgatcggcttgttaattcaatgtttatattgctactttttgttttctttgaatagaataatatatgtatgtagatgaatctgatttgaaagataccaaaatcataatgctttattttttattaaaccctctgagcacatatgcaggtgcatacttacatacatatgtatgtatcaaatcaataatgagcgtagtgttgtttgaatgtgccacatttcctataaaaaggctacattccccgttttcgatttccagactacgcccctggtggcaggcaaggaatctagtggtggatcgcttgagtgagtaataccccctccccgccctctttcaccaacggacagccgacgccagtgcatatgcaaagatctgtgcggcagcatcagctgtcagcgagaaagagacggacgatggtgggggggaacgattggtaagggggaacgattggtaagggggaacgaacgggagagcgccgcaaattaacagcccaaatacgcttgtgtttgtgtatgtgtgtggcccatgcgactatttccattttgttgctggcatttcttgcgctccttatcgacgacaaaagtggcgccgccggcatgacggcaacaacataaaaaacagcacagcagcgacgaacagcaacaaaattacgagtcagccccacaagcacgctcaccaacaccaacacaccgcatcaaacacactcgcgctctctcgctcactcatacatacagaatgcttgcgtgcagagtaaaaaaaaggcagggcggcgggcgtgcgagcgagagggaaatgcctggcgccactgacgtaataaaagaaataatagtaacgatgtcggcggcagaggcgtcgtcggaatggcgccacaccaacacacgctcaccttagacagacacacggacagggacgagcgacgcgacggtcggtttgtcagccggtttgacaagttgaagaatcaacaatttaaggttgaggtgagtatgaaataatctaccgcagccgtggttcaaaagagtacgtaccaccagagagtgcgagtgtggtgggaattagaattgaaggcgctctcgaaactcttctgaaaagtcatcaagtcgagaacttagcgttcttaaagtctagctttgaattagaacttatcagaatgcatctgagtttttcaatcggaaacaaaaaaaggtatgttttaaacagtagcattatcttatgagaccaatcttaggactttacttattttgtcaagaacagaaacataattaataataggaatcaatttataagatccttcattccctccacataaaccgtataactgcacgattaatatttgtcaataataaaaaatgcaatgcgaaagcgacagaaataaattatttacatatggacatacatctaaaattatttatgatgtgcgatgtatgcaccacagtttttagcttcaaaattgcaaagtaattgataccaccgtacttttgctttcaaatatttaccaatcttgagtcagccggaacaaaaacccttccacatttaaaactatgaaagatgtgtaatccagtgaacaatagagagagctgtttacgttcataaaattcagtatttagagcaagtccaatacaaaaaaaaaaaattgcacatcaacacttcaaaagccatatatcgcacatttaacaatcaattgaaaacagtctatactcaagaatttttattcaaacccgctgagtgattattttttccaaattcacgtttacaaatttatatgtatatttatatatacatacgtagttatggactttctgataatgaaagcatgagtaattgtaagtccaattggaaactatagcgatttggtaacagatattcgcgactcggtattatataaaatataaaattatcttcgaaaccgcatcagaaaatattgaatatgaaaacttaaataacgctaatgagtgataagcatttgtttgttgacttagctattttgcataatcacgagtgcacctcttcaaatcggcttgattttgagttctaaggagtggaaataggtacttactgtttaaaattttttgttaggtggtttccgtttaatcctttccttatgtagtattactttttgatatgtgtaggtgtatttgatatgtttagaggttcacttgataatttgtatttacatttactgcagaagaaacaaactattagcaacgaatttgaatttgtttaacacgtgccgacgggtttttgttattggattggtaaccgcagtcgattttttctttttttgctgctggtcagtcactttttcctatgcatgtgtacgtttgtgtggatttaataaggtgcgagtaatgtgttgatttcggttgaatattatgttgaagtagccgaatgccggaaaacaataacaatttttaacgtggtggaaaaggtgttttttgttggcttgcgatttgcgctctgctttgattctgccggcgtcgctaccaccgctatatacgtatacgtttgtttgtttgtatgggccagtgcaggtacaatgtgtgtacgtggctggcgaacaattgcatttcttttcttgctgttatttgctcagttaaagcttgaacacacttattatttggcccgcattttccccccgatgctcattgatttttaattcgcacacgaacacaaccacaaaacacacgcacgcaaacgagatcgaagatccgttatccgggcggagaattctcgctctttctttgcacacacaaacacaaacaaatgcatagaattcataacagcaagcagcaaaaataaaagattttcgcctgacgatttccaatccccttcgattctcacttcaattgatttgcctgctgcactcacactttttctatgtatttcctccttcacatttcagttctagagcgcacaacaacttcactgcacttgtttgttgtttacgacgcccgcgtttacaacaacaaaaacaaaacccgtaaatgttgcgaaaaaagagtcggggaaaggcgaaaaagtccgatatttaggaactgcgtttttttgtcatttaattaacccaaaaatcatttagcagtctcgaacacaaataacgttatttcggaaaatttctcgtggcaatacgtcaagtatccatcttttcgttgatatctttcggatttggatttctcgaacggcaaaagaacacacaagcgacgcggttgaaaattgttggggcaatgagcgaagcgctaactgtgcggattgatagtctttggagctgtggggaataaacgtgggagaaacgcctgagagagcgcctgggagagggaggtttagagagagagagaaa

SEQ ID NO: 10793 - DNA, 3550 bp, DROSOPHILA
taaatccacacaaacgtacacatgcataggaaaaagtgactgaccagcagcaaaaaaagaaaaaatcgactgcggttaccaatccaataacaaaaacccgtcggcacgtgttaaacaaattcaaattcgttgctaatagtttgtttcttctgcagtaaatgtaaatacaaattatcaagtgaacctctaaacatatcaaatacacctacacatatcaaaaagtaatactacataaggaaaggattaaacggaaaccacctaacaaaaaattttaaacaagtgcacaccactggacagtacatatcaagcccgtcgaaagtatacatatcaacgagtgatacgagaagtataaaacagtttgacaagttcccaagtcccctgaatccctcgcccgccccgaaataagttcaagttcccagacacccacccgtgcaatcggagtagctaagaagaacacaaagtgaactaccgtgactagccggccccgtcgagtccgcgaaccaagttagtcaactacaaataatgcgcatacaataggatcgatgttaccgcaaaactgtatgtccctccatgatattcccaagagaaaagaaggtgttatggcgttatgcgtccagcaacaatccgagcaatggggtgtcagcagcaccgcccgctcagccaccacggccgcctccccctccacatcgaccccgccctcatcagtgtactccaagctttggttattcctgcaacgaagaggactccttggcaatgcgacagacgccgctgccgccttacagttcgatagcctgcgggatggactgctccagctcaaactccagctcctgtggccagagtttgagtctgagtcaggggcaaggccacaacaacaacaacagccatccgtaccgccgtctgccaaatcacatggatgtgttgccgccgcctccgtcagcgtgcgaccgctgctgtaccgctcctggttacagctgcgcaagctcctgcgacgatatgttgatcgacggaagcgatctggatcaggatcggagtccggatcagggacaggttcagccggtggaccgccggatgataagtgccaccacctttacgaccatgtttcggaaatgctgcggcggcgcaacggagtccaccagcggatccacacttacgattccagtcagcacgtccagagccaccgctcatcctccccaaacgcaagcccagaatggcaaacgatttcgcgaggatttcgaagcgctaatgaagcaactcaagcgcaagcagagaaacgaacttctgcttgcagtcaagagtcgcctagatccgccgaccaagacgcagcgcgatgtcgtggaacccaccaccaccaccgcacccacctacctgcagtgcatcctgataccgtgcaaaacgcaaacggtttgggagccgcacgtgaccgccagtcgcctgtttttctggcgggaattgtggaacgccaaggaactgaagcgactgcccacttgtcccgccgcccgcgactgcatctacatgtgctgcaatccgctgcattggtttcgcatcctgcaccagcccgaaacagaatccccaacaccgccgtaccaacgctcaaaaatgctgagactgaaagatgcagatttcgaagaagactcgcagaacgatgcaaagtcggcagcgctcagcacgtggagtgccgaaagcaccagcatttcgaacatctacaagccggctctctacgagtcggttaccactgatggaaaagatcataacatcaacagtcaggtgtggtgccaaatcgcctactgggagatggcccaccgcgtcggggagttctttcacgccaaaacgaatgcagtcaatatctacacggatgggattgtggccagtgaggtggacagcatgtgcctacgtgacctcacaccagcaggcaatcagatccactcggtggtgccaaaagcgcgtcatacggtcggattgggggtcacattgagtctggagaacggcgatgtttggatctacaatcgtgggaatacaaccatttttgtcgattcacccaccctgtccgaaaatctggaccgagtgtgcaaagtgatgccgggctattgtctgaaggcctttgaaaccaatagggctgaacttctgagcatgagagatcacggacatcatcccatgggacccgtcgactacttcagcattaagatcagctttggcaagggctggggacgcgactacaaaagacaggatatcatgggctgcccctgctggctggaggttcactttagtcatctgcggtgacagtacctgatgctggcccgttcggcaggacctcattcggcatcccagcacctggttgagccgggcatgggatgcgcctgcgatcaggtgagcagctggcgatcgcgccaactgctgcagaaggcgcagaagctgctgaccaggctgtgcaggcaggtgtgcgcactgacggattatcgtccggcgaggacgagatggcgttgtctggcgggcaggagatcgagccgccagttaaacactaaacaaccaataatttggaacaacaaaggactgcaaaagaaatcattttaaatgttaatatacataattacgaaacaagtttcaattactgctagtagacacatcgaaattaattttaacgcatctgagtcgcattaagagagagagagagcaaagagagagagagagagagagaaagcggtgacgagaagtcgtagcgagtcgagccgaaatacatagtaattgattgttaaaaatacttagcaaaaattgaaatcctgtgattcactctatatatatacacatgtaggacgtaccgatgcaaggggctagagctccattgccagtagctatatgatatgtataaatatttaatctaacatacatacttaacagaaggcacatcagggttaatagttttgagaatggcgaaaagtctagttacgatgcaatacattcaaaaagccactacattttctatgcgacgtttttagaagaaacccaagcccataatttataccccacccaaatgaaaccaaacatcactgaaatacaaatctgttcagtagaatctgcatagatcctaggctaacaaaaaaacaccattaacaaattcaatacggttttagattctagcgcattaggatccaatcggctttagaaagcacacgtcatgttcgaacattatttgttttatgttgatattttgactgttttcgttgtcattattacgtacattcattgtttaaattaaaaaatctgtcatttgtcaagtgtataaaaagatatcacaacacgatacttacatgagctgaataccatagaataattttatttaaatctgtaatcactttatgtccattgacgaagcaccaacttcgtttgcatttccaacagtagcaaatgcgaattcgaggaactggtgctctatttgaaatccgtgcgctagatgatctttaaccccttaccaaaccaaactgcatgtaggccatcctagaatcccagccttgtatgtatttcgttctaagaataaatgcgatccacgttaaacatt

SEQ ID NO: 10794 - protein, 568 aa, DROSOPHILA
MIFPREKKVLWRYASSNNPSNGVSAAPPAQPPRPPPPPHRPRPHQCTPSFGYSCNEEDSLAMRQTPLPPYSSIACGMDCSSSNSSSCGQSLSLSQGQGHNNNNSHPYRRLPNHMDVLPPPPSACDRCCTAPGYSCASSCDDMLIDGSDLDQDRSPDQGQVQPVDRRMISATTFTTMFRKCCGGATESTSGSTLTIPVSTSRATAHPPQTQAQNGKRFREDFEALMKQLKRKQRNELLLAVKSRLDPPTKTQRDVVEPTTTTAPTYLQCILIPCKTQTVWEPHVTASRLFFWRELWNAKELKRLPTCPAARDCIYMCCNPLHWFRILHQPETESPTPPYQRSKMLRLKDADFEEDSQNDAKSAALSTWSAESTSISNIYKPALYESVTTDGKDHNINSQVWCQIAYWEMAHRVGEFFHAKTNAVNIYTDGIVASEVDSMCLRDLTPAGNQIHSVVPKARHTVGLGVTLSLENGDVWIYNRGNTTIFVDSPTLSENLDRVCKVMPGYCLKAFETNRAELLSMRDHGHHPMGPVDYFSIKISFGKGWGRDYKRQDIMGCPCWLEVHFSHLR

SEQ ID NO: 10795 - DNA, 2998 bp, DROSOPHILA
caacgcgtatttcgttcatattatacaaaagatacataatcgaggggagcgcctaagttgtaattatttaatgagaaataaaccgaaaatcgaaagtacactataaactatgcaataccgacatcgtacattgaaaatgtaacaaatgtattaatctccgttttccgaactgcactcacaaattttagaatccaaaaatattaaaaaaaaaaatcattactccagtaagagataacgttaattgacaaaatcgaaacaaatgttttctcttttgcgcggaggcttatctgattcgcaatagtatcacagaagaggtcatagatttctttgtttaattaagaatttaaagttatgcattaaatagctcttaagtcgactgtatcctaaaaatccgagtaaagttaagtcttattgtgtggctaatagtaaagtaaatgatgagcgatgtcaacatataatacacataatattctgaaaaataggccgcaggatcgtaggaactccatgtgctgttttgcacaacttctattgaattccgaaaagatatattaaatttctgcaacaccctcgtttccccttgcacgcttcgcagtcatgccagatgcaaatggaaaatttaatttatatggagatcatgtacgaaacaaatacgaacctaatgtggcataaataatattttaaacacttttgcagatattatattataaacaaagtacaataaacaactcgattttcttttatttattagattacaatgcaaagagttagtaaggatgtataaatatatattacatctctataaattgtttagtttccaaaaacttgaagcactgtgccgttatcaaaaaagggggaatacccctaacactcggctgttatctgtaaaaatatttacagcactgccacactgcaaaaatgtcataatcaaaacaaaatgagaagaattggtcttttaaatagtttaatgcgccagaaaacgactgccagaaacttgtttcagttcggcaaagttaaggggtatgggctccggcttatctctttcaggactctattctgatgggtatacttacagagatactggcaaatatgaacagatcgtgtccaccggccaagtttccccggaacgttttgtgcccgaggagatcaagaaaccggcgtactacttcaagaatatgccaccgggtaacacgctgggatcgcccgaaatcaaaagccaggttcagattgatgccatgcgtctaagcggcagactggcggccaggatactgcgcgaatgcggtaaactagcaacagttggcacaaccaccgatcagattgatgcctttgcgcatgaaagaattctcgagtccaaagcgtatccgtcgccgctgagatacgccggcttcccaaagtccatttgcacgtcgatcaacaatatcgcctgtcacggaattccggatgaccggcagttggccgatggggatattataaatattgatgtcacagtctttttgaacggctaccatggcgactgttcggaaacatttcgggtgggcaacgtggacgaacggggtggctttctcgtggaggccactaaatcctgtttggatcagtgcatttcgctgtgcggccccggtgtggaattcaatgagattggaaagttcatagacagatattgcgacgaacatgatctggcatcgatagctgctttcattggacatggaatcggtagctatttccacggccccccggagatactacactattgtaagtaagactgtttaagagactcctccattgctaatcaaactgcacatcgtagataatgagattcctggaaagatgcagcccggcatgaccttcaccattgaacccattctgtccctgggcggagcagaaatagcagtgctgcaagatggctggacggccattagtttggatggcgcacgtagcgcccagttcgagcacaccattctgataaccgagacgggaacggagatacttacaagagatcaatagaattttatgtacatgatgcaatttttattcgtgattcccataaagtgttgaatgagtgctggatggcagtcttgtgcattttgtgccgttttaatcgtcgactccgtctggttaggtgctctaattgattgatgatgcatacagaatttagctacaaatcgcattggacttctgcaccggcttctgaatgggaaggaagagcttaaactccggcggcagctcgtcctccgagtagagacgatcggagaagtagacgcgtctgatgcggcaatttgcatgaatctgtacacggagtgtctccacataattggtgccgtatgcgcgacgcgtgaagtcggacaggttgaactggatctggttccatccctcgtccaatcgcatgggcatggtgcaaatgaaaggcttgacacgagttgtcgactggtagttactggccctaaaccttcgccgcacgttcttgtcatcgagaacctgattaggggcggaaatcatggagttactgtcttatgcaagatgacgaagcttacctgaacctcgaaggtgaagtacttcttcatgttcttgatgatcatcaccaggaagggcagcttgatgcccagcgtcttcttcggatctgccggacatgttatgaacgtggtgctgacattggtgccgactatttccaacacgaggctttgtatgtcgttgtcggtgatccgcttgatgtgtccattgcgcaccttcttatcccacagctgcagtggctttgagccaatactgtacagaattgataggaatcccgattggaaagtgtttttgaacatttcgcgactgctgtgcagtgaccggttcgccccacggagagtatagtctcttcgaaatttatatagggccagttaaggttggccgtaaatttttcgcacagccgaaactcgtacaaactacgaacatcaatgcggaacttgattattttctcatgtcaatgagtttgtttagcacggcatcctgttgttgccataac

SEQ ID NO: 10796 - DNA, 943 bp, DROSOPHILA
ttcggcaaagttaaggggtatgggctccggcttatctctttcaggactctattctgatgggtatacttacagagatactggcaaatatgaacagatcgtgtccaccggccaagtttccccggaacgttttgtgcccgaggagatcaagaaaccggcgtactacttcaagaatatgccaccgggtaacacgctgggatcgcccgaaatcaaaagccaggttcagattgatgccatgcgtctaagcggcagactggcggccaggatactgcgcgaatgcggtaaactagcaacagttggcacaaccaccgatcagattgatgcctttgcgcatgaaagaattctcgagtccaaagcgtatccgtcgccgctgagatacgccggcttcccaaagtccatttgcacgtcgatcaacaatatcgcctgtcacggaattccggatgaccggcagttggccgatggggatattataaatattgatgtcacagtctttttgaacggctaccatggcgactgttcggaaacatttcgggtgggcaacgtggacgaacggggtggctttctcgtggaggccactaaatcctgtttggatcagtgcatttcgctgtgcggccccggtgtggaattcaatgagattggaaagttcatagacagatattgcgacgaacatgatctggcatcgatagctgctttcattggacatggaatcggtagctatttccacggccccccggagatactacactattataatgagattcctggaaagatgcagcccggcatgaccttcaccattgaacccattctgtccctgggcggagcagaaatagcagtgctgcaagatggctggacggccattagtttggatggcgcacgtagcgcccagttcgagcacaccattctgataaccgagacgggaacggagatacttacaagagatcaatag

SEQ ID NO: 10797 - protein, 307 aa, DROSOPHILA
MGSGLSLSGLYSDGYTYRDTGKYEQIVSTGQVSPERFVPEEIKKPAYYFKNMPPGNTLGSPEIKSQVQIDAMRLSGRLAARILRECGKLATVGTTTDQIDAFAHERILESKAYPSPLRYAGFPKSICTSINNIACHGIPDDRQLADGDIINIDVTVFLNGYHGDCSETFRVGNVDERGGFLVEATKSCLDQCISLCGPGVEFNEIGKFIDRYCDEHDLASIAAFIGHGIGSYFHGPPEILHYYNEIPGKMQPGMTFTIEPILSLGGAEIAVLQDGWTAISLDGARSAQFEHTILITETGTEILTRDQ

SEQ ID NO: 10798 - DNA, 3530 bp, DROSOPHILA
tgagcatcgtgggccaaatagtctcggccacctttcccctgggtcccgacaaggagttcgtcttcctgcgctacgaaatggtcgctggtcccgactggcagctgtcctccggaccccagcacggactcacccagctggccaccaatagaaggggccatttcaacgaaccgattgtcttcaatatgcccatcgaggtgacctacaagagcaccagtccatatggctgtgagtaatagtacagaatcgattagtttactatattctttctcagctcagctattaacaatttttcgaatcagattgaagttacaccaacaagatctccaattcttttggtttccagggccacagatcctggtgaccgtgttcggacgcagtggcctgggcagggagacactactcggttacgctcacatccacctgcccgttttcggcagtcgtcgtccagcggatcagacggagcagctgcaggcgcccatcctgatgcccaagtgccccaacatgatggcggacatcaccagttggctgctgcgccgcgagccggagctgaaggaccccaaagtgctgctggacaacctgaagtgcaagggactctctatggagtcgtacggcagcctacagtttcagctgtcctccgtgatgaggggcgcccgcaagctgggctaccattggcactcctgagagagagagtcgagtccagagtgtgttagtaaaacgtgaacttgaggaagcaggaaagcgtttgtcttaatctaattgccgggtgggtggtacctcaaacttgaccttgtccgttgtggcggctaagacgatttcaaaatgacgcgactgctgctaatccaacgcagcaaacgagcggcaatcgaaagcccaattcgaacggttagctttggattggccaagtgccggctaattggattagggcaattagtctaagacgcgttgtacacaagtggccatataaagaccagacgaccatggtccgccccaggcattgccgccgagttcgcgtcccgagagtcagccgtcctgctatggacagcgagtagtcgccgcagcagagtagccagccatccaagtttagacgaagccaccaccgaagcgccaccagtaccagccattcgaaatggccagcctgcatcccccgagcttcgcctatatgcgcgatgggcgcaatctcagcctggcggagagtgtgcccgccgagattatgcacatggtggatccgtactggtaccagtggcctccattggagcccatgtggttcggcatcattggctttgtgattgccattctgggcaccatgtcgctggcgggcaacttcattgtgatgtacatctttacctcgtcgaagggactgcgcacgccgtccaacatgtttgtggtcaatctggccttctccgacttcatgatgatgttcaccatgttcccgccggtggtgctgaatggcttctatggcacctggatcatgggtcccttcctgtgcgaattatacggcatgtttggctcgctcttcggatgcgtttccatctggtcgatgacactgattgcctacgatcgttactgtgtgatcgtgaagggaatggccaggaaaccactgacggccacggcggctgtgctccggctcatggtcgtgtggaccatctgcggagcgtgggccctgatgccgctcttcggctggaatcggtatgtgcccgagggcaacatgaccgcctgcggcactgactactttgccaaggactggtggaacaggtcctacatcatcgtctactccctgtgggtctatctcacgccgctgctgaccatcatcttctaatatgacattcgttactaattatccaaggattctgtttgattaaggattgattttggcctttcaggctgtggctgcccatgagaaggccatgcgggagcaggcgaagaagatgaacgtggcctccttgcggaacagcgaggccgacaagagcaaggccatcgagatcaagctggcgaaagtggcactgaccaccatatcgctgtggttcttcgcctggactccgtataccatcatcaactacgcgggcatcttcgaatcgatgcacctgagtccactgagcaccatctgtggatccgtctttgccaaagccaatgccgtgtgcaatcccattgtgtacggattgaggtaatatctaattagcttcctacttatctatctatatgaccaatttcttaatgcatctcctgcaacagccacccgaagtacaagcaggtgctacgggagaagatgccatgcctggcctgcggcaaggacgatctcacctcggactcgaggacacaggccaccgccgagattagcgaatcgcaggcttaggcgattcgaagacgacgacgactgcagacgtagggaactgacagctctagatctacaaaagactcaactattttgcaaatggcacctcaaggaaaaacccaaaaaaaaaaaaagatggcaatgtaaaaaaaatgtaaaaaaaaaatatagtaaaaatataacagcaattgatacaaaatcaaatccacccagtttatcaactagtcaagtgtgctttaatcaagcacagtgccccaaagaagtttgtgcctttattggtaagtaacatttcaagcatttcaaccatttgccatagccattggatcacatagttcgttaatcgaagtcgttgccagttttggtgtcagtccaagttggttcatctggggatatccttaggggtagtaggtgttcaggccgaggtccatcaatgtgccattgtggcgcctttctcgcaactcctgggtgaagagggcacgcccctgcagcagtatgaagtcgatgagcctcctgttcgagctctgacgcagtgcatcggggtcggatcgcttgcgaaggtagttaaagcagcatgtgctggagtagtaaaatgtatatcacttggcgaactctttgaatatgttagcttaccgaaagtgctttgtgccacatgcgctggcacactccttgccacaagtgtcgcattttatggcctgcgaactgggggggcacatcaaccaaatgccttgataagccaaagatttagttacaaaacctaaacaatgattgctcttagttgaaactcacatagcaagatgatctggaagtgagccagccaatgcatcgttgtcttagtcattggtcggccgtctgctcagaatgctgtgccactcatatgatcttcgcttggtgtcctgtttcgtatccctgagaaagcgcaaatgaaaggaccgagttgccggctcctgactttatatactcatcggctgcaggacagttgcccactttgagatgctggcattcaaagtggtcaatgaagcgtgtggcggatgaatagccaggacgaggactccagtgggcatgtgaacatggagcgcatattaagtaagagcacacagacaattgcagcttgcgcaacaagtttatgggtttattttggggttgtttggggcgggggtcgtttggcagccgcaaatcaaagcagctggacgcaggttgtaaa

SEQ ID NO: 10799 - DNA, 1362 bp, DROSOPHILA
ccgagttcgcgtcccgagagtcagccgtcctgctatggacagcgagtagtcgccgcagcagagtagccagccatccaagtttagacgaagccaccaccgaagcgccaccagtaccagccattcgaaatggccagcctgcatcccccgagcttcgcctatatgcgcgatgggcgcaatctcagcctggcggagagtgtgcccgccgagattatgcacatggtggatccgtactggtaccagtggcctccattggagcccatgtggttcggcatcattggctttgtgattgccattctgggcaccatgtcgctggcgggcaacttcattgtgatgtacatctttacctcgtcgaagggactgcgcacgccgtccaacatgtttgtggtcaatctggccttctccgacttcatgatgatgttcaccatgttcccgccggtggtgctgaatggcttctatggcacctggatcatgggtcccttcctgtgcgaattatacggcatgtttggctcgctcttcggatgcgtttccatctggtcgatgacactgattgcctacgatcgttactgtgtgatcgtgaagggaatggccaggaaaccactgacggccacggcggctgtgctccggctcatggtcgtgtggaccatctgcggagcgtgggccctgatgccgctcttcggctggaatcggtatgtgcccgagggcaacatgaccgcctgcggcactgactactttgccaaggactggtggaacaggtcctacatcatcgtctactccctgtgggctgtggctgcccatgagaaggccatgcgggagcaggcgaagaagatgaacgtggcctccttgcggaacagcgaggccgacaagagcaaggccatcgagatcaagctggcgaaagtggcactgaccaccatatcgctgtggttcttcgcctggactccgtataccatcatcaactacgcgggcatcttcgaatcgatgcacctgagtccactgagcaccatctgtggatccgtctttgccaaagccaatgccgtgtgcaatcccattgtgtacggattgagccacccgaagtacaagcaggtgctacgggagaagatgccatgcctggcctgcggcaaggacgatctcacctcggactcgaggacacaggccaccgccgagattagcgaatcgcaggcttaggcgattcgaagacgacgacgactgcagacgtagggaactgacagctctagatctacaaaagactcaactattttgcaaatggcacctcaaggaaaaacccaaaaaaaaaaaaagatggcaatgtaaaaaaaatgtaaaaaaaaaatatagtaaaaatataacagcaattgatacaaaatc

SEQ ID NO: 10800 - protein, 351 aa, DROSOPHILA
MASLHPPSFAYMRDGRNLSLAESVPAEIMHMVDPYWYQWPPLEPMWFGIIGFVIAILGTMSLAGNFIVMYIFTSSKGLRTPSNMFVVNLAFSDFMMMFTMFPPVVLNGFYGTWIMGPFLCELYGMFGSLFGCVSIWSMTLIAYDRYCVIVKGMARKPLTATAAVLRLMVVWTICGAWALMPLFGWNRYVPEGNMTACGTDYFAKDWWNRSYIIVYSLWAVAAHEKAMREQAKKMNVASLRNSEADKSKAIEIKLAKVALTTISLWFFAWTPYTIINYAGIFESMHLSPLSTICGSVFAKANAVCNPIVYGLSHPKYKQVLREKMPCLACGKDDLTSDSRTQATAEISESQA

SEQ ID NO: 10801 - DNA, 2674 bp, DROSOPHILA
cagtttcttgaatttgcagccaaacaaaccctgtccctgctccgaaatttctcgagaagatggggggcaggcaggcagccaggcggtggtgctgagtcatgcgcaatttgcaatcccaaaatgcaccctgctaaccaggattttcggctaactgcgtagcaccagcgttcaaaagtacaggtattcggacgctgaggcgtttcgaatttggtggtggttgaaagtaactactgcttgtggctctggccccgtggagtgctgatgcatcgcatgaaggtagtggatgaacggaggagagagggagagtgcagctctgctgcgtaatagatccgtgacctggtttgccaatgacgtcaccaaatacgcctttaaattctcgttatgcggaagttatgtatggaacgcagatagcttggctgccattttagcaattgaatgggcgagataagtgcctctgaagaaagtaactgatagaacgaagcataactatttggggattatggtctgagtcagcatttgtaagtaggggatagaaatattaaaaacaaaaaatataaaaacattttttaggtgcttggaataaattaaaagcttgagtttatttggtgtgttcaagttaactatgcagttattgtttggaaaatttgaaaagttataaaatcctctataaattcaaatattgcgttttcattacgttaatatctaatttgtaaatggtatattctcttaaaaaacgtatctctttgtttctatattattatcaagttacgaaaccaaagaaaaaaaatgaatgtttcctatttcccaaccgaaaacatataataataaatattgattacaaaaacgaatcatcttaatttgaaaaattcatttgtttatatactttaaatcgtcatatagatggcgctacatttgccattgtcactcacagcgcaacgcgcacaccttatcagctgaatttgttgccattcagaatgcagtgtttgtgaaggcgtagttctgttgttttttatattttccctctttaaaaatacacaaaatgttgaaacccaaagctttgacgcaggttctcagccaggcgaacaccggcggagtggagaacaccctgtaggatagtcccttaccatgccattccttcaaatatcacttatccctgcatccacagcctgctcagccaggagggagctctattggcctactccggttatggcgataaggatgccaggataacggcggccatagccagcaacatatgggcggcctacgagaagcatggacgcaacgcctttcgcgaaggtcgcctcactttcgtgctcatcgattgtgaaaacggtcatgtggccatcacacaggtgggtgatcctcttttttttagcagggattcgttctataaaatcttaactatattcctttttacaggttgccagtgtccttttgtgcctgtacgccaagcaaacggtgggattgggtcttctgaagcaaaaggccatgtcactggcctcctatttggagcgaccgcttaagcagatctcggcctcataaggataaaacaatgatgtaccaagttccgaaatgaataagttaataagtgtatgcatcaaaagtgaatcaaatgaatatgaatagtctgcggaaaagtttaaacgataatatattagtacttgaaattatgaatctttaaggattttgttagtatttaaggaaaaacttgtctgctggtttccaaaagtaacccaaagatatttcgtattctgaattatttggatagagggtcaggtttattattctgcaagatttgttcaagaaaacacacaatcattagggaatattgtataagaaaattttggacttaattactaagtgtggacttattcgatggcgtagagcttcagggtgcggtccatgctggtggatgccagatactgggcgtgcttgccgaatctcacgcccgttgccagggccgtgtggtcgttgaataccttcagttcctgccactgcttgcacaggtaaaccctgtaaataaaacgaagcaaccgtcagaatttgtatttgtaccgtggcaaccaaataaacaagttaactaagggaatcttctttggcgaatttaacttaacaatgcgaaagtttaaaagaaaagtttaccgcgaatatgaaagtaagtattatattctaatatgcgaagacttaaaaatgcatgctgctcttcaagatttcgtgcgacccaagacccatgtggaaccggagcctccaaagcccataaacttatcgattgaggacttcaatgcggtgcgaaataattaatttttatatttccaaagttaagttttattaatattcctcagcgcggagagatcgccaatccccgtgctccttgtgtggtcaccaccatcgatcccgattatattaaggacgccagtgcgcaacgtttggccagaaaatttcgcatgaaaacgtaaggaatcaaatgaattatgtgctggtgcaatttcacagctttttcagggacatcctactcttgagggagattacccgcaatcgctttatgtactatgctacgcaagaactttttttggaccgaaaacgcgagaaggaataccaagacaatgtatacgaaaaggccgaggagtttcacaagtttgcagaggagtcgctcaagaaaatggaagcggaggag

SEQ ID NO: 10802 - DNA, 549 bp, DROSOPHILA
tgttgttttttatattttccctctttaaaaatacacaaaatgttgaaacccaaagctttgacgcaggttctcagccaggcgaacaccggcggagtggagaacaccctcctgctcagccaggagggagctctattggcctactccggttatggcgataaggatgccaggataacggcggccatagccagcaacatatgggcggcctacgagaagcatggacgcaacgcctttcgcgaaggtcgcctcactttcgtgctcatcgattgtgaaaacggtcatgtggccatcacacaggttgccagtgtccttttgtgcctgtacgccaagcaaacggtgggattgggtcttctgaagcaaaaggccatgtcactggcctcctatttggagcgaccgcttaagcagatctcggcctcataaggataaaacaatgatgtaccaagttccgaaatgaataagttaataagtgtatgcatcaaaagtgaatcaaatgaatatgaatagtctgcggaaaagtttaaacgataatatattagtacttgaaattatgaa

SEQ ID NO: 10803 - protein, 125 aa, DROSOPHILA
MLKPKALTQVLSQANTGGVENTLLLSQEGALLAYSGYGDKDARITAAIASNIWAAYEKHGRNAFREGRLTFVLIDCENGHVAITQVASVLLCLYAKQTVGLGLLKQKAMSLASYLERPLKQISAS

SEQ ID NO: 10804 - DNA, 7439 bp, DROSOPHILA
tgttgaagcccgaagacaataaccctcattatcacacaataaatatcgggtatttacttaattgcaaaaataggcgtaactacgcaagcaaaaaacaactgaaaaatgcgaataatacctgccatgtttgacatgtgttggctccgattttccatttgttaattgcccattatgtccgatggggcaggagaaatggagagaggctttaattgagccgacgttcacacgataaggcggcgaagatccgtggaaaatgtggccaaaacaaagaagtggaagtcgggttttgtgctgaaaaagtggaaaactgaaaaagtggaagtgccaacgatgaaacaatcccagccacttgactgccgtataagacacaagtcattcgatataagctacactcagcgaaaagtcgtagctcatatgctcctttcacacgggaaaaaatatgagggggctttcttataaaggtacgcaatctaaaatcctggtaactgtctaatctctgtacatctgtacatctctggcttataacccaattgatttaacatcattttgataaagagtttttaccaattgataaattcggtagatgtgaattatttcgagtgcattaacctacaacatagtcgattgtcgttgggttagaggccttcaaaagacgtatgccatatacccacagtggacatttgggatccccggattcgcgatgaggaagcaatttgccacaactcgcgaatgtcccacacatacacacttgcacataacaattggcgaccgtcgagccatcacccgcaccaccgctcacatgggccacgcccactgcgcctcctccgccttttggcaatcggctcgtggaacttcgcatctgccaactgcgaaagttttacccacgaaagtgaacgtgtttctgcgaagcggcctctctcgtgtctccaatgcgatccgtcgtcatggtcttgggtgaataactttggcgatggcttgaacccagttcaggctgccaacggagctcgcccaggcaacatcgtcacccggagttgagagccgcgactttttcaagcctccaccccgacttatccggccgtccgtccatatcgcgttgaacattctgataatgtgcattgattgaacatagataacagaatgaatatgctgggctcggttaagatgcacaagaattcgcgccgaaactatttcacgctcagcttccatcggttcgatatttttcggtgtaagtgctcccaactgaaatcggtgttgtagataatcccaaagggttacagcccgtgaagtgtatttactttaagtttttctgtgtttttgttaagtggttttagagctacattctttgatggctttaaataagaacggctacatttgatgatatattacaaacgagtaatatatttacgttatgtgttgtgcaactggtaccttttctgcttaacttacaatttgtttttataaattttgtaaaataaattttaaacatataccgcttaaaatgtagtgagcccacaatttcttaaataattaacgtaaacacattgtattctttaatacttacacttttctaacagattaaacttaatatttattgcttaatattatgcaatactaactcttatgattgaaatgtttaagcattagttcctaaatcgtaatattttatcgagagtggacagctcttaaagaaatgtgatttgcactttgtaagccaagccaattaagtcaatttaaaaactgataccatgaagatcaggcattgcactcgtaaaactgcaaacgaaaccaaactggacatcaactccaatttcgaatttcaccgcgaacttgacaagtacaagccgctttttgctccgcacaaattaatagataaaatgtgtggggacatgtggaaaaatgaaaaaatgtgcttttcgttagctcgcttgagttgttttttcaaatcgaatgaataaattcaatgcaaactggctggactcgattgcgagtagttttggccataagagtgcagccatgaatctgcaccaccacctcgtatggtctcgtccaaaccacgtaatgatcgccgtggaaacgggttaccaaaggccgtgaaagttggggacccgatgcgatcgggtttagatggtgtttggccaattaaccggctgcctggaaattgaatgcagagaggcgacttcaatggaaacggcggctaattcaatttttatgggtatactcccacgaagacgttggcggggaacttattcttccgtgtctgcggatattaatccaactatataatatatatatgatttcccaggaagcaaagcgagctttccatcaaatctgagctgcttccaggcaaacaataaggaaaggcattgaattgggacacttgaatgtttccgacatgccaatatctaaattatgttctatccaatcatgtgcggacttttagccacattcgttggccacctatctctgttccttggtctcaccatttatcaaaattggggtatcgagcatctctcgattacatatacatttaaccaccaataagttatcatttatcaacttgagattctgaagtttggttaccaattaatatgtatgcctaaaattaattgaaatataaatattttaaataaactgcagtaaaagtgaacccgacttgatttggaagccaaggaaatatttaaaatatattcattttttgaatgtatatataaatgattattatagttcccaaaatgagctctaatttcaaattatttgcattccaatatgcagcactcatttaacatttctctccgttagacttccacacaaaagtaatttatttgattcacttgttcgtatttttatatgcaactgggttgcaactccgtctccttctcctcgcaaatctccgtctggtggtgaaaggcgcctacgcagcgatccattgtggtttgggcttctcgtagcttcgtagtttcatagtttcgtattttcttcagtacatttgctgtagtttatttgctggctgctcaagttagcatgaccagagtcagactgctgataactgctaacccacaaaactcataaataaattggttcaattccagcgaacaagaaagccaagctgctcaatgccggcagcacaaatggtagctccatcgccgccagctcggatgactcccagtcccgatacggaggatctgtacatgctgccaatggttctgcggccaatggccacttctatggctactcggagggcaacaaaaaccaggggagcaatggcaatggcaacggcaacggcaacggaggtggcggcaactatcacagccatcccaatcagccacactacgcgactggccagccgcatcagtacacgcccagcctgtacggaggaggctcctccgccgaggatcactacgaacttacacagcagcagcagcagatttacggggaaacccatttgcccagcggacagaggacgggcggacccaatctggtcaacaagcagctggtgctgccttttgtgccgcccagttttcccaataaatcacaagacggcgtcacgcatctcatcaagccgtccgagtatctcaagagcatcagcatcgacaagcgttcgtgcccatcctccgcccggtgagtagtgtttattcaccaaatacccccatgaatcgcagagtatatgtacctactcgtatatatcctccatcctccgactttcaattagcacatggcagccgatttaatttggctgaacatctcgtgcaacggctttttataattagtatcggcggtactgttgcctcgcctcaattagccaaaatctaaaaaaaaaatatatatatatataaaaagatacatggcttcaaagacgcttggctgccgctgagcaattagcagctagcagatggctagatctctgtgctgcgccaatttgcagcggaaaatggctaaagaaaatatagctagattttctatacccaacaagagtttttcttacaaaatgcaatttgagacaactcaatttgagataagcgtagctgctgacaaattgatgtttaatgtgccactcatcagtaatggtattgaatttacttggtaaaacaagctcggattgaagaaaaagtcagatgcgcagcactgtagccgagagatattcgcgacttcctctgccgatcaagagtgcatgaaattttatgcgtgccactttgcggcctgccacttttcttaccacagatgcgatgttgcagccgccactgcaactcagttgcaatccgaagatgatactgcgcacacgccacacctggcgcaggtccgccattcgcctactggccacaacccacccccatctcccaactgccctctgccaattgccattttccagtgaaagtagccgagatctctacctaatccaacattttcccccttttgttccaccaacagctccacggatacggaggactacatgcagatacagatcgcccagcagcagtcgcatccgcaccagcaccagcaccacccccatccgcatccacatccgcaccatccccaccagctgcatggaatgggcgagcagccgccgttgccgccaccaccgccgcctctaccccacggaatgttacccccgcagccaccgatgggtccaccgatgggtgtagcaggtggccaggacgcaaccatgtctggcaaatcacacaagcccaagaagccacacggatcggcacccaatagccaggacacggccaccaggaagcagcaccagccactctcggccatctctatccaggatctgaacagcgtacaggtgagcaattggcactccactgtggtcaggaacacatattattaggaaggctcataagaaacaattgtgcttaacttactacaattcctggaccaattctccttcagctgcgtcgcacggacacacagaaggtaccgaagccctaccagatgccagctcgcagcctgagcatgcagtgtctgacctccagcacggaaacctatcttaagtccgacctaattgccgagctaaagatctccaaggacataccgggcatcaagaagatgaaagtggagcagcagatggctagccggatggactcggagcactacatggagatcaccaagcagttctcgggcaacaactacgtggaccaggtgagttctggccaactggtgccagccgaaacacaagcgaacggtggttaagaggcgggtcaaagatctacttgcagataccggaaagggaccaggccggcaacgccatacccgattggaagcgccagatgatggccaagaaggcggccgagcgggccaagaaggacttcgaggagcgtatggctcaggaggcagagtcacgccgcctctcacagattccccagtggaagcgggatctactggcgcgacgcgaggagacggagaacaagctgaagtaagtgggtgtagtggctagtggggagtctcctgacccctggcctcaattgtctgaccttcttctagggcggccatctatacgcccaaggtggaggagaacaaccgggtggcggacacctggcggctgaagaaccgcgccatgtccatcgacaacatcaacatcaatctggccggtatggagcagcactatcagcagatccagtttcagcagaagcagcagcaactccagttgggcaacaaggagaaccatgtcgatcccaagggagctgatcaggatcaggagcacggagttggcattggcagtggcgttggtaacgctaattctggcgtcattggaggtcaggagctcatcgacccatcggagggcagccagggccgcgccgaggaggaggaggataacatcatcccatggcgcgcccagctgcgcaagaccaacagccgtctcagcctgatctgatctgcatccacgtacacatacccaaaaaattaaatccatttttcaatcgactcctaagcggtgtattttttttttttttttttttgtggattaacttaaagcatgtgcaattataatgagaaaaaccctaaatataaagcataaaacctaagcctaaggtctagctacttacattgtactatatgcataatcatttttgcacctccatattttttttttttttcgccaaaacgaatattgttattcctagtgggcagtacagtatctcaaggcgaatcaaacgtatatatctaatcttagctgctgtgcttaagttctatttcggttttgtattttaatcacttatactctctattttttgacatttttttttgtgacttggcttgaatttatttagtactggaattaatttaattgattggttaagcattttttattgttatttgtttttatatacgcggctcaaacaatattacttttaataatataaatacacgaatacatacaacacatctatgaatgaaaaagcgaacgaatgaaacaataaatacatatatataatttaaaacaaaagagagaatgctttagtcgagttccccgataattatataaccgtgtctcagctagtgtgaatgcgagcgcgaaattttattatttttctgggatatcgataggaattggaaaataaaataagaaaaattgatcaaaagtgtgggcgtggcagttttaggcggcttgtgggcggtagagtgggcgtggcatcgtgggccccatgttttcctttgccgttggcggtgtggtaagtttttcttaattttgtaaatcaatttttatacctaaaatttccagccaccgcgctaaccaactcggtgtggctaaggaattttggtcggaacgtatcgacgtattgtatacttgacatggtcggagaccaatacattttcaacgaatctagtatacctttttactctacgagtaacgtgtttactcccttcatattctatttgttgcttttgttggagtccagacccattgataccgctggcgcccatcatttgaatcatcgagtacagaatatccaggaagtctgtctattggcaatagaattaagatttttgaacatataacatccttttttatgggtatagaacataaggttgaaggtggttaaagtcaaataagtcagttagtaataatgagcacatcgatttccaaagctctgtatgtgtcacattcgtttaaaagtttgaaacagcaaaaaaaagccatgtttgtcggtccgtcggtatctcgtgatctgagacactatacaggctagaaaggtgtataagatatgttgtcacaccccgaactcccaaatcaggaagaaagcatctgctttgctcataatttcatggttttattaccaacttatgtcatgctggctatgcaggtattgatgttgggcacaaaggcgttgcagccgtcgaccaccttcttggtggcatcgacgtagcaggaagaggtgttgaagggcagggctgcgccctgcttgatcaatgtgttcatgcggcggacaagggac

SEQ ID NO: 10805 - DNA, 2528 bp, DROSOPHILA
gagctcgcccaggcaacatcgtcacccggagttgagagccgcgactttttcaagcctccaccccgacttatccggccgtccgtccatatcgcgttgaacattctgataatgtgcattgattgaacatagataacagaatgaatatgctgggctcggttaagatgcacaagaattcgcgccgaaactatttcacgctcagcttccatcggttcgatatttttcggtcgaacaagaaagccaagctgctcaatgccggcagcacaaatggtagctccatcgccgccagctcggatgactcccagtcccgatacggaggatctgtacatgctgccaatggttctgcggccaatggccacttctatggctactcggagggcaacaaaaaccaggggagcaatggcaatggcaacggcaacggcaacggaggtggcggcaactatcacagccatcccaatcagccacactacgcgactggccagccgcatcagtacacgcccagcctgtacggaggaggctcctccgccgaggatcactacgaacttacacagcagcagcagcagatttacggggaaacccatttgcccagcggacagaggacgggcggacccaatctggtcaacaagcagctggtgctgccttttgtgccgcccagttttcccaataaatcacaagacggcgtcacgcatctcatcaagccgtccgagtatctcaagagcatcagcatcgacaagcgttcgtgcccatcctccgcccgctccacggatacggaggactacatgcagatacagatcgcccagcagcagtcgcatccgcaccagcaccagcaccacccccatccgcatccacatccgcaccatccccaccagctgcatggaatgggcgagcagccgccgttgccgccaccaccgccgcctctaccccacggaatgttacccccgcagccaccgatgggtccaccgatgggtgtagcaggtggccaggacgcaaccatgtctggcaaatcacacaagcccaagaagccacacggatcggcacccaatagccaggacacggccaccaggaagcagcaccagccactctcggccatctctatccaggatctgaacagcgtacagctgcgtcgcacggacacacagaaggtaccgaagccctaccagatgccagctcgcagcctgagcatgcagtgtctgacctccagcacggaaacctatcttaagtccgacctaattgccgagctaaagatctccaaggacataccgggcatcaagaagatgaaagtggagcagcagatggctagccggatggactcggagcactacatggagatcaccaagcagttctcgggcaacaactacgtggaccagatctacttgcagataccggaaagggaccaggccggcaacgccatacccgattggaagcgccagatgatggccaagaaggcggccgagcgggccaagaaggacttcgaggagcgtatggctcaggaggcagagtcacgccgcctctcacagattccccagtggaagcgggatctactggcgcgacgcgaggagacggagaacaagctgaaggcggccatctatacgcccaaggtggaggagaacaaccgggtggcggacacctggcggctgaagaaccgcgccatgtccatcgacaacatcaacatcaatctggccggtatggagcagcactatcagcagatccagtttcagcagaagcagcagcaactccagttgggcaacaaggagaaccatgtcgatcccaagggagctgatcaggatcaggagcacggagttggcattggcagtggcgttggtaacgctaattctggcgtcattggaggtcaggagctcatcgacccatcggagggcagccagggccgcgccgaggaggaggaggataacatcatcccatggcgcgcccagctgcgcaagaccaacagccgtctcagcctgatctgatctgcatccacgtacacatacccaaaaaattaaatccatttttcaatcgactcctaagcggtgtattttttttttttttttttttgtggattaacttaaagcatgtgcaattataatgagaaaaaccctaaatataaagcataaaacctaagcctaaggtctagctacttacattgtactatatgcataatcatttttgcacctccatattttttttttttttcgccaaaacgaatattgttattcctagtgggcagtacagtatctcaaggcgaatcaaacgtatatatctaatcttagctgctgtgcttaagttctatttcggttttgtattttaatcacttatactctctattttttgacatttttttttgtgacttggcttgaatttatttagtactggaattaatttaattgattggttaagcattttttattgttatttgtttttatatacgcggctcaaacaatattacttttaataatataaatacacgaatacatacaacacatctatgaatgaaaaagcgaacgaatgaaacaataaatacatatatataattt

SEQ ID NO: 10806 - protein, 608 aa, DROSOPHILA
MNMLGSVKMHKNSRRNYFTLSFHRFDIFRSNKKAKLLNAGSTNGSSIAASSDDSQSRYGGSVHAANGSAANGHFYGYSEGNKNQGSNGNGNGNGNGGGGNYHSHPNQPHYATGQPHQYTPSLYGGGSSAEDHYELTQQQQQIYGETHLPSGQRTGGPNLVNKQLVLPFVPPSFPNKSQDGVTHLIKPSEYLKSISIDKRSCPSSARSTDTEDYMQIQIAQQQSHPHQHQHHPHPHPHPHHPHQLHGMGEQPPLPPPPPPLPHGMLPPQPPMGPPMGVAGGQDATMSGKSHKPKKPHGSAPNSQDTATRKQHQPLSAISIQDLNSVQLRRTDTQKVPKPYQMPARSLSMQCLTSSTETYLKSDLIAELKISKDIPGIKKMKVEQQMASRMDSEHYMEITKQFSGNNYVDQIYLQIPERDQAGNAIPDWKRQMMAKKAAERAKKDFEERMAQEAESRRLSQIPQWKRDLLARREETENKLKAAIYTPKVEENNRVADTWRLKNRAMSIDNININLAGMEQHYQQIQFQQKQQQLQLGNKENHVDPKGADQDQEHGVGIGSGVGNANSGVIGGQELIDPSEGSQGRAEEEEDNIIPWRAQLRKTNSRLSLI

SEQ ID NO: 10807 - DNA, 4319 bp, DROSOPHILA
tgatggctgcttcttcttcgtcttcgcctgtggaaaatgggaaaacacgcacacaacttacaattgcattacattttgcatacattttgtgtgtgcttaattttaatgcggagaaaacgccaagtttgttagtcaaaatgtgttgttaacacacttaaaaaatgcatgcgccaaaataaaaggcgctggaggagcaaaatttggggtggcgtaatcagaatttatttacatatttgtatatatgtacgtagtaagtacatgcattttccattaaacactcctgcaattttggattgccaggggccccaagtcagctggcgttgcgctcaaagctctggtaactaattacatatgtatatgtatattatttctgctttttattaatcaaagtatgacgatccgatactttccgctcatgccagtagaatttttttttgggtttgagtattatttcatcgtaatacaaaacacaattagtgcgctttctttttcaacttagccaatcaaacggcaattggatggcactcagaatagcccgctcaaagttgagtgaagttggccatttcgagtgattgtgcgctggttgtgagaggaaactgcacagtgaggcgaggctgtcatgtttgcggtttgagtccatggcattgtgagttggagccgaaaatatgttcgaggctcttagtttggctgccaacaaaaaatgtattttttttatgctacctaccattattaatattactccaactcatttatgttctttgcttgtgcttagttactttattatcattttgtgccatttgcacgtgaagtcttaattttcagctacaacccattggcacgctccgcggttgcgccacccacttctgttgaccagacaacgcggtccactgtgccagtcgtcggcagaggccgaagcagcggagacgagaaagaagaagcagcgcagcgcagcagcgactgtgacggggcagcgcagttcgttttgtgcgcgcgtagtgaacggttgtctttcggttgctcgtcggggagttgcaaattcagcgacagcagcaactacaaatggcgacttgtgcctgtcggaccctcgagttcattgttaattgttaatcgttgtggtgctaagcgttggccgaacggtttatgggtatatggtaaccctggtggcagaaagaagaacatacttgtgtccagaaggaaggaggaaaagcacattcggagagcgaaaacgagagcgtgcgcagcgacccccactcctttgtgaatcactatgccaacgtgaatgactcactgcgacagtcgtggaagaagaccaagccggtgcgaaactactccagctacaccgattcggagccggagggcagtgcagtgatgagcctcaatggtggccagattatcgtcaataatatggccaggtcgagggcaccactgcccggcttctcgtcattcgtctgacaatcaactgagttctaagatctaagcaccagtagcaacggcaccgtcatccgcgagaccttcgtctaggctgagaacgaggagggtccgaagaaggaacccggagctggggggttggctggggccactcgaacccgttggaggacgacacacacacccacatatcagacaggccctcctgccctcagcccctccaccttcacgacgatacgctgctacagggatatacatattacttaataccagacattcagtaagattatcttgtatgcatttagtttgagttcttaattatgtgctttttacgttgggttgtgcacttccgcgtcttaacgttatccttttaactaaaaatgtttgtatgcccagtacttcccatactcgtaaaacgtataaatttgaccaacaggcattaattgaagtaatatttttaaatatgcataacctagtgtaaggagcacattattttcagcgtcagtttcccagcatgactctgctcctattttatagtatttatttttggatgtacagtgtgagtgcgatgctgcctgccacgcctccagatgtggcatttatggaatagggcgcgacaaatcgaatccgaatcctgtgataaaacgatttccttgtgccctaataagtttttccaatgatttccaagtgtgttcagcgcgtggcaggtagtctggtcttttaagtgactgtgagtgtgagtgacgtacgcgcttcgtctgcgcaatctcattatatataaaatgacaaaaggttatgttttatgtttagttttttgtgcgagtaaatctagaaaatctacaagtacgaagacaaggacaaaacaccgatgcaatcggtggcctaataagaaatgaagaaaacgagttcatgaaacacgcgaaagaaatcatacgcagtaaacgaaagtctttctcttataagaaaggataagtgtatttttttggaaaggcatcgaagaaaggctatagccatgagcatgagaagaatatctaagaaagatggcttaggtaatattgataggccatattattgcaatttccctaccacataagttcacaaacgcaagcaaaagtaacacaaagcaaacaaacaaacaaacgagcaaacatgcaagcattcaaaagctgcatagcacacaaacaatcgaagaatcgattcgttcagagcgcatgcgtagcagatttagcattaagtacgatcttctagaggtaagatgcattttttttttgttagttgggggccagtctctacggggagactttgccctgatactctagatcgtaattttcgattgtttaatccccgaagcttagagataattgtactcgtgtttgtatttgaatgcggtttatatttatgactatatttatatatcgatgtatacatgtatatctaaaaacttaaacgactgattatatattttcccctgattagttgtatacttaactccttttttgtaatacctatgcattaactatgctaagaccactttggcactttggcgaccgttgaaatgaaaacggagtggataactttctgcgttttccccaaatcgcaagctaatttcaacttcaaagactcaaagcacaagttcatctagttaagtaaatgtatttgtaattgttgaattgatgattaaaggatagttctccactaattgaggaggcacgtttgatgtggaggaactatggagatgaaaaaggtggagcttagggatcttcgctcgttgctagttgaaattcgtgcaacaagcgcaaagtattaaaatattgataaatacaatttaaatgtgtaaatgtaattgatcgagcatccgaatatgaatcaataaaagaacatgaaatcaatggaatcccattatcggcattttttttgtaataccgtactctaattaagattacttactttcttgcaggctctcggtatttatggctacttttatttaataatttctttattattatatttattaaatattgaaaaaaaattctttcagcagacgcttacttttatatgctggagtatccctgaattgacattcttactaaatattatatttaatcgttctttcatttgtttttaatatttgttttaagatctctagggcacccctttagtgacaagtcagtcgtggattggctttataccagaaaggctgttgctgcaccatccaattgaactagacaggactgtctgaagttatatcctgtctttctgtctgggccttgatggcaatgccttccagactgtgactctggctctggccctgatcctgttcctgcccctgcccctgttcctcatcctcgtcctcttcctctccctcgttatctgtctcgccatcaacttccgcttccaattcctgtccctcgatgtgacgagccgccggctgggacacgaacgatgtggaggaagtggacagctgcgaaggcaatgtggccgctgtcgaggatgagacgaaactgggcatactgaccgggcacatgcagggaacaaattgaatgcgactgttactggagaccccttgctccgatactacggtctgctgctgcggctgatagttgaagtaatccggatatggatactgaggcctggcgttatagaggttgtttacccggcgattgtacgcgggatattcaccaaagcgcagcaagctagaagtgggtccttcggagaaactactactggtggactggggcggaggtggtactggtggtggggttgtactggtggtagtagtactaggtcttgttgttggtgccggagtggtggttgtggtggtggtagttgttgtcgttggcgcgggagtggtgctggttgtccgagagctactcggcgcgttgctcaagtccgtc

SEQ ID NO: 10808 - DNA, 8882 bp, DROSOPHILA
cggttgtctttcggttgctcgtcggggagttgcaaattcagcgacagcagcaactacaaatggcgacttgtgcctgtcggaccctcgagttcattgttaattgttaatcgttgtggtgctaagcgttggccgaacggtttatgggtatatggtaaccctggtggcagaaagaagaacatacttgtgtccagaaggaaggaggaaaagcaattttatattttagccaaaaaagatgtgagcgatgtgtaattaaaactagacttttcactaaaaactagaagagcgaaggaaggccgctaagaaaacaaagcgaaatcccagaaatacgaataccgaaaggcaacaacaaatgctcaaatctgcggcgtcgtcgctgcgtcgacgtcgtccaaaaacaacaataacagcaacattagccatcgagatgccgtcgcagccgaagttggcgtctctgcttgcagtgctggttttgctctgctactgcgacagctgctttttttatgccaatctacagcagcagaattcaatcgttcaacagcagcaacttcaggctcctcggtttaccacacatccatcgtcatcgggatcgattgtcagcgagggcagcaccaagatacttcagtgtcatgcgctgggatacccgcaacccacatatcgatggctaaaggacggcgtccccgtgggcgacttctcatccagccagttctaccgattccacagcacccggcgcgaggatgcgggcagctatcagtgcatcgccagaaatgatgccggatccatattcagcgaaaagagcgacgtcgtcgtggcctacatgggcatctttgagaacaccacagagggtcgtctgacggtgatcagtggtcaccctgcgatattcgatatgccccccattgaatccatacccgtgccgtcggttatgtggcaatcggaggatggacctctgaattacgacatcaagtacgccttcacccacgccaaccagttaattattttaagtgctgacgaaaacgatcgcaagggataccgggctaaggccattaacacgcagttgggcaaagaggagagcagcgcctttgtgcacctgaacgtcagtggagatccgtacatcgaggtggcgcccgaaatcatagtgcgcccgcaggacgttaaggtcaaagttggtaccggagtggttgagctgcagtgcattgcgaatgccaggcccttgcacgaactggagacgctttggctgaaagacggtctcgccgtagaaactgccggagtgaggcacactctcaacgatccatggaatcgaacgttggccctgctgcaggcgaacagctcacattccggggaatacacctgccaggtgcgattgcgcagtggtggctacccagccgtcagtgcttcggctcgcctccaaatcctcgagccgccgctcttttttacacccatgcgggcggaaacctttggcgaattcggaggacaggtgcagctaacctgcgatgtggtcggcgaacccacgccccaggtcaagtggttcaggaacgcagaatcggtggatgcacacattgagagtggaagatacacgttgaacacggataatacgctggtaattaagaaactaatcctggatgatgctgccatgtttcagtgtttggccatcaacgaagcgggggagaattcggcgagcacctggctgcgcgtaaaaacatcggctccaattatggagctgccgccccaaaatgtgaccgccttggatggcaaggacgcaactatttcctgccgggcagttggatcgcccaatcccaacataacctggatatacaatgagacacaactggtagatatatccagccgggtgcagatacttgagtcgggtgacctgctcatctcgaacatccgatctgtggacgccggcctgtatatctgcgtacgagccaacgaggcgggcagcgtcaagggcgaggcctatttgagtgttttggtgcggacgcaaatcatccaaccgcctgtggacacaacggtgctacttggcttaacggccaccctgcagtgcaaggtgtccagtgatcccagtgtcccgtacaacatcgactggtatcgcgagggtcagtcgtcgacgcccatcagtaattcgcagcgcattggtgtccaggcggacggtcagctagagatccaagcggtgcgggcgagcgacgtcgggagttatgcctgtgtggtcacttctcccgggggaaatgagacgcgagccgcccgcctcagtgtcatcgaactcccgttcccacccagcaatgtgaaggtggaacgactgccggaaccgcaacagcgcagcatcaacgtgtcctggactccgggattcgatggcaacagtccaatatccaaatttattatccagcgacgtgaggtctcagaattggaaaaattcgtaggtccagttccagaccctctgctcaactggattaccgagctgagcaatgtctcggcggaccaacgttggatcctgctcgaaaatctcaaggcggccaccgtttatcagtttagggttagtgctgtcaatcgggtgggcgagggttcgccatcggaacccagtaacgtcgtcgagctgccccaggaagctccttcgggtccaccggtgggatttgttggatccgcccgctcgatgtcagagatcatcacgcaatggcagccaccgttggaggagcatcgcaatggccagatcctgggatacattctgcggtaccgcctattcggttacaacaatgtgccttggtcctaccagaatattacaaacgaagcgcagcgcaacttcctgattcaagaactgatcacctggaaggattacatcgtgcagatcgcagcatacaacaacatgggcgtgggtgtctacaccgagggctccaaaattaaaaccaaggaaggagttccagaagcaccccccacaaatgtaaaagtagaagctataaactcgacggcagccaggtgccggtggactccacccaatccgcagcagattaacggcatcaaccagggctataagatccaggcatggcaacgtcggttgatagatggcgagtggagggacattgagcgacgaatgaagacagtgccacctagtctgattgatccactggcggaacagacagctatcctcggaggacttgaaaaatttaccgagtacaatattagtgtgctctgcttcacggaccctggcgatggtgtggccagtagtcaagtggcagttatgaccatggatgacgtacccgacgaggtgactggattgcatttcgatgacgtctccgatagatccgtaaaagttctatgggcgccaccgcgcgcttcgaacggtatcctaacgggctatacggttcgctaccaagtcaaggatcgtccagataccctgaaatcctttaatctgacagcggatgatacagagttgacagtgaaccaattgcaggctaccacgcactattggtttgagatcgtcgcgtggacgcgtgtgggcagtggaattccgaaaacagccaccattcagtctggcgtagagccagttctgccgcacgcacccactgctctggcattatccaatatcgaagccttctctgttgttctgcagttcactccgggctttgatggcaactccagcattaccaaatggaaagtggagggacaaacggccagaaatatgacatggtttaccatttgcgagattaatgatcccgatgcagagaccttgaccgtcactggcttggtgccgtttacccagtacagactgagattgagtgctagtaatgtggttggtagctcgaagccctcggaggcaaccaaggatttccagacgatccaagccaggcccaaacatccaccgtttaacgtaaccgtgcgggcaatgagtgctcaacaactgcgtgttcgctggattccactgcaacaaactgaatggtatggaaatcccaggggctataatatatcctacaagcagctggtcaaaactcccgggaccattaaatacgtaccccggtcggtggtaatcgaagatcacaccgccaactcccacgtgttagatagcctggaggagtggacactgtatgaggtgaaaatgaatgcctgcaacgatgtgggatgttctaaagagagtgacactgccgtggagagaactcgcgaagctgttcctagctatggacccctggatgtccaggctaatgccacatcatccaccacagtggttgtgcaatggggtgaggtgccccgacaacacagaaatggtcagatagatggctacaaggtgttctatgccgctgcagatcggggacaacaggtgctgcacaagacgatacccaataacgccacatttaccacaaccttgacggaactgaaaaaatatgtggtttaccatgttcaggttctggcctacaccagattgggtaatggtgctctaagcaccccacccattcgagttcagacctttgaggatacccctggagtgccatcgaacgttagttttccggatgtctccttgaccatggctcgcataatttgggatgtgcctgtggatcctaatggcaagatcttggcttatcaggtcacgtacacattaaatggtagtgccatgctgaactacagccgagagtttccgccttccgatcgcacattccgggcgacggaattacttcccggaaagtattacagctttagttgtacggctcaaacgcgactgggatggggaaaaatagctactgctctcgtgtacactacaaacaacagggagagacctcaggcaccttcggttccgcaaatatcacgcagtcagattcaggcccatcaaatcaccttcagttggacaccaggaagagatggctttgcgccacttcgctactacacagtggaaatgcgtgaaaacgagggcaggtggcaaccacttccagagagggtggatccatctcttagttcctttacagcagttggtctgagaccctatatgacatatcaattccgcatacaggccaccaatgacttgggaccatccgcctttagtcgggaaagtgtgatcgtgagaactttacccgctgctccggcagtgggagttggaggtctcaaggtagttcccataaccacaacttcggtgagggtgcaatggagtgctctggagactgcattgtggaatggtgatgcctcaactggtggctacaggattttatatcaacaactttccgatttccccaccgccctgcagtctacacccaaaacggatgtgcacggcatcaatgagaacagtgtggttctgtcggatcttcaacaggatcgcaactatgaaattgtggtgctaccatttaattcccagggccctgggccagccacacccccagcagcggtctatgtgggcgaagcggtgccgactggggaaccgagagccgtagatgcagcacccatttccagcacagaagtgcgattactgtggaagccaccaaagcagagcatgcagaatggagatattttaggatataagatctactacctggttacttattcaccgcaagcgttggaaccaggtcgcaaatgggaggaggaaatcgaggttgtttcggccacggcaacttcgcacagtctcgtgttccttgataagttcaccgagtatcgcatccaactgctggccttcaatccggcgggagatggaccacgatccgccccaattaccgtgaaaacactgccaggagtaccaagtgctccacttcaccttagattttcagatatcactatgcagagtttggaggttacctgggatccaccaaagttcctcaacggtgaaatcttggggtacttagtcacgtacgaaaccaccgaggagaatgaaaagttcagcaagcaagtgaaacaaaaggtatctaatacaacactgcgtgttcaaaatctcgaggaagaggtcacctacacattcactgtccgtgctcaaacgtccgtcgattacggcccgggtataagtgagaatgtgacgacaggaccccaagatggatccccagttgcgccgcgtgatctcatcctgaccaagacgctatccagcgtggaaatgcattggataaatggtccttctgggcggggacccattttgggctatcttatcgaggcaaagaagcgagacgactcacgctggacaaaaatcgagcagaccagaaagggcatgatgcaggattttacggtcagctatcacatactgatgccctccactgcgtacacttttcgtgtgattgcctataaccgttacggcatttcgtttcccgtgtactccaaggactcgatcctgacaccctccaaactccatctggaatatggttacctgcagcacaagcccttttatcggcaaacctggtttatggtttcgctggcggcgacttcgattgtgatcatcgtgatggttattgctgtgttgtgtgtcaagagcaagagctataaatataaacaagaggcacaaaagactctagaggaatctatggccatgtcaattgacgagcgacaagagttggctctggagttgtatcgctctcgtcacggagttggaactggtaccttgaacagtgtaggcactctgcgaagcggtaccttggggactctgggcagaaagtctaccagtcgaccgccgccgggtgtccatctcggcaagagtccgccacgcccatcgcccgcttcggtggcgtatcacagcgacgaggagagcttgaagtgctacgacgaaaatccagacgacagcagcgtgaccgagaagccctcggaggtcagcagctcggaggcatcgcagcattcggagagcgaaaacgagagcgtgcgcagcgacccccactcctttgtgaatcactatgccaacgtgaatgactcactgcgacagtcgtggaagaagaccaagccggtgcgaaactactccagctacaccgattcggagccggagggcagtgcagtgatgagcctcaatggtggccagattatcgtcaataatatggccaggtcgagggcaccactgcccggcttctcgtcattcgtctgacaatcaactgagttctaagatctaagcaccagtagcaacggcaccgtcatccgcgagaccttcgtctaggctgagaacgaggagggtccgaagaaggaacccggagctggggggttggctggggccactcgaacccgttggaggacgacacacacacccacatatcagacaggccctcctgccctcagcccctccaccttcacgacgatacgctgctacagggatatacatattacttaataccagacattcagtaagattatcttgtatgcatttagtttgagttcttaattatgtgctttttacgttgggttgtgcacttccgcgtcttaacgttatccttttaactaaaaatgtttgtatgcccagtacttcccatactcgtaaaacgtataaatttgaccaacaggcattaattgaagtaatatttttaaatatgcataacctagtgtaaggagcacattattttcagcgtcagtttcccagcatgactctgctcctattttatagtatttatttttggatgtacagtgtgagtgcgatgctgcctgccacgcctccagatgtggcatttatggaatagggcgcgacaaatcgaatccgaatcctgtgataaaacgatttccttgtgccctaataagtttttccaatgatttccaagtgtgttcagcgcgtggcaggtagtctggtcttttaagtgactgtgagtgtgagtgacgtacgcgcttcgtctgcgcaatctcattatatataaaatgacaaaaggttatgttttatgtttagttttttgtgcgagtaaatctagaaaatctacaagtacgaagacaaggacaaaacaccgatgcaatcggtggcctaataagaaatgaagaaaacgagttcatgaaacacgcgaaagaaatcatacgcagtaaacgaaagtctttctcttataagaaaggataagtgtatttttttggaaaggcatcgaagaaaggctatagccatgagcatgagaagaatatctaagaaagatggcttaggtaatattgataggccatattattgcaatttccctaccacataagttcacaaacgcaagcaaaagtaacacaaagcaaacaaacaaacaaacgagcaaacatgcaagcattcaaaagctgcatagcacacaaacaatcgaagaatcgattcgttcagagcgcatgcgtagcagatttagcattaagtacgatcttctagaggtaagatgcattttttttttgttagttgggggccagtctctacggggagactttgccctgatactctagatcgtaattttcgattgtttaatccccgaagcttagagataattgtactcgtgtttgtatttgaatgcggtttatatttatgactatatttatatatcgatgtatacatgtatatctaaaaacttaaacgactgattatatattttcccctgattagttgtatacttaactccttttttgtaatacctatgcattaactatgctaagaccactttggcactttggcgaccgttgaaatgaaaacggagtggataactttctgcgttttccccaaatcgcaagctaatttcaacttcaaagactcaaagcacaagttcatctagttaagtaaatgtatttgtaattgttgaattgatgattaaaggatagttctccactaattgaggaggcacgtttgatgtggaggaactatggagatgaaaaaggtggagcttagggatcttcgctcgttgctagttgaaattcgtgcaacaagcgcaaagtattaaaatattgataaatacaatttaaatgtgtaaatgtaattgatcgagcatccgaatatgaatcaataaaagaacatgaaatcaatggaa

SEQ ID NO: 10809 - protein, 2221 aa, DROSOPHILA
MLKSAASSLRRRRPKTTITATLAIEMPSQPKLASLLAVLVLLCYCDSCFFYANLQQQNSIVQQQQLQAPRFTTHPSSSGSIVSEGSTKILQCHALGYPQPTYRWLKDGVPVGDFSSSQFYRFHSTRREDAGSYQCIARNDAGSIFSEKSDVVVAYMGIFENTTEGRLTVISGHPAIFDMPPIESIPVPSVMWQSEDGPLNYDIKYAFTHANQLIILSADENDRKGYRAKAINTQLGKEESSAFVHLNVSGDPYIEVAPEIIVRPQDVKVKVGTGVVELQCIANARPLHELETLWLKDGLAVETAGVRHTLNDPWNRTLALLQANSSHSGEYTCQVRLRSGGYPAVSASARLQILEPPLFFTPMRAETFGEFGGQVQLTCDVVGEPTPQVKWFRNAESVDAHIESGRYTLNTDNTLVIKKLILDDAAMFQCLAINEAGENSASTWLRVKTSAPIMELPPQNVTALDGKDATISCRAVGSPNPNITWIYNETQLVDISSRVQILESGDLLISNIRSVDAGLYICVRANEAGSVKGEAYLSVLVRTQIIQPPVDTTVLLGLTATLQCKVSSDPSVPYNIDWYREGQSSTPISNSQRIGVQADGQLEIQAVRASDVGSYACVVTSPGGNETRAARLSVIELPFPPSNVKVERLPEPQQRSINVSWTPGFDGNSPISKFIIQRREVSELEKFVGPVPDPLLNWITELSNVSADQRWILLENLKAATVYQFRVSAVNRVGEGSPSEPSNVVELPQEAPSGPPVGFVGSARSMSEIITQWQPPLEEHRNGQILGYILRYRLFGYNNVPWSYQNITNEAQRNFLIQELITWKDYIVQIAAYNNMGVGVYTEGSKIKTKEGVPEAPPTNVKVEAINSTAARCRWTPPNPQQINGINQGYKIQAWQRRLIDGEWRDIERRMKTVPPSLIDPLAEQTAILGGLEKFTEYNISVLCFTDPGDGVASSQVAVMTMDDVPDEVTGLHFDDVSDRSVKVLWAPPRASNGILTGYTVRYQVKDRPDTLKSFNLTADDTELTVNQLQATTHYWFEIVAWTRVGSGIPKTATIQSGVEPVLPHAPTALALSNIEAFSVVLQFTPGFDGNSSITKWKVEGQTARNMTWFTICEINDPDAETLTVTGLVPFTQYRLRLSASNVVGSSKPSEATKDFQTIQARPKHPPFNVTVRAMSAQQLRVRWIPLQQTEWYGNPRGYNISYKQLVKTPGTIKYVPRSVVIEDHTANSHVLDSLEEWTLYEVKMNACNDVGCSKESDTAVERTREAVPSYGPLDVQANATSSTTVVVQWGEVPRQHRNGQIDGYKVFYAAADRGQQVLHKTIPNNATFTTTLTELKKYVVYHVQVLAYTRLGNGALSTPPIRVQTFEDTPGVPSNVSFPDVSLTMARIIWDVPVDPNGKILAYQVTYTLNGSAMLNYSREFPPSDRTFRATELLPGKYYSFSCTAQTRLGWGKIATALVYTTNNRERPQAPSVPQISRSQIQAHQITFSWTPGRDGFAPLRYYTVEMRENEGRWQPLPERVDPSLSSFTAVGLRPYMTYQFRIQATNDLGPSAFSRESVIVRTLPAAPAVGVGGLKVVPITTTSVRVQWSALETALWNGDASTGGYRILYQQLSDFPTALQSTPKTDVHGINENSVVLSDLQQDRNYEIVVLPFNSQGPGPATPPAAVYVGEAVPTGEPRAVDAAPISSTEVRLLWKPPKQSMQNGDILGYKIYYLVTYSPQALEPGRKWEEEIEVVSATATSHSLVFLDKFTEYRIQLLAFNPAGDGPRSAPITVKTLPGVPSAPLHLRFSDITMQSLEVTWDPPKFLNGEILGYLVTYETTEENEKFSKQVKQKVSNTTLRVQNLEEEVTYTFTVRAQTSVDYGPGISENVTTGPQDGSPVAPRDLILTKTLSSVEMHWINGPSGRGPILGYLIEAKKRDDSRWTKIEQTRKGMMQDFTVSYHILMPSTAYTFRVIAYNRYGISFPVYSKDSILTPSKLHLEYGYLQHKPFYRQTWFMVSLAATSIVIIVMVIAVLCVKSKSYKYKQEAQKTLEESMAMSIDERQELALELYRSRHGVGTGTLNSVGTLRSGTLGTLGRKSTSRPPPGVHLGKSPPRPSPASVAYHSDEESLKCYDENPDDSSVTEKPSEVSSSEASQHSESENESVRSDPHSFVNHYANVNDSLRQSWKKTKPVRNYSSYTDSEPEGSAVMSLNGGQIIVNNMARSRAPLPGFSSFV

SEQ ID NO: 10810 - DNA, 3388 bp, DROSOPHILA
ctcggcgctcatgcccgcctgctccatgggatgggcagcagctccgccagcctcagaggccagggccggttgtggtattgccgtgggtgcgttggcaatgcccgcctgcggtttcaacgtggccagagcttcgcgagcggcggccacctccttattgaggcgggcaatcacacgacaggcggcatcgtgctgatacagcgcatgggacaactcctggcgcgtcgtttgcagctgctggcgttgtgtgaacgagtgaatcatgagggcgtcccactcgtcctgcatcgttttcaaagtggccggaatgctggtggcacttggcggtttcggtttcaccacagccggcgtcttgatctcgatcagctcctccggcttcagctccttgccgctaatgggatcgcagccattctctaacagatacttctcaatcacccgcttttcgaaaacggctcccgagtgcggggaaaccacgggcgtctcggggacttcgtttgtcacttggaatggaaagtgcgattcataatggcccaattcaaatcaaaatctaaattattcacttacgtgcgcaaaccaaagccattgctgtttgtgattatgtcgcttttcgcgtagtcttgttggtaaattaaatgttttacacgtttttcccgagccaagcgcaaaattgtcggcaaagccgcttcttcttattatgccagttactcggcgacgcgggagtttcgagcacagggctgccagatcaaatggattttggctagaaatttgcacagaaaaaactagctagaatttaaacaatttattttattgataacacaacacattcaataagtatttaatccataacaatagtttttatagataaatgacatttactgatagagaagtgagtaacatatcttaaatcaatcagctatctcaccgttttgccaatcacagttccgcacgcacaatccataattgctggcaaccctagcacgttgtttctgttattcaattcacgatctagttttataacatagtttactgccattaaggtatatttttaaaatgctgaagcattttgcacgatggcgtctgggcagccagttgctaaagggatgtgccgcaccagtgaggcaagcctccaaaacctccagcgcagagaacctgatagccggcacagaggaaccccaaaaaaagttcgtcaatccgttttcccagcccgctcctgcgttaagtaatgatacgatatcagagaacaaggaggaacgggataagcgactcaaggtgctgcagctggaggcggacattgcccaccaggagggtcggcgggtgccgtcactggaattctttaaggatcatcattgggagcacgtgctgacgctacccacaaaatcagctaggatcaagtactttggctatctctggcaaatcgagatgaagaaggaggcggatcaacgcaagaaggcagagcgagcgaaggaagccgagcggcgggttgcggagatgcgaaaggagcgcgaggagaatacgcacattatctatggcctgggacacacatcgttgtttctgcgtatctatgataccactattaatcactggcagaacaaccgactcacacgggccatgcagtttgcccccaaaatggttttggattgctcctacgatgagcacatgaacaatcgggaggctacctatgcagcaaagcaattgatgatgtgctttgcggagaaccggatgaatgatgagcccttcgatctgcactattgcaacacccagatggacagcagatgcatgcagagcctccaacgctacatccccaccatgcacaatccagagttcccgataaatttgcatagcaagtgctttacggaactctttcccaagcagaacctggtctacctaacgccccactgccgggaggatctggtcacttacaacccagatgacatctacatcgtgggcgccatggtagacactatgaacaacgaacccctttcgctggccaaagccaaacgattgggccttcggatggcgagactgcccctggatcgctacctacagtggggttccggttcgggaaagtcgctaactctaaaccagatgatcaacattatgctggacctcaagaaaaccggcgactgggatacggccttgaagcatgtgccccgtcggaaggtcgtgcaaaacgaattccagccgcgcagggagaaagatcattggagcacaggcacgcgggccaggaagcttaatatgcgaatcgatcatctgtttgattttgacgagaatcgccggcaggctacctcctatgcaactccgcagaatgtaaggcagcgacgggagggcttggagttccaactggacacttgggcaacggggaagcaaaagaaaaagcagagacaaaattaaagttactcgttgtattcattaagatgcatatttcattttattcggattcggatttcttattcatgggaagttagtttttggttgtaggggaccttctgcctccacttccttcttaatggctgccacagtctgattcgatgagggaatctcttcaattactagaccagtatactcttcagcaggttcaccataatctgtgtctgtgtcatatttgaaagtactttctggcatggcttctgtcacggcttcatcttcttgttcatctttatcggtctttttgtattttagccacatgttcttgccgttgatggcctggtagttgatggccgccttaaggccagcatccttcatcagttctttagctttggattcgtactcctgcacacgatctttgcgctccaccgtcatcagcttggtttccagaataaaaagtgattgcgcacgcatcgcctggaagaagtccttgctcaagaaagagtaatagttataggccataaagacgatatcaaacatattgttccaatgagctgcaccctttttcagctgctccatctccatgggcgacacaaagtgcactgttactccgggcacgtggatccatggcttatcgtaagccgcttgcccagcagcgtcctcttcctggtggttcaacaagggcgtcatcagcagctgaacagagccataccgtcgggaacgagtggtatcatgctcgtaggctgtctgggtcagcaattcatggaagaattccatgagattgcgttctgttatatcggtagcacgataatcattatcaccgtgcacagaatgatgcattcgctcctccacggtgcgcagcccgaagccacaaaacggtccagtctggatatcacccacatagccacggtggatgaagttgcgtccattgcgcaccaatccaacggccagtgtcttgttcggcttgcaatgctcatattccggaaaaacgaaagccacgccggtctcgcgccaatagcggtactcc

SEQ ID NO: 10811 - DNA, 1388 bp, DROSOPHILA
atctagttttataacatagtttactgccattaaggtatatttttaaaatgctgaagcattttgcacgatggcgtctgggcagccagttgctaaagggatgtgccgcaccagtgaggcaagcctccaaaacctccagcgcagagaacctgatagccggcacagaggaaccccaaaaaaagttcgtcaatccgttttcccagcccgctcctgcgttaagtaatgatacgatatcagagaacaaggaggaacgggataagcgactcaaggtgctgcagctggaggcggacattgcccaccaggagggtcggcgggtgccgtcactggaattctttaaggatcatcattgggagcacgtgctgacgctacccacaaaatcagctaggatcaagtactttggctatctctggcaaatcgagatgaagaaggaggcggatcaacgcaagaaggcagagcgagcgaaggaagccgagcggcgggttgcggagatgcgaaaggagcgcgaggagaatacgcacattatctatggcctgggacacacatcgttgtttctgcgtatctatgataccactattaatcactggcagaacaaccgactcacacgggccatgcagtttgcccccaaaatggttttggattgctcctacgatgagcacatgaacaatcgggaggctacctatgcagcaaagcaattgatgatgtgctttgcggagaaccggatgaatgatgagcccttcgatctgcactattgcaacacccagatggacagcagatgcatgcagagcctccaacgctacatccccaccatgcacaatccagagttcccgataaatttgcatagcaagtgctttacggaactctttcccaagcagaacctggtctacctaacgccccactgccgggaggatctggtcacttacaacccagatgacatctacatcgtgggcgccatggtagacactatgaacaacgaacccctttcgctggccaaagccaaacgattgggccttcggatggcgagactgcccctggatcgctacctacagtggggttccggttcgggaaagtcgctaactctaaaccagatgatcaacattatgctggacctcaagaaaaccggcgactgggatacggccttgaagcatgtgccccgtcggaaggtcgtgcaaaacgaattccagccgcgcagggagaaagatcattggagcacaggcacgcgggccaggaagcttaatatgcgaatcgatcatctgtttgattttgacgagaatcgccggcaggctacctcctatgcaactccgcagaatgtaaggcagcgacgggagggcttggagttccaactggacacttgggcaacggggaagcaaaagaaaaagcagagacaaaattaa

SEQ ID NO: 10812 - protein, 446 aa, DROSOPHILA
MLKHFARWRLGSQLLKGCAAPVRQASKTSSAENLIAGTEEPQKKFVNPFSQPAPALSNDTISENKEERDKRLKVLQLEADIAHQEGRRVPSLEFFKDHHWEHVLTLPTKSARIKYFGYLWQIEMKKEADQRKKAERAKEAERRVAEMRKEREENTHIIYGLGHTSLFLRIYDTTINHWQNNRLTRAMQFAPKMVLDCSYDEHMNNREATYAAKQLMMCFAENRMNDEPFDLHYCNTQMDSRCMQSLQRYIPTMHNPEFPINLHSKCFTELFPKQNLVYLTPHCREDLVTYNPDDIYIVGAMVDTMNNEPLSLAKAKRLGLRMARLPLDRYLQWGSGSGKSLTLNQMINIMLDLKKTGDWDTALKHVPRRKVVQNEFQPRREKDHWSTGTRARKLNMRIDHLFDFDENRRQATSYATPQNVRQRREGLEFQLDTWATGKQKKKQRQN

SEQ ID NO: 10813 - DNA, 3038 bp, DROSOPHILA
cgacctgtaccatccaacagccaaccctactaagctggggttttaaactagagcagaacaaacccaccaccaagatgaggctcaacagcaggaagattggccaacggacaacaaaggccgtgaaagcagtttatgcaaatgggctcacatgtgggctggaaaatgcatactttgcatatgaggaagggcgacccttttgggctggcacaattaacaaagcgtgtaatttctcaaacctatcgcgtgaacaatggcacaaacaattagaggataatgaaaatcacccacataagcaggtccactacagttctcaccggatgggtttggtgcatatgtatatgatcatatgggcaaatctgtggatcagttcgaaaatacacgaaggggaacaatcataaccggagcacaatggccgtcgtcaagtacgcacatcctttataaaggtccgttcacattgtcctggcattgtttacaactctattgagtgcaaaatgcagcggcattgttaacggctagatatttgcatacttgtcttgtcttccaagacaaaccacaaaatcaaattcaaataattacgcgccatttaacgagggagttgcgaagctcgacgaagtactttccatatgcccgcttttccattagggtatgttctatgtactgtatttttaataagaaatgtagtacattttacagtctaaccagcaaaatttctaaattgtttaataagattaagggcgagtgtggaatataaaaataatatccttttttataattctcattcaatgtattgtttttctagaaaaaatgttcattaatatttatttattattataaacatttaatttttatcaggactgtgaacagaacaaaaataaaagcgaaaattatatcgtgtagataagccctttggggagtgacaggtgaatagctagctcggcagccctggtagtggttgtcattttgacttttgcgccattcggataaaacagatttgcaagtgaaacatttaacgataataagcataagaatgagctctcttgttgataccagtcactcggatatcgatgacaatgactccttccactcgttcgaccaaagcgaagatatcatggacaaccttagcctctcgctctcggagagcgactgcgacagcgccgcggactttgattccggctcggcggatgagatttccatggaaaaaaaaatggcaagtagaatagatttttatgtggcccatagtgtaagataatttcccgtaggttggtgcacccgcccagctgggccagggcgcaggaaatactttgaagcccacgccttccgacgtcttcgtaaagccaaagtcgcccgttttggaggtccattccagcgactcatccacctgcgatggcgtctccgctggcaagcccacacaggttgcgggctgtttcaagtctcccaagaagtttaccgtttcgccgatcagtgagcagaagcagagaccagtgcccttgtgtcccagagatgttccgggactttcctcgagccagataccatgcataaaacactttgaccttgaccactcagtaacagtccgaaaagagcacctgatctccaatcccgaaacggaggccttacaaaaacacgccttcaccgaaatttggatcgattcgcagcagaaaccttgccaggccaaggtttctcgcttgcagcagttttctatggccctggaggcctattttgaccaggattctgacaagaaggatccggagccagcaaaagtatgtttaaagtttaaattaaattattttctttaaacgatatctttcagaccatcacgcctgctccgaaaagtgacaaacccgtggagaaggtggtgtatgtgtctccctttccggacattcccataccaccatcagctcgaaaagaaactcgcatgttgagcggagttaagccacccaatatagtgccagctggctttgatttgacccgattgattgagtacaataatcccaatcactggcaccgtcgtccccacatgcgcactggcgatagcatataaacttgattagcacaacatcttgatcaacattgttattttcgtaatcaccacactcaactgaccgattggacgttctttttgtaaaactgatatctttctgcaataaaggattccgaactaccaaagcaattagagcgccaaacatatgcgactgtcaaactccggcaaagacataatatcgccagcgttgaatgggaacgtcgtcgccggctccaaatgatttcattgtgctgccgataaaattgtcgccagcgaaatatgttgcccgtgactttgattttggccgccgcaacattaatttccaaggaaattacacatgcccgctgaaggggatggcttggcttatctgcgctggcagatcgccgagtgagcccgggtcggagctcatttgccgctgacatgcgaacgtttgctttgctccggccccaaacatggactctctcttctcggctccagccagcggatgcccccaaatgagaattcaataaatttcaggtaaaggtaagggcaacaacaacagcagcaggcaacaacacaatgggccaaacgttgtcgttagtcttttggcgacgtttaacatgaatatgcagtgtggctaatgtggagcccataaacacttccagcggcaacatgaatgggccaaaaaacaggttgcagctacgtgtgtgggtatcgatgggcattgtggtccttgctcttaacaattgtttgttaacgcgaattgaagcaaatgccaccgtcgaagattgcctgttttggccaatcatctagccggctctctttggggccaacacttgcgactggcggactggtccatcaaaggagccgcctcgtttccgctcgataacatggagatgtgtgatgggacacccggacaattgcatgtatgtatgtatgtaaatggccacagtttcgctaacaactacaatgtgaaaacatcaattacacggctgcagtgggtagtgggtcctggggattggagattgtggattgggtattt

SEQ ID NO: 10814 - DNA, 937 bp, DROSOPHILA
aaacatttaacgataataagcataagaatgagctctcttgttgataccagtcactcggatatcgatgacaatgactccttccactcgttcgaccaaagcgaagatatcatggacaaccttagcctctcgctctcggagagcgactgcgacagcgccgcggactttgattccggctcggcggatgagatttccatggaaaaaaaaatgggttggtgcacccgcccagctgggccagggcgcaggaaatactttgaagcccacgccttccgacgtcttcgtaaagccaaagtcgcccgttttggaggtccattccagcgactcatccacctgcgatggcgtctccgctggcaagcccacacaggttgcgggctgtttcaagtctcccaagaagtttaccgtttcgccgatcagtgagcagaagcagagaccagtgcccttgtgtcccagagatgttccgggactttcctcgagccagataccatgcataaaacactttgaccttgaccactcagtaacagtccgaaaagagcacctgatctccaatcccgaaacggaggccttacaaaaacacgccttcaccgaaatttggatcgattcgcagcagaaaccttgccaggccaaggtttctcgcttgcagcagttttctatggccctggaggcctattttgaccaggattctgacaagaaggatccggagccagcaaaaaccatcacgcctgctccgaaaagtgacaaacccgtggagaaggtggtgtatgtgtctccctttccggacattcccataccaccatcagctcgaaaagaaactcgcatgttgagcggagttaagccacccaatatagtgccagctggctttgatttgacccgattgattgagtacaataatcccaatcactggcaccgtcgtccccacatgcgcactggcgatagcatataa

SEQ ID NO: 10815 - protein, 128 aa, DROSOPHILA
MSSLVDTSHSDIDDNDSFHSFDQSEDIMDNLSLSLSESDCDSAADFDSGSADEISMEKKMGWCTRPAGPGRRKYFEAHAFRRLRKAKVARFGGPFQRLIHLRWRLRWQAHTGCGLFQVSQEVYRFADQ

SEQ ID NO: 10816 - DNA, 3877 bp, DROSOPHILA
ttcgccgcacgttcttgtcatcgagaacctgattaggggcggaaatcatggagttactgtcttatgcaagatgacgaagcttacctgaacctcgaaggtgaagtacttcttcatgttcttgatgatcatcaccaggaagggcagcttgatgcccagcgtcttcttcggatctgccggacatgttatgaacgtggtgctgacattggtgccgactatttccaacacgaggctttgtatgtcgttgtcggtgatccgcttgatgtgtccattgcgcaccttcttatcccacagctgcagtggctttgagccaatactgtacagaattgataggaatcccgattggaaagtgtttttgaacatttcgcgactgctgtgcagtgaccggttcgccccacggagagtatagtctcttcgaaatttatatagggccagttaaggttggccgtaaatttttcgcacagccgaaactcgtacaaactacgaacatcaatgcggaacttgattattttctcatgtcaatgagtttgtttagcacggcatcctgttgttgccataacaataagcgagcagggttgccacgtttccaaatgcttgaacatgctcgcatgtttatgtggggtgcgaaattgcgaagttgaaggcctgtctcgcttatggaacggtgaaaaagaaacagcttaaaaaataaataataacatgcgttaatttggaattggctagacaaaaaacatctattattgttaaaaatttttatttatgaattaataacttttaatcaagttaaaatggtgcttattattaacagcatggaaacttaaaatatagaacattaattgtgaaagtaaaacagattgctaaaatgctaaaggtggttaagttattattaacagcaagaaaacttaaaatacagaaaaataattattaaagttgactttcccatattccgatttctgtgaagcaaaaacctaagcagctatcgagttatcgggcaaagtcacatcaccagttgatgtgagtattaaaaaaatatatagcttacagagtacaaatggcatcgacatcgaggtaaaagtcgggtttcctaacaatttgtgaacaccaataatggcttactgcttgcagactggacaacaacaaggtgtgctgctacgcacaccccgaatctccgctcatcgaggactacagggctggcgatatgatttgctccgagtgtggtctggtggttggggaccgcgtaattgatgtgggctccgagtggcgtacctttagcaacgagaagagcggcgtggatcccagtcgtgtcggtggaccggagaatccgctgctcagtggcggcgacttgtccaccataattggtccgggcacaggatccgcatcctttgacgcctttggagcacccaagtaccaaaacagacgcaccatgagcagctcggatcgctccctcatatcagcctttaaggagatatcctcgatggccgatcgcattaacttgcccaaaaccattgtcgatcgggccaacaacttgttcaaacaggtgaaattcgagttcgcggttgatttggttgagacctcatgccgttttcttgtaggttcatgatggaaagaacctcaagggtcgttccaacgatgccaaggcatccgcttgtctgtatatagcttgtcgccaagaaggagttcctcgcacattcaaggaaatatgtgctgtcagcaagatcagcaaaaaagagattggccgttgctttaagctaacattgaaggctctcgagacaagtgtggatctcataaccactgcggacttcatgtgccgcttctgcgccaacttgggtaagtgtttttacactttctgtacttgaaggtagcaggattaatacctataattcttatcagacctgccgaacatggtccaacgcgctgccacgcacattgcaaagaaagccgtcgagatggatattgtaccgggacgttcgccaatttctgtggccgcagccgcaatctatatggcctcacaagcatccgagcataagagaagccagaaggaaatcggtgatatagccggtgtggccgacgtcaccatcagacagtcctacaaacttatgtatccgcacgcagctaagcttttccccgaggactttaagtttaccactcccattgatcagttaccacagatgtaattcttttcgtagatccgatgctcaatactaacgctaacgttaagtgaaggaaaattcctaatttaatcacaaattacgattttattaaataaagttagcataactaatattcaaatagaactgttggaccaatcagaacataattaaatcattgttaaattaattatctgagttaaaccctttcagtttttgaactttattccaatgattcgtaatactttgcttgcttgatttatttttacattttttgtgtatctttggtataatataagctaataaccagaaacaaaaattgcacactacgtttatttgccagttatttgcgaaaataagtttaacaaaccacgtactctgtttatacataagctttaagtaattagtaataatataaatggataaaaaattcgcaaataagacgaccaatctgtaactttcaacattatcaattgcaaataaagcggggcgtttaaacgtagtaaatggctaaattcatttagagagccaagcagggcagcaaactaataattccaaagcataatacatgtgctaatagttaatagttaatgacgaattatatcagtcgccaacaatagttattgctgagtttaaacagtgtatatattagataactagtcaatagaaagcgagcacttttcgtcatcactgtggcccacgcactccagcgccggtcgatgctcggagtcccacattcccggaccgcaacgcttgcacaggccactcagggtgcacggaatcttcggcaactggcggtactggtggagcaggccgcgcgcctttcgcaagatcagttggccgtccatgtacatggccagcgaactgaagtgcagcagcatctcgtccgggcgtagattctgtgccaccacatcgtccgcatagacagcgatgatggccaggcagaggaacagatgaaagtagtctgtcaagtagtttgaccagcacgcctcccacatccgtatgaccaccgcttcggtgaattcgcgcttaaagcacaatagcagccaacgatggcaaaagagcagctccatggagtcgttgtgctgttccagatgcttgtagaagtgcggcagcattatccggatcagttcgcgcaggtagctcagattgtggtccacatcccggtcggtgggagtgcagacgaagaaggcccgctgcatcaggccaacgaagcaccagaaggtctcggactcgttttgaacttcgcacaggacaggcgcaaggagatcactcataccctgtgggttataaaccaaaatattaaggacaatttgaagaagcgagctaaccattaactggatctaggacccacctgggaataggacattccggtgttgtatacggcaaagttaagcaaaatgtttttcatgacctcggtattgggattatcgtcgccgcagaagaacggattggtgcgatccgtgcgaaccacatccttctccaccacaatctgcacggtcttccagaagtgaatttgctgttctggggacatcgagtacaggcgctttcgcgtaatttcctcgtactcctgccgcttgatgtccatgagcactgcgcgatcctcgaatgtcgaggagaatgagtagcactttagaaggaatggccacaccgtctttcgcagactcttttccaagccaccaaagaagacacatttccggagcagcaagtcgtcctcgatctgtcccttctca

SEQ ID NO: 10817 - DNA, 1702 bp, DROSOPHILA
caccagttgatgtgagtattaaaaaaatatatagcttacagagtacaaatggcatcgacatcgagactggacaacaacaaggtgtgctgctacgcacaccccgaatctccgctcatcgaggactacagggctggcgatatgatttgctccgagtgtggtctggtggttggggaccgcgtaattgatgtgggctccgagtggcgtacctttagcaacgagaagagcggcgtggatcccagtcgtgtcggtggaccggagaatccgctgctcagtggcggcgacttgtccaccataattggtccgggcacaggatccgcatcctttgacgcctttggagcacccaagtaccaaaacagacgcaccatgagcagctcggatcgctccctcatatcagcctttaaggagatatcctcgatggccgatcgcattaacttgcccaaaaccattgtcgatcgggccaacaacttgttcaaacaggttcatgatggaaagaacctcaagggtcgttccaacgatgccaaggcatccgcttgtctgtatatagcttgtcgccaagaaggagttcctcgcacattcaaggaaatatgtgctgtcagcaagatcagcaaaaaagagattggccgttgctttaagctaacattgaaggctctcgagacaagtgtggatctcataaccactgcggacttcatgtgccgcttctgcgccaacttggacctgccgaacatggtccaacgcgctgccacgcacattgcaaagaaagccgtcgagatggatattgtaccgggacgttcgccaatttctgtggccgcagccgcaatctatatggcctcacaagcatccgagcataagagaagccagaaggaaatcggtgatatagccggtgtggccgacgtcaccatcagacagtcctacaaacttatgtatccgcacgcagctaagcttttccccgaggactttaagtttaccactcccattgatcagttaccacagatgtaattcttttcgtagatccgatgctcaatactaacgctaacgttaagtgaaggaaaattcctaatttaatcacaaattacgattttattaaataaagttagcataactaatattcaaatagaactgttggaccaatcagaacataattaaatcattgttaaattaattatctgagttaaaccctttcagtttttgaactttattccaatgattcgtaatactttgcttgcttgatttatttttacattttttgtgtatctttggtataatataagctaataaccagaaacaaaaattgcacactacgtttatttgccagttatttgcgaaaataagtttaacaaaccacgtactctgtttatacataagctttaagtaattagtaataatataaatggataaaaaattcgcaaataagacgaccaatctgtaactttcaacattatcaattgcaaataaagcggggcgtttaaacgtagtaaatggctaaattcatttagagagccaagcagggcagcaaactaataattccaaagcataatacatgtgctaatagttaatagttaatgacgaattatatcagtcgccaacaatagttattgctgagtttaaacagtgtatatattagataactagtcaatagaaagcgagcacttttcgtcatcactgtggcccacgcactccagcgccggtcgatgctcggagtccc

SEQ ID NO: 10818 - protein, 315 aa, DROSOPHILA
MASTSRLDNNKVCCYAHPESPLIEDYRAGDMICSECGLVVGDRVIDVGSEWRTFSNEKSGVDPSRVGGPENPLLSGGDLSTIIGPGTGSASFDAFGAPKYQNRRTMSSSDRSLISAFKEISSMADRINLPKTIVDRANNLFKQVHDGKNLKGRSNDAKASACLYIACRQEGVPRTFKEICAVSKISKKEIGRCFKLTLKALETSVDLITTADFMCRFCANLDLPNMVQRAATHIAKKAVEMDIVPGRSPISVAAAAIYMASQASEHKRSQKEIGDIAGVADVTIRQSYKLMYPHAAKLFPEDFKFTTPIDQLPQM

SEQ ID NO: 10819 - DNA, 4015 bp, DROSOPHILA
caaaacgacaacatatcctatttgttggacaaagccagcttgtagtacttacatatatcagtttccaatctaccgatatcacacgagataaatttatatatatatagcgttaggccctagtagttagaccttaatgcaaatgtgcatagtgccttctatttataacggacgcattcttacacatatgctattgtaatcgttcatcgaactcttgtagaattaggctaggtcacaatcacagcgactgtgtatatactaaactatacaatttcatatcgcatcctgcagaatgtgtacataactatgattaaatactgttttattcaagactaaaacgtacatattatatcaatacgatagccaacagttgcgcattgtttttcatttgctttgttttattccagccagcgagcttcactgtaggctgcatttacattttacgtacgaaaccaaaagccataggaagtggtcgataatcttttttaaactaaacttacaatagttaactaagcgcgtagtaaatgtgtagtaaaaacgcaaatattgtgcaaggaataagatacagttataaataaaatatgtgaaacctataccaatattaatattgtaacgtttttgaatttgatccaattcataatttgtcgaaccggctgaaaagagacttaaaacaatttacttaaaattggaatatcaacaaacatcagatatgctttggccatctatgggtcatttgcagaactaagagacatgtcttttgccatgtaaaatgtcttttggaatactattttacacgatgctagtgtaagtaaaaaacagagggacagaaatatttttgaatcttaaaaagcatgtgtataagcttttaaacaatattaagttgttgaaacataataaacttttttaaaaggttatttaaattataaaacgcaggtgtataacattgcagaagtttattcaagctttatagcgtgtttattttcttcacaaattcattttccatttacacattggcattctgtttgatccaggacctgagggcacccacgtaggtgtacatggccgggcgtcccttggctccgcaaccgaatccccaagacaccacaccgaagagcttgccatcgacggtcagcggaccaccggagtcaccctggcaggagctcacttggccactgggatgtcctgcacacaccatgcgatccgtgaggccgggaatgttttgagaattgcagtaatcacggctccacaattgcacctgggcgaatttcaaacggttgggcagctgcaagttctgattgatggcaccaaatccgctaatcattgccatcgtatccgcggcatagttggagtccgaatctgccagttgaatggtttgtacagctcctcccatcggaaccgggctgctcaacttaatcagcgacatatcaaagtcttggctctgcggattgtagcgcggatgtatgatgaactgggcaatgttgaaggtctgaccatttccggcgctcagatcgtttgttcccacaatcgccttcatctgaccgggattctggcccatggtgcagtgggcagctgtcacgatcatggtgtcggagatcaaggagccaccgcagtgatggcgtccatttagctggagggacacctgatggggaaattgtccgggagcagcaaactggccaccaataatgcgtgactcttccgccacatccatatcgctgtgaacaaaagtcacagccaggagcaggatcgatagtttcactagattgttaaccgaagacatggcaaaggttgagtgtgtcgattgtggtggagttgttctctatttataggactggtatggtgttatttttcgagtggttttatcgcccaaacggcacacttttgtatgggaagagacccagttaagtgggggcgtaggtgggtggtcgtcgatattttgattgtcaactcatattattaattctgcgaaaaaacaaaaacaaaatgcacaaaattgtatttctaaacatttatttcattacacttctaggatttgaatacatagtaagttatttgcagaaccttaatgctcattaaccaataatcttaagtgccgtcccactttttctcccctaactagctgtgaagtgccaatttctatctaggccaaacagtaggggctcggctcgacaaagtttatgtgcgaaatttaaatgttcgtcacataaaaatcaagttcacgtaacacctagctgcttcaaaagctaaattagtgagacgtagaatttgcagactttgatccagtctggtgtccgttgctaatcatccatacgttcttccaaatctcatgcctgtagatattgcgatagttttgcacggacaccagaaattcgggaccaaaaagggtttggatcagaacattctcggcagctagatttcgatttgtggtcgcatgcacgattaccaaaggggaattgctctgcggttataggtgaaaaaatatgactattaaataaatattagttaataattacaggtatatcttctccttcgctttcaaaacgctgctttggatttacatgtctgcagaaccaattcgtgtatgctatgggtatatcgttgtccgggcatgataatttctataggaaaactaaaattagatataaataaacaatgatatttttataagttagttacactgcggtgcacaagtcccaggttgagattgagctccccgtttttgtgcgacaaataggtggcatggacaccctgctgcagattgcaccgcttgggcccactgtacagtactatgggatcgtgttccgaggccatgcactgcagctggaatcgctgtccatatttgatattctcaccagtgcgatcccgaccatctccactgactattttaaaggagtttcgcacacaaggccgcttcgagggcgccacggatagctcacaatcctcattgattgactggctttttcgcaccaccttttcgttgatcaccaccgataaagcggcattcaaatcggttgtatccatatcactgatatttatatggatgggcattaattgcacaatagccccgaatataatggtttgcttgggagcagccaaaacgatctccttgtggaaattatcatacaaagtgcgcgccttttccactaaaagttcgccgcgatcgcgttgtttcttaaagtttactattttgtcctgaaaaatatgatatgcttaacaactatttacttactagttcatatttagtgactcacctcttcaaggcaattttcttcgacccaattgccaattcttacactgggctgaaaccgtgcggaaatagaatccatatcaccgactctgcaaggcattttgatgtgttgatggtagctaaataaaggtgtttaatatctatagcagttgtgtagtttgtaattgatgtaaggaattttgtgtctggtctataaatttaatggctactagataccctgagcagaataacatatttctaaaacaaaggcttgatgttattacacatttattcacaacaatgttaatagacctttaatcccacaatttcaccacttttcgaaacgttgcctacttttgggcattcgcggcaaatgttatctgcaccgcttctgttgaaagtgctctgcacggcacacatggcggatgagtaataacaaattcaatatttttcacgggcacacatttccaggcaccaagttatctatttgccgctctcggacaactcagacagcggtgattggccgtgtttgctgtcacccattcctgctaactccatttctactagaagtctgaaggggtctgaaatcttggagcagaacatgatcattagcaaatctgccgcttgtctgatgccaaatattggtgccaagataagccatttgtatcaacatttagcacatcgcccgccgttaattgtgctcgttattcattatcgcccgcgtcggtggatggttgtggttgtacctgtttagtgatttacctgtcggtgggtaaatgtacctggccgggtgga

SEQ ID NO: 10820 - DNA, 1305 bp, DROSOPHILA
atggatacaaccgatttgaatgccgctttatcggtggtgatcaacgaaaaggtggtgcgaaaaagccagtcaatcaatgaggattgtgagctatccgtggcgccctcgaagcggccttgtgtgcgaaactcctttaaaatagtcagtggagatggtcgggatcgcactggtgagaatatcaaatatggacagcgattccagctgcagtgcatggcctcggaacacgatcccatagtactgtacagtgggcccaagcggtgcaatctgcagcagggtgtccatgccacctatttgtcgcacaaaaacggggagctcaatctcaacctgggacttgtgcaccgcagtagcaattcccctttggtaatcgtgcatgcgaccacaaatcgaaatctagctgccgagaatgttctgatccaaaccctttttggtcccgaatttctggtgtccgtgcaaaactatcgcaatatctacaggcatgagatttggaagaacagaacaactccaccacaatcgacacactcaacctttgccatgtcttcggttaacaatctagtgaaactatcgatcctgctcctggctgtgacttttgttcacagcgatatggatgtggcggaagagtcacgcattattggtggccagtttgctgctcccggacaatttccccatcaggtgtccctccagctaaatggacgccatcactgcggtggctccttgatctccgacaccatgatcgtgacagctgcccactgcaccatgggccagaatcccggtcagatgaaggcgattgtgggaacaaacgatctgagcgccggaaatggtcagaccttcaacattgcccagttcatcatacatccgcgctacaatccgcagagccaagactttgatatgtcgctgattaagttgagcagcccggttccgatgggaggagctgtacaaaccattcaactggcagattcggactccaactatgccgcggatacgatggcaatgattagcggatttggtgccatcaatcagaacttgcagctgcccaaccgtttgaaattcgcccaggtgcaattgtggagccgtgattactgcaattctcaaaacattcccggcctcacggatcgcatggtgtgtgcaggacatcccagtggccaagtgagctcctgccagggtgactccggtggtccgctgaccgtcgatggcaagctcttcggtgtggtgtcttggggattcggttgcggagccaagggacgcccggccatgtacacctacgtgggtgccctcaggtcctggatcaaacagaatgccaatgtgtaa

SEQ ID NO: 10821 - protein, 434 aa, DROSOPHILA
MDTTDLNAALSVVINEKVVRKSQSINEDCELSVAPSKRPCVRNSFKIVSGDGRDRTGENIKYGQRFQLQCMASEHDPIVLYSGPKRCNLQQGVHATYLSHKNGELNLNLGLVHRSSNSPLVIVHATTNRNLAAENVLIQTLFGPEFLVSVQNYRNIYRHEIWKNRTTPPQSTHSTFAMSSVNNLVKLSILLLAVTFVHSDMDVAEESRIIGGQFAAPGQFPHQVSLQLNGRHHCGGSLISDTMIVTAAHCTMGQNPGQMKAIVGTNDLSAGNGQTFNIAQFIIHPRYNPQSQDFDMSLIKLSSPVPMGGAVQTIQLADSDSNYAADTMAMISGFGAINQNLQLPNRLKFAQVQLWSRDYCNSQNIPGLTDRMVCAGHPSGQVSSCQGDSGGPLTVDGKLFGVVSWGFGCGAKGRPAMYTYVGALRSWIKQNANV

SEQ ID NO: 10822 - DNA, 3133 bp, DROSOPHILA
aatcgtcggcattcagattggtatacttgcatagcgacgagttcggtatccaggtgagcagaagcgtgggcctcttggcgctattatactgatctacaaaggtctttgtcgtgcaggtcaaatagcccggattgtgcagtatatccgactcatcgcgggcgattgtgggcggatggatgcagacgttattcttgcagaagaggatttcgttgtcttcgtaagcaatatcgatttttctgtccaatctctcgtcgcccagtatgaaactagaagcctttttgataatgcttcctatgggcatggtctcgaatttgatatccttgagcgggtaactactatatggtgaattataggtttccttcccggagttatcctaacggatttactagtgggcggatggggaacttttttctctggttagcttctggtttggcggatttttgtttgattatggcggtcgctggttaccataattttaggaattggttggctaaacctttgattcgacaattaattgtaacacagcggattggtgaaaaaaaaaactattaacttttgattctagggacctctcacaagcaggatgacattggaggaaaagaatttacgcgaaaactcagcgcaggcgcagttaacagtcgatggttttaagactggtttcgatatttaatactttaaaaatgttgaggatttattaattcaaactgcaatgaaaaggtatatttttaataacaatgataatatattaaatgcgagtaggtgtatattaatatcttcttattcagcttgcaaatcaatcaaatctaagtctatttctataagctttcttcacataatcatactatatatcaaatggaatacaaaacatattatatatacattaattaaatataatttaaataaattttagaaactacaggaacattggtattggaacagcatatgttccagctatcgatatcagacttaccttcactaacgtaaatagaatcaatagtcgcttaaaaatattgacattgcatttagttttgtcttgagttcttgataaaatggcgagcaaaagaaagcaccaagcatcccagaaagtgaaagaggaatccttcaagaaacacacgcttgactccgatgaagaggattctgacgactacgaaaggtaatgcttaaaatgtgcaaacaattgattgttttgatttcggcactttttgtttgcagggaatacctcaatgatagcgacattgagggcggcgaggagggcgtggcaaaagtggaagacgatgtgaaggtaacacccttcaatatgaaggaagaactggaggagggacacttcgacaaagatggtcactaccattggaacaaggagacggaagcaaaggacaattggttggacaacatagactgggttaaagtaaggattccatcactgctgcctgtacacaatcatttaatttaaaagcaatatttgcctaacagattggcacacagaagaacgccttcgacccggcaaaagatgaagaaaactcttccgatgaggagaagaacgaacccgtgggcaaggcctttaacttgtccatgaacctcatgaaaatggtcgagtttatgaaaccgggagagactgtcaagatgaccctgcagcgtctgggtaagcagcgccccgtcctaacaacccttcagaggattaagcagaaaaaggccggcatcgttgacccaaagacacaggaaatctctcagctcaccgagctggccaacgagattctctcgaagacgggcaatatggatatatatcaggatacgtacgaaagcatcaaggccaagatcgccgatttgccaggaacgagcaaacctaaagtagccgatgatattgatatgtatgcagatgatttcgaaacgaaagaattggagcgctctaagacatcgtcgagtgatagctccaaaccaacgacgactacctcagaggtgacctgggagtttaaatggtcgcaggatgagactgatatccagggacccttttccacggagaaaatgttgaaatggtcccaggagaactactttaaaaacggagtctatgtgcgaaagtgcggcgaaaacacaaatttctatacaagcaaccgcatagatttcgatttgtacttgtaggccttagttaacaaatgttaaattctttgggttttaacatgttttctgcaaatactttgttctataattgtatactgtatactttacaagaggtttcaattagtttgcacttggtttggacttaaaataaaattcatattcatattgattctgtcggctcttaaatttggtcagatataccaaattatgtatccgagttacttgcgctagtgacgaatagcgaaagattcttctattagacccactagttcagtaagagatatctgatagtcgagaaactcgaaaatggcactgttgtttttgaaatgtgcaaacgatagtgtggcaaaagtatcgtttgggcggtgatagtgcaatcgatgaatgtgcagctttaatttaagcttgtgagtcttggcaactctagaaacacatcgattaacgtagctgaaaattgttttatgtttaattaaatacaggcgaatagctcaagatctttttggtgttatgagcgttcaaaagtcactaccgtttcccacttaatactttgttaactgttaagttcgtgcagcagttccccaattcttgcagaggaaacaaatttacgagtgcttcggtgttgttggacacacactcacttttcatcggtggaaaatcaaatttgggaccaggcgcagaagattcgtcaggatgacgaccaagcacatctattccacgaccaatttatcagatctgcaattaaaggagcagggaaactgcttgtttgcagcccgaaaatatgacgacgcaataaattgctactcaaaggccatcgtaggtgtctcacatatttttgttattgtgatgtgtattttgttgtttacatgtgcactatgctccatataatatgtagataaagaaccccacaaacgccacatacttcacaaaccgagccctctgcaacctgaaactgaagagatgggaactgtgctgccaggatagtcggcgcgccctcgacatcgatgggaatctgttgaagggt

SEQ ID NO: 10823 - DNA, 1009 bp, DROSOPHILA
cttaaaaatattgacattgcatttagttttgtcttgagttcttgataaaatggcgagcaaaagaaagcaccaagcatcccagaaagtgaaagaggaatccttcaagaaacacacgcttgactccgatgaagaggattctgacgactacgaaagggaatacctcaatgatagcgacattgagggcggcgaggagggcgtggcaaaagtggaagacgatgtgaaggtaacacccttcaatatgaaggaagaactggaggagggacacttcgacaaagatggtcactaccattggaacaaggagacggaagcaaaggacaattggttggacaacatagactgggttaaaattggcacacagaagaacgccttcgacccggcaaaagatgaagaaaactcttccgatgaggagaagaacgaacccgtgggcaaggcctttaacttgtccatgaacctcatgaaaatggtcgagtttatgaaaccgggagagactgtcaagatgaccctgcagcgtctgggtaagcagcgccccgtcctaacaacccttcagaggattaagcagaaaaaggccggcatcgttgacccaaagacacaggaaatctctcagctcaccgagctggccaacgagattctctcgaagacgggcaatatggatatatatcaggatacgtacgaaagcatcaaggccaagatcgccgatttgccaggaacgagcaaacctaaagtagccgatgatattgatatgtatgcagatgatttcgaaacgaaagaattggagcgctctaagacatcgtcgagtgatagctccaaaccaacgacgactacctcagaggtgacctgggagtttaaatggtcgcaggatgagactgatatccagggacccttttccacggagaaaatgttgaaatggtcccaggagaactactttaaaaacggagtctatgtgcgaaagtgcggcgaaaacacaaatttctatacaagcaaccgcatagatttcgatttgtacttgtag

SEQ ID NO: 10824 - protein, 319 aa, DROSOPHILA
MASKRKHQASQKVKEESFKKHTLDSDEEDSDDYEREYLNDSDIEGGEEGVAKVEDDVKVTPFNMKEELEEGHFDKDGHYHWNKETEAKDNWLDNIDWVKIGTQKNAFDPAKDEENSSDEEKNEPVGKAFNLSMNLMKMVEFMKPGETVKMTLQRLGKQRPVLTTLQRIKQKKAGIVDPKTQEISQLTELANEILSKTGNMDIYQDTYESIKAKIADLPGTSKPKVADDIDMYADDFETKELERSKTSSSDSSKPTTTTSEVTWEFKWSQDETDIQGPFSTEKMLKWSQENYFKNGVYVRKCGENTNFYTSNRIDFDLYL

SEQ ID NO: 10825 - DNA, 4408 bp, DROSOPHILA
tcaacccctagtcagcgaatttagttttcgtcggccgtcgagcaatgcactctttgtaggtcagttatggggtggcatgggtggccacatgctccatgggtcttcgctggtgttgcaacacttggtgtcgtcatgcgtcgcgtgcccgggcgttttgcttaatgtgattaagacaaagcgacaacaaaccaaaacaaagtgcattcgctgacggaacaggagaaaatcaaagcgacccgagtttattgcaccccttttagccggttagacggtggaaaaggcttttcgtgttctccgacacaggaaaaaataaatttcatgcaagctcaaatattaaatcaaatcgggcaagacatggactgtcggctatacttagaatatatgcaaataatggtgattaatctggaatatggacatatgaataaatattataaaaagtctaaatacagctgcctactaacgctggtatgtgtttgtttattgtgtacctcgaggctataagatatagccccatatcttggaaaatgcaattttacatacacacaaccattagtcgcaaatatcgtggcgaaattgtcggagggcgcgataagataattgcctacatggaactggtaccgaagaggttcctgaacttgccataaattaccaaatttctgggcaccgtgcgaaatagaattgataaggtcgctcgataagtccgtaccacttcggattctgagtgctgagtgatgcactcaatcgactaaatgggtacaaagccaaacgagttggatttacaaacagactcaccttgaagcgggtttcggttttcgactgcggtcgtagcttctgtgaatgaaattctcggttctctgggctgctggctgtcttcggtgtttcagcaggtgattgtcgtgattctctggcggagatgaaacagcatagcaagcggttccctaatgtatttttccgaaactatggtgtataatccgtatccgtgttcctaagttaagttaatccgcgcgctagatccgtctatcgtttttcgagtgcacaggtgttgcatgtgatgtgtatcgtgtcctgtgagtgcggggggaaagtccctcccactgttggtaagaattgtagaaatgtgtaaaagcctggctaaatgcctaaaagacgtacaacgacgatacaaatccgactgattttcatttttacacaaacacacgcacactgcgacagcacactctcactcacgtacacgcacgcacacactgccaggtgggctgacttctgattcagtgcgattttcgcgttctgcaaggtgtatctacaacctcccgaaacgcgtattcacttcgatttccgggttctagcgctgcagcattgtttatctaccacggatatccagattttcttcgcaatcggtcgagaaaacaataaatttattgtgcagcttagaggtgtaagagaaacatagacgtatcgatgtctctcgatggtttgtgcctatcgaaatcggtgtcccgcaatatacacagcttccactaagcgaaattttagcattttggcatacgtgtagaatttaaatggaaaattacccttggtaacgcatgtacgatcaaattcgcaccaactcaacggttcctaattcttgtcgtgcaaatgagacaaacaaatttataattattaaaataaaatatattcacatcggattgtattgtttcttatatatatggcccaaaattaaagaatttcattttaattaagagcatggtcggcgttgccatactttcaaaaagttttccttaagctggggtatattccaatagcacaacaacggtcactctatttcaaaattcaaaacaagctattggcgtcgtctgtctggattttgtgtatggaataagtagatcagaagaagcaaatgggatccaaagtggagcagcagtacaagctgctgaatgcggagctaatggaccaagtgcagaagcagcgcttggagatcggcgagtacaggaagcgggtgatatctttggagcgagagatcatggacattcgggaggagcacgtcctgcaaaaccatcgccagcgcatggagaacatcagtatcgtacgcagcctgatgctgagcctgaacgtggactccgattccctggcagtgcgtcaggagcccgctcccgcagctcagataaacagaccaagcggcccgcgtcgcagctccagggaaatctgcaaggacatgcgacggacgtgtgcgttggcccgcaccaccagaccaatctcgccaagaagatcttcctcagtgaccagtactgtatcgtccactagtcgccgctccagcgcagaagtgcagtccgaggtggtgaccactaggataccagaggatagaagagccaacaaggtaacttatacttaaatttgattatgcttttcttaacgattcattatcggcttgagtacagcctacaccaccgccacgaagaccagcggaattagtgtttgatgaggacgactcggacgatgatttcgacgaagcagtaagccccgtggaggagacacagactgagcaaaatgaagagaacaatcgtctgtttagcattatagaggaaaatggcagtgaaggggagtccacagactcgtcatcatcatgcgaggccatctattgcgacacaacgtttgaaagtagtccgccaaacgcccaagtcaccgtcacgcccagtggacgggctctgcgggaagtggacaccaatatccctgtagcagtgtccctcagtcggggaaaagagactgggaagggatcatggttggctatttccgtagctgtggaagattctccacaggagccaagcatacagtgcccacgactggcagtcaccaggcctagtcaatcgtctggaatatttcctgatgtcaacggattaacgccgcgaagaagcctgttcaatgggataggcaaaatggccggaagcaccagcactccgaaatcctttctcgtcgaggaaatgccatctataagaactagaagccgaactgcggctaataagaaatcagaaaatacggatatgtctagttctttctgcaacaacagcgcaaggccgagtagaagctgcaggcccaccagtttggtggagccaagtctgaagaacaagttgcgcaatggctcgaaaggcaaggccaaggccaaaaagtagatagacgaattttttaataggctttaatgttgtttctgtaatttcattggttttcaataccactttttaccatttttaatatgaataatatttttaaatcgtcaggccctgataagtttaatttatagactaaaagctgacatcggattactttttgcctgcaatagagggcatattcagttcatccagcgctatcggaaggaagacactccatcatcatcatcacccaaagatgccaataggaatttaaaagtacgtctaatttttacatgttcatttgtgaataaaacaacgtttcaattaattatttgttaatacgcttttaggggaactcattttatagattcctcttagatgcaaactacgtttattcgcacaaagttgttggaaacatttacaaaagactctgaagaacaaagtacaattacaattacaattaaatacagtagcaaaagggtaatgattatacgtaggtaggcgataattgcacttcttttagactacctcgaacttgcccatacaacagttgagatggtctcctgcatggttgtggcttggctgctccgtgttctccttgatctcgctgataatgtcctgtatcttgttgatgatctgttgcgagttttcaccttcgccaggagtgtgttcgctacctgcggccgcttctggttgctttgcctgggcggcatctgcgggtagctccacgcccaaactgaccaccagcttgtttagtgcctcaatcttctcgcgcagctgctctcgctccgcttgcaagagacgcatttgggcggccttctcgtactcacgctgctttagcatgcgcctctgcgtttgatagagggcaatgtactcgccaatcgtttcggtttcgctctgcagctggagcaccagatgctccaggctgtgcttctcctccgtcaagtcggcgacctggctgatcagtgtggtgaaacgcgattgcaagcgttccacggcctcggcggtgggcagcgtttcagctgcttgtctgtgggcgtggttctggccgtgatcatgtggatgatcatgctgatgatcgtgtggatggctatgtgaatgatcatgtgtgtgatcgtgcggatgatcatgtggatgaccatgatcaccagcattatgatggttatgttcatgggaatgatcgtggtcattatcatgacaatgaccgtcggaatgctgatgagagtgatcgtgcgaatgattatgcaaaagaccaacttccttcgctt

SEQ ID NO: 10826 - DNA, 1645 bp, DROSOPHILA
ccgcgcgctagatccgtctatcgtttttcgagtgcacaggtgttgcatgtgatgtgtatcgtgtcctgtgagtgcggggggaaagtccctcccactgttgcacaacaacggtcactctatttcaaaattcaaaacaagctattggcgtcgtctgtctggattttgtgtatggaataagtagatcagaagaagcaaatgggatccaaagtggagcagcagtacaagctgctgaatgcggagctaatggaccaagtgcagaagcagcgcttggagatcggcgagtacaggaagcgggtgatatctttggagcgagagatcatggacattcgggaggagcacgtcctgcaaaaccatcgccagcgcatggagaacatcagtatcgtacgcagcctgatgctgagcctgaacgtggactccgattccctggcagtgcgtcaggagcccgctcccgcagctcagataaacagaccaagcggcccgcgtcgcagctccagggaaatctgcaaggacatgcgacggacgtgtgcgttggcccgcaccaccagaccaatctcgccaagaagatcttcctcagtgaccagtactgtatcgtccactagtcgccgctccagcgcagaagtgcagtccgaggtggtgaccactaggataccagaggatagaagagccaacaagcctacaccaccgccacgaagaccagcggaattagtgtttgatgaggacgactcggacgatgatttcgacgaagcagtaagccccgtggaggagacacagactgagcaaaatgaagagaacaatcgtctgtttagcattatagaggaaaatggcagtgaaggggagtccacagactcgtcatcatcatgcgaggccatctattgcgacacaacgtttgaaagtagtccgccaaacgcccaagtcaccgtcacgcccagtggacgggctctgcgggaagtggacaccaatatccctgtagcagtgtccctcagtcggggaaaagagactgggaagggatcatggttggctatttccgtagctgtggaagattctccacaggagccaagcatacagtgcccacgactggcagtcaccaggcctagtcaatcgtctggaatatttcctgatgtcaacggattaacgccgcgaagaagcctgttcaatgggataggcaaaatggccggaagcaccagcactccgaaatcctttctcgtcgaggaaatgccatctataagaactagaagccgaactgcggctaataagaaatcagaaaatacggatatgtctagttctttctgcaacaacagcgcaaggccgagtagaagctgcaggcccaccagtttggtggagccaagtctgaagaacaagttgcgcaatggctcgaaaggcaaggccaaggccaaaaagtagatagacgaattttttaataggctttaatgttgtttctgtaatttcattggttttcaataccactttttaccatttttaatatgaataatatttttaaatcgtcaggccctgataagtttaatttatagactaaaagctgacatcggattactttttgcctgcaatagagggcatattcagttcatccagcgctatcggaaggaagacactccatcatcatcatcacccaaagatgccaatagga

SEQ ID NO: 10827 - protein, 401 aa, DROSOPHILA
MGSKVEQQYKLLNAELMDQVQKQRLEIGEYRKRVISLEREIMDIREEHVLQNHRQRMENISIVRSLMLSLNVDSDSLAVRQEPAPAAQINRPSGPRRSSREICKDMRRTCALARTTRPISPRRSSSVTSTVSSTSRRSSAEVQSEVVTTRIPEDRRANKPTPPPRRPAELVFDEDDSDDDFDEAVSPVEETQTEQNEENNRLFSIIEENGSEGESTDSSSSCEAIYCDTTFESSPPNAQVTVTPSGRALREVDTNIPVAVSLSRGKETGKGSWLAISVAVEDSPQEPSIQCPRLAVTRPSQSSGIFPDVNGLTPRRSLFNGIGKMAGSTSTPKSFLVEEMPSIRTRSRTAANKKSENTDMSSSFCNNSARPSRSCRPTSLVEPSLKNKLRNGSKGKAKAKK

SEQ ID NO: 10828 - DNA, 3655 bp, DROSOPHILA
gggcaaggcctttaacttgtccatgaacctcatgaaaatggtcgagtttatgaaaccgggagagactgtcaagatgaccctgcagcgtctgggtaagcagcgccccgtcctaacaacccttcagaggattaagcagaaaaaggccggcatcgttgacccaaagacacaggaaatctctcagctcaccgagctggccaacgagattctctcgaagacgggcaatatggatatatatcaggatacgtacgaaagcatcaaggccaagatcgccgatttgccaggaacgagcaaacctaaagtagccgatgatattgatatgtatgcagatgatttcgaaacgaaagaattggagcgctctaagacatcgtcgagtgatagctccaaaccaacgacgactacctcagaggtgacctgggagtttaaatggtcgcaggatgagactgatatccagggacccttttccacggagaaaatgttgaaatggtcccaggagaactactttaaaaacggagtctatgtgcgaaagtgcggcgaaaacacaaatttctatacaagcaaccgcatagatttcgatttgtacttgtaggccttagttaacaaatgttaaattctttgggttttaacatgttttctgcaaatactttgttctataattgtatactgtatactttacaagaggtttcaattagtttgcacttggtttggacttaaaataaaattcatattcatattgattctgtcggctcttaaatttggtcagatataccaaattatgtatccgagttacttgcgctagtgacgaatagcgaaagattcttctattagacccactagttcagtaagagatatctgatagtcgagaaactcgaaaatggcactgttgtttttgaaatgtgcaaacgatagtgtggcaaaagtatcgtttgggcggtgatagtgcaatcgatgaatgtgcagctttaatttaagcttgtgagtcttggcaactctagaaacacatcgattaacgtagctgaaaattgttttatgtttaattaaatacaggcgaatagctcaagatctttttggtgttatgagcgttcaaaagtcactaccgtttcccacttaatactttgttaactgttaagttcgtgcagcagttccccaattcttgcagaggaaacaaatttacgagtgcttcggtgttgttggacacacactcacttttcatcggtggaaaatcaaatttgggaccaggcgcagaagattcgtcaggatgacgaccaagcacatctattccacgaccaatttatcagatctgcaattaaaggagcagggaaactgcttgtttgcagcccgaaaatatgacgacgcaataaattgctactcaaaggccatcgtaggtgtctcacatatttttgttattgtgatgtgtattttgttgtttacatgtgcactatgctccatataatatgtagataaagaaccccacaaacgccacatacttcacaaaccgagccctctgcaacctgaaactgaagagatgggaactgtgctgccaggatagtcggcgcgccctcgacatcgatgggaatctgttgaagggtcacttcttcctgggccaaggactcatggaaatcgacaactttgacgaggctataaagcaccttcaacggggttagataatacctgacctttgatgttctctacactaactaaccatatatgaaacttatagcatacgatctgtccaaggagcagaagcaaaactttggggatgatattacactacagttgcgactagctcgcaaaaagcgctggaatgttatggaggagaagcgaatacagcaggaaatcgagctgcaaagctatttaaatgggtaagatgttattcgaattctctagatgccttttgcaaactaaatttagtcaccgcacgacgatatcgaggcaattgttgtcctcatgtgatagaatatatattaaaaaaagcgaaatttgtgcaaaacctaaatatttatgtttcagtctaataaaaggggacatggaaagccgtttggccaatttaaagctgaatggaaatgtacacgatgagcagctgaaagacaagcaacaggaaattgagcaagaatgcgtaagttggactttaaccagaatatttagcggagttgacaatctaattttactttttaggatgaccatattaaggaacttaacaatatattttctaaggttgacgaacgtcgaaaggtaagaaactaaaggaaaaataaccaatattaaaaatattgttctaatattgttatttacatattacagaaacgtgaagttcccgattttctatgtggcaaaataagttttgaaatattaacagaccctgtgataactccatctggaattacgtatgaacgaaaagatatagaagaacacttgcagcgggttggacatttcgatcctgtgacacgcgttaagctcactcaggatcaactaataccaaatttttcaatgaaggaagtggttgactcttttattgccgagaatgaatggtctttagattattaagttacttattagttggcattgtcattgtaattgattagatgttagaacccagttcccattgtctaaaaaccagataagtgataataaatgtggatctgcaattgagatttatattgtaaatggataaattgtaattattaataaattaaacagcataatgttcaaaatataaataaaaaagcttttgcacgatatcgatagagagttagcggtagtgtgaaaacaatatagtttcgatcacccgttccagttagtcaaaaagttggtgatatcttgaccaaacaaattatcgatatacagctgcttacagatttgcagaaatcattttcaaagaaatttgtttatgtgaattcacaattggattaacttcgctcttctttgtttagtatttatttaacaataatatggattcgtctgaaagccaatcgcaaatggatgaccaagatgctcgcatactgcgtctgcaaaatctgatcgaaaagaatattgagataggtaagttaaatcataaattactaatatctgaaataactatatgaattgcagagcaacaaatcgaaaacaacaccatcggagagtctatcacggccatagaggaaatcattcagacagccaacgatatcagcaagggacatgaagaccgccgtacaaactccacggaacttgtcctggacacggagctactgcgtcgcaatttcgaagttgtgggaaaagctatccaacataacaccaacgtcacggatcgaatggtggccacggcgatcgtaggtgcactgtgtactttatttatgcctgatcgtaatgtttgatcctattacagaacgatttggttttcaaagagagcgaagaagattgggatgctctttgttcattggctattcagttcggaagaccactcttcaccaatgatagcatgctgcccttcatagatgttactccaaaggtggtggttcaaaagcaacgtgctcctcgcaaaacgaaatctcaagtaagtcatttgttaaacaatttctcacagtaatatttgttcatattattatggatcttgtaggtagatgagaagcgtccagaaaagagtgaccaattggaacgcaaggacgaaggagcagcgtcc

SEQ ID NO: 10829 - DNA, 1239 bp, DROSOPHILA
cgattaacgtagctgaaaattgttttatgtttaattaaatacaggcgaatagctcaagatctttttggtgttatgagcgttcaaaagtcactaccgtttcccacttaatactttgttaactgttaagttcgtgcagcagttccccaattcttgcagaggaaacaaatttacgagtgcttcggtgttgttggacacacactcacttttcatcggtggaaaatcaaatttgggaccaggcgcagaagattcgtcaggatgacgaccaagcacatctattccacgaccaatttatcagatctgcaattaaaggagcagggaaactgcttgtttgcagcccgaaaatatgacgacgcaataaattgctactcaaaggccatcataaagaaccccacaaacgccacatacttcacaaaccgagccctctgcaacctgaaactgaagagatgggaactgtgctgccaggatagtcggcgcgccctcgacatcgatgggaatctgttgaagggtcacttcttcctgggccaaggactcatggaaatcgacaactttgacgaggctataaagcaccttcaacgggcatacgatctgtccaaggagcagaagcaaaactttggggatgatattacactacagttgcgactagctcgcaaaaagcgctggaatgttatggaggagaagcgaatacagcaggaaatcgagctgcaaagctatttaaatggtctaataaaaggggacatggaaagccgtttggccaatttaaagctgaatggaaatgtacacgatgagcagctgaaagacaagcaacaggaaattgagcaagaatgcgatgaccatattaaggaacttaacaatatattttctaaggttgacgaacgtcgaaagaaacgtgaagttcccgattttctatgtggcaaaataagttttgaaatattaacagaccctgtgataactccatctggaattacgtatgaacgaaaagatatagaagaacacttgcagcgggttggacatttcgatcctgtgacacgcgttaagctcactcaggatcaactaataccaaatttttcaatgaaggaagtggttgactcttttattgccgagaatgaatggtctttagattattaagttacttattagttggcattgtcattgtaattgattagatgttagaacccagttcccattgtctaaaaaccagataagtgataataaatgtggatctgcaattgagatttatat

SEQ ID NO: 10830 - protein, 289 aa, DROSOPHILA
MTTKHIYSTTNLSDLQLKEQGNCLFAARKYDDAINCYSKAIIKNPTNATYFTNRALCNLKLKRWELCCQDSRRALDIDGNLLKGHFFLGQGLMEIDNFDEAIKHLQRAYDLSKEQKQNFGDDITLQLRLARKKRWNVMEEKRIQQEIELQSYLNGLIKGDMESRLANLKLNGNVHDEQLKDKQQEIEQECDDHIKELNNIFSKVDERRKKREVPDFLCGKISFEILTDPVITPSGITYERKDIEEHLQRVGHFDPVTRVKLTQDQLIPNFSMKEVVDSFIAENEWSLDY

SEQ ID NO: 10831 - DNA, 21747 bp, DROSOPHILA
atgccgggattgcgctgcataccatagtagttcgcaccgcagtagctaagcaggatggcgctcttcttgcgcttgatccggtcggcgggatcgaacggcgctcgcttcacgccgttggcggcatccttctcgtcctgctccttccaatcgacccatttcttgcgtttaagtgttctcttgatgcggttggcgtccttcacggcttcgccctccagttctttggcctctttcctggcttccttctccacctccagtttatctagagcctctgacatcgctgcggcgaaggatttgtggcgattccagggattgcaaagggttttcaggcgaactattgtaagaaaattaattattataaattctcgaattggaggtgtgatcactaataattaacctgccttggtgtagtcgtttaaaagtcgtcttaaaaacattaagtaaacaattctggatttaaagtggaggaattcacacacgtgtggttgtgcttcttcttcttgctctgttacggatcagctgttttatttaacagctctgtttggctaatacaaatatgtttttttcgaaaatcgcgttctttgaattagctcaataattaagttgagtttccgaaatgctacttttgatttacttaagttttaaattagctgtgtggagaaaaatgttcaaagctttacgtaacgttatgacttaacagaacgaagacgttacaagtttattttaaaaattatgttatattttactataaccttttaataccaggctaagttattagttttaaattgtaaataaatggcatcttgaccatgtattacaacattaatatgattttttacgaaatgaacggcgaattcaattgtggtattgccagatcgcgtgtttagtgtgacctcagctgcttacgtttccacggccgtgcgtaacagccctcgaaatgccgtcgtactggcaacgccgacatgaattaattgaatccaaaatggctgaacattttttgtacagaagaagcgtccaacgagagcaaacgccgtgagaccgtgtgttttcgcagcgaattacgccaataaaaccgcactaagagcgcgctcgcagcgcgaataaagaatagcagccgcgtatggacgaaatgcggcacgaatcgctggaaaaatcgacggccagaccgaaaaatagcagcgaaattcgagcgaacgtcgtgtataagtaaaacgaaagttgtgtcgctctgtgcgaaagagagagggagaacccaatatttttgcaagccagaagtcgaaggtgaaattaaaatgcattagccacccaattgaagaggagtcaactacgaacaaaactttaagaatcagcgaaaaatcgtttgtgaacatccatacaagcacaaatcgttgtttttgcctgctctcgtgtagttcctgtgtattggtgcgcgcgccctgtgtgtgtttgtgcgtgtgcgtgcgtgtaagcattggaatggattaactacccaactaattccaaaacaataataccgcaacataatcgcaatagtcatgccgtttcaaggcgacagcctttagggaaacattcggtcggtcggtcagtcaaccaaaaatcagttgctataattagcacgcccacgttttaatttcaacgatcgccagcaaccgcctacgcggttaaatcgcaggacttcgccaacatggatatggatttggagcagctaaagaacgacttcctgccgcttatcgccgggatcaagcaggagcagctggatgccgtgcccacggatgccctgccccagatgagcacaccaaacacggccagcggtgcgcccacaacctcgtcattgagctcctcttcgctgagtctgagcaacccctgcgacagtgccgagaaaagggtatgttgctagtccgtatcacgcgttcgttacctataagctaacgccaagttgaggttagctaaagccgcctaatcacacgtgctcttgcggctgataacaaacagccggctcaatacacatattcccctgctctgcgcagtctgctcagtgtaaacttttgttttggttggattttgatgcgctcgtgctgcgtcctccttatcaagcgtttcgaatcgagtctcgtgcaaaaagcgtttgttatctttttcccaggccaaggcaaacaaagcagcgtattcacacaaccaaacaaacagcgcgcaatggcaagtgttgttgtgtttcactttcacggcccagtccgagatcttacagtgagaaaaacggcgtgcactttgctctattttacagtatatgtgtatatatagttttctattattttaaaattaatatgactatgcagttttaatcttggatataccagttaagatgtaagaaatgtgatgttatcgaacgttgaatcaactttaaaattagttctaatatacaaatttttaagttgttatatgaaaaaatgaaaaataatataccaacttaatgcaagaatttaattaaattaaaaaaggtacaaattaaacattaattattagcttactgattgagaatttttttttttactgtgtagtgagttagggtctcgtgccgatggttctcgattcccctatgagtgcgagcaaaacaagctgtttctagacagtcgctacctcgctttcacttacgtggaagggctaagtcaagatggtctccctctcttgcaattgcagatcagctgcaacatgcagctgccactctccagatgagcggcaatagagtgtgtgtggttgtgtgtgtgctctctactgtgttttgtttgctctccgtcgtgcttgagctgctctttaagctacagtggaacccaagtagatcatcctagtggaaagcttgaacataattgtcctgaaaaataaaaaaatactataatattttaactacttcaatctaaagaattattgaattgcttttacacctttttgtttattttcattgtattagttacttactgtacagccagataacttgccttaactgaacttccaatataattttgggacatacagaatataactaccttattttcaacgtaaattgggcaatttgaaagtttcatttaacactaacattatgaattaaaatcaacggcttgtgattacaataaaacaaaattaatgtttttcacaaatgataaccgctttagatgacactaattggtcacgatattttattatgtgtgctaaataaaacaaacacgttttcatgtatgtaattaaaaattcgagctctaactttctatgcggcatgtgatacttctagttacggaagcctgactgtatgaaagactcaaacttctcctgcaaccgtgcaaataaatgttcgcctagagtgggccttttggagtggccactctctcttgaaccccaaccagggattgggaatgacatgcactcattcaatccgtccctcaatcatgcaaacggttgtgtttgctgtggtcgttgggggcacttaagacccccagactccatgcccagtcccccccccccccccgcctgaatcccctccagatcacttaatgcccatttctgatgcgggcaaactatcaagtggaaagtacttcgccgaggcaaggtgtggagttcagaatggatgatgatggggatttcaaaggaatagcttttagattattaatcctgttaaagattttcatacatgcatgtacataactacaaaacaatctgacttaagaaactgccaagcacggaatagttaaataattaatatgaaaagaattatcaaagaattatttatgatccagtaagaattatgcgatcctttagatttcctttagatttgaatgctaattcttctcttgacggcatttttttccttttcatcgagtaaattattctaatttatgcatgacttcacaaaactaactgtacctactcatgaatacatggaatacatgatgtcgttaagtaacttttatgggcgaaaaacataataagaatttctcaataaagagagaagacttaaaattcacggataattttttcctatatatagtaaacaatgatacctctgctcatattaaactcaaatgattattaatttgtttttaattaaaattagcttgaaaggttttatacattcataaacacaaggtctgcttttgtggagactttcttttttacctttatacttccgattcggtaaaacactcaaaatcactgaagcttaactgaaaagagaaacctattcatttgtagctcctgtcaaaatggcgggtttcggcattaaaagtgacagctgatggggaggttgccgctggcgggcatccatatgtcatctcaaaaacactgcacctaaatgcattttcctaccctccatgaggccatatttaatactcccataaatacgtatgtacgaacgcttgtcgtacatacatattcatgaagtcatgtctttgtgtgttaccccatgcatgcgacaggttgtaattaaattgcttgacatcggaataaatgaaaacccaaaatcgtacgacgccattttgtgttagataccgacgagacccgaaacgaattcttagaatccgcctttaatgatgtacaattaactttaatttgatgagaatatgcaagcaaagcaaaacgaggagaaggcaaagtgccgatggccagacgccggtgctaggaaaccccagcccccaaaaataaaagtcgttaaatgcacaaaaaagtaaagtttctaattaacttgattaccctgaaataagggcgggtagatcttggaaaatgactctcttttcactttactcgaactacctggcattaatgcagacatcgggattttaaaatgctgggattttatggcatctatagtcaaccatcccctttgtgatccgattgaacgaatttaggattagaaataatactctatactctaaactaggtaattgtgtcaaagccaatatgtgcattaaagattttctgatttagtacgctcaatgtcaaaatagatattcaacatatttttgaagtgaacaagagaggtcgctctagtctattctcgttactagtgttttattttcgagttcggaaaaaaaattttaaaaaagattatatgtatatttgttttactgtctactgttctttgtacctgttataaacttttaatcttatattaatagctttttgttatttttaggagaaaaaccatcttggttgatgtacattttataaactctctcagttccgaacttattgttaataacgtttaattggaacaaaccatgaaaacatgtttttttctaaaatgttaacagctttataacttgaaaggtggttccatttagggacgttctcctgtttatccaggatatacacattttaattgcttttccgggcagtcggtgggcgtaaggccgccctaatccatccatcgacgtccagtgcgtaattaaagttgactgcgactgcgggatcagtgcggatggatggaatcggattggaactgaaaaagggaatgggagtggtgtagttgtaggtgtagatgtggaagtggtgctcgttggcaacatgtgtacgctggtcgcactcctgtgcggggattaggtgctacacaggacataatccgatcacaaaaagcggattataacgcacagcaacaaaaatggtgcagtcgggcggccgtggcaaagggaaaccgaactgacgccactttaaaagtagagcgtttctgtcagtggaggggaaatgcagagggcaaagttttataagctgcataagtcctgagaagcgagtctgtctgatttcctaccatcctacggcaacagacagcagatgtaagcagatttctgagctgcgtcagcttgttcagctgccgccttggcatgcccccagatacgcctacgcccaagtcccggtaccatccatatcggttataatattgctattcctgcaactggcgtcacgattttcgggccccctgctgactgggaagtcttaccggtttgtgtatctacatcagcggggagtcgccattttggaaaacactcgtactctcgtagttcgtgcacactccatccaatccatatatatgtacatattatggtgtatacgtgtctgctgatgccatgccctccgggagcaggaacaattgcaacgggcacaaaaagaaccgcaaaccgcatcagcagcagcaacagaaacagcggctgtgacggctttggtaagctccagagaccgagggccaccggctcgtcggaccaacgtaaccacaacgccctgcccaggccaccgccaatgcaacccgacgcaaacctcgaccgtcgtctgcagcagcagcagcatcgctggggtccaaaatccggggaccagccgacagctcagtccgttcattagtttgcggtttcctggtttcgtttcggttggctccacgtcttttggtctcttggtcccccaccaaaagattttcaatactgaatttatgctcgcaacatgattgggagtagtaattattataccttccgttctgtaactagtcaagttttcccaacccaaacattgagtttgagcacgaaatagtaaaacttgcctaagagaatatcaaaactggttttcgttcgggaccagaaaataaaatggcgatttctaagtagtaatacggcgaaactaattaagataagactatcatagtggtttgggttagccaatgccaaccgtagtcggaaccaaatagcaactaataatgttatcatccggctttctcccgcttcgctcgtctctccttaaattttgtttatgtttaatctgcttcttgcttttaaagtaaacatttcattcagcaaacagctgtgtaaatatgctacaaattgccaattttccatacagctcattagatgataaacagattatgattaactgatagccttgaattagtattgtagagcattgaaccgctccgctattaagtttcctttgatcagggaggttcggtaactatcttcaccaaggatctaatcgatcaacccatttaacaaacgacccttgcctgccattacaatctcaatgaatcactttattactgctcgttggatgtgtcattctcggttagaagttccacttatcacttattccattacgaatacccgaagtcccaacgaaagggtctgtcagatgatgacagttcggtgaaatagcaattttatttacgtcaaccaagtgaacttccttcggttaggacctgtagtttgccagttgcgacagcttttaatgggttccatcgattttctcataaaataaaccaaaacttttctgttcgtgccatttacgatttccatacaattaaatctttacgactgaagcgatgtggcttgagacattcgagcaaagaaaccaaaccgaaggatacagaagtataatatttaatgagttccgtcataaacagccccttttatgggaagacgttaaaatacagatagcttttcaaattttccaaaaaaatattttcgaaatatatattctgaaaatacttgaggtatttcacttgaaaattttggatatatggtgtatgaatatataagtatataaaaggaaatcccgagtgccatcagcctttttctcatttgccttgtgtgtgggtatgtgcgtaaatgcgtaatcatggtttttatgaaaccatttctgtagaaatttatatttatgtacagtacacatacttttttggtggcttaaattgcgttatgaaatgtaatgtcgggtcattagggtttgtccattaggtgggtttcgggtggttcaacacccagttcgtgttcctccaactcctgggcggaaattgcagcaacgttggccggatatgcccgcgattaaagcgaatggccaatggtccaaaatggcgaagcttctctcgcttcctcagcccttttccattggtaggagatacgaatcggatttgaagtgctcctaacgatttgaaattcgtatttggattggaatgcttttaatgcgtgtgcgacgcttctcgctgcgtctgaatacttacaattttatttatttatttatgttgaactcgcggattgggtttgtttatatggacatctggcggtggcctcgccattaatatttatcagctgctgcacctttcccggctttgcagctctgttgccttcctccatggcgtcgcataaatcgcagcaactttggcccgacacgcccctcgaacgccccgattttctctgaactcgcttggctcacaagttccaggtacaatcaagtttttcgcttttattatggggagtataatatattttatacggctctatctgccgccgtcttctcgctccctttccaccttttctaccaatttatggcggccattttggagaggtggtgtctttgaaattttagtttattgcaaagtctcataaatatttcaagagcaagttttttcgtcttcatctcgttcccgctcgatttataaacctggccaatttatattagtctgcgaggaagcagggcattttatgaggggttgaaagagaaatgtatcatgaggttcatggactttgatgtgccagtctgtcacctgagtcccactgctcagtgatgaaaaagttcttttgagtgctttatgtatgttccataaacacgattgttcattgacttggcggtgaggcatttatagacccagtcaattacggcgaattcattttattcgattaccagttgaccctggatccattattatcggtatcatatttggattccctagtgcattgttcaagcgcttaggaatctggaatctggaatttatgcacccgcccctacatatctgggaagcatttccaatttcattactttgatcagacttaatgaaccggcgaccatggagcatatcgaatggatccgccttgcccaaaacgagtaactgcggcgaatgaaccttgaatggaaagcgtagcaaactacaggcaattattttccatttgcgtaaattatacatttaaattaggtgttggcatatttcctttaaaggtacttgttgttttagcactcttagtcacgtattacggacagtctgaatgatgcattgaagattagccattgtcgaaaatgggcgcccaacagaaatccagaacgtaattaattttctgcttttgttgtatcaaaggattttcccttccgtccgagagttcaaagtacacatatgcccgtgccatctgatgcctgccgttttgtgttgtaaatttgcaaaataaacgaaattgacgtaggagcaacaataaacaagcgatggccggccatcatcaaccggcatccagccgtctgaaatccgaagaaactccaaaaggaccagcatcattgggcttcatctctatctgaaatcgccatttaaccagcaggacgacagacctcccatgatgcacgtctcatattgcactgatttatggtccggtcagtgggcggtggggtgcgtatgtggcatgagttggttcccagtgggtgggaaaccacccaaaagtgcaacacgaacgctgcaactgcacgtcgaacgacatcgacccacccacccacaagtgctccaaagtgacggggagaatattttcaactttccacaaattgcatttaaataaagcttaattaaattttaagtctacctgaactctaagtgacaaggaataccttttatgaggccagaaccacagaatgccaactgagtatatagtggaatccgattgcgtggtttaatcacacataggggttattactttaagtgaaactgaataactgaataaatcagcaaattgcatttgctctgtgcagagttggttataagtttacccgctatttcgtcggaaagtatgaaacaggtgtaaggaagaatttctggcccttggagtatacatatacataaattcttattgtagtcaatcaatgtggccacgtccttttgtccgtatgaacgtccgtatgagcgataaaagctattgtagatagctagatatttagtttaaaagtcagctatacagatagatagatagctagatatatagaaagctagctagatagttagatacctaaaataaaagctgaatgaatgtctccgacgcccacaagttacccaaaactgtcacgcccacactttgaaaatgtttggaattttttcatttaatcatttgtcttgcccattttagtcgatatgccaaaaacattttggacacgcctacaaaccgaaaaaacgtcacgcccacagtttttaaaatgttagaaactttcttggcaattataatcgataaccgtgcggcatgtgtgtttgtgtgctctgagtgggtgtggaattggcaagaaaaataaatttcaatttaaaaatctcaatttttgccctttctgcgggagtcatggtgggcgtgtcaatgttttttttttatgcgttgcactggcagctctacattcaccgtgattatttcgaaatattgagctttaaagttcttttattacctttttaactggcctatacgaaagcattactgagttcccatagttccatccgtttttgttttcaattgaaatcagtaaatctttttagttaccaattaacaagctttgtccgcgctgcttatctctatctaaacaaaacgattctgacatttataaaactggcaatcacattttccgatagacttttaatcacctgctgccatttaatcaccagctgttttattaacccaactatagcggagagcaaagcgtcgtaggatcgattaagtggatctgattttgagcagtttctctaggaagaggtttttctttcgggagtgccttcgacatatctaaagatctccggcctttgacactgggtgggagttcgttctgatgaagaacttaatggaaatatggcggccacagaaaatggatttcgaatgtgaaatgtgtcgaaaagttgtcagtttggacttttaaccgattctggtcttgtgacagcgtgaaacctgtggaaaaaaagagaaaggggattgtgtgcgagtgagagggtgagatgtggcgcgaacggtggcgaactgcagttgtggaacttctttcatttaatttcagcaacaaagtttttgtgtgactaacgagactgaaactttttcgaaaatatatttgaaattaaatttggccaaagccttttaaaacccgttgccaagccaatcgagcgatgggtggaagtttgctggggaaagcggggaaaagttttcacaatttactttcatcaaaattacatcaatcataaatgcactcattcagtcgttgtcatgtcgccattccatcaattcccatttctagagcttcgtgcggatgcttttgtatgttgttgcctcagtctagttgccatttttgttgtattgtagttgctcttgctgggccatcctttcaacaatttctaattgaaattgatttagagttatttttgccttcgacttttttccctctatttgagtttagcctcgtgcgagcgtgctgtttctcaatgtgcgtggcaaactaatggtctacgtgattggcggctttttgtataatggaggaaaaatgccaaaatataatgggtttaagatgaaactttgttttctcttatattcaagggaattgcttaaattataaagagctaggcttttatgaatttatcaaatatctttaaaggccacaaacaagggggtatctatatcctaagtaaatttgaattaacaggatgttgagattagaacccaaacccaagtcggctacattttccatttcagcgacttgcatgattgaaaaatctattaatttgcattacttgcagaaacagattctttaaattcttgccacatgttgctcgccatttatacggatgggatgctacggacatagacatatacacacatgttttaatggcatataaatatatgtacatatgtacatacatatatgtatgtatatgcatcgctttgtaggtgcggaccgagaaaacaagtttgctacccgcttccagttgcgtcaagtcattgcgatgcgatggaaacatgggggtagcagctggtttttcgccacatttataatgacctgctctctgggccagtgccgcgggtcttgggcaactctaagtgggttgcgcggcaccgatccgaaccgccgaacactatccgaacatagccgatccacgtccgatgccagaccgaaccgtggcaagaagctggcggggatggggacaggcccatgatgaatggctttcaagtgggacgcagccttctgagcaccgagacgcctccacgccgacacgccctgcacacagagctccactggccagccgcccacttacaatatacgccaaaattatagttgtgggagtacgaaaagcaataaaagtatgagtgtcaatgtatcacatattttacttgtttcatagattttacgccaggcaaccttgtatattccgaaactcactgttttgtacacatgtacacctccttaaattgttaagctcggattattaagaaagcgatcaaaaactttttagtcatcggacagattgctttagttccataaatacggagcttacttatttagacgcactaaagacactgtaaaaaaaactttttgccaggtgtggggttcgaacccacgctctctcacgagaaccagagcttaaatctggcgccttagaccgctcggccaacctggctatgtgttttccttaattctaagtacaatatacacagaaaggaaataaaattgtatattattcagtggttttaaccttttgaacccctgtttttatgtgctcaaaaagtgtataatgactgtttcccttctagacattcagttcgcgttgtgtaaatatatgtatactctacaagttgggttaaacatattacactaaccgcaactgtactttccacaaaatggatgtttcttgtatgatttatgagcgcccgccgagtcgtttcgaaagtagcgaaatgagctgactctggagaaaactgaggcaggcgaaactttctttcggacggaagatggatcgccggatcgactctatccccgactgggatccatgtgctaaaataatgtgcactgcccttacacccagtcagaatcctcatcgttcaccatccccccccccccccccttccatgacggcgttgcaatgtccggactcgagtccggatttcggttctccttcggcatgtcgtagcgcattcatcaatgtccgtggcgcttccgttggtatatgtattcactgtactttgtacactgtggggctgcatgtaaaacactcgcacaccaatgcaacaatctttatcgagcacaaacataatcaatcaattggatttatgtgctccaactgaagataaaactaatcaatcttcgcccagcgacattcggagacagagttggggacgcccgacagtgaaggccatggtgagacggtggttacgctttggaatcccagtttacagctccagctccagcatcgggcacaatttatttttcagcccctctcaaaagtggttgctattaattgtaaagaagtttcgaggctgcgacgttgagagttgatcttggccacttgtgttgagtaaatgcaatttccggtctcaaagttcgagtgcagataagcctctctgccgataaggcggatggcttacataactctttaaaactaaatgattaatatttctttagacgcttaaggtagttgctaggtagaaaggctttgccatttttggaaatcccactcaaaaactatattaccttaccgtacaataataaatttaaataatcgtctcatacgtcagatgattatatattaggaattacgctcataaattgttcgtcagcgttatcttggtggagaaagataagataagatagggtcccagtattaagcgcagtgaaagtacagtccttcaatgacctgggccttctttaatagcttaatagcctgtaatagccttatcaaaaaatttactgtcgattgaaggacgactttaaaaatatattcatgatatgttgcagaaacaggttgtatatttaagatagtgaaaatgaatcataaaacaaaaactaaattacattcacttgaatgaaaacatattagtaacgaatgctttttacttatttctatgtcagtcggagtcaaactcttcggcatcagccaagtttacccttttcaagtgcgtttactgcgctcaactcctcggatccaacgatcgccccaagctgttagaatgccttcacgtggcctgtgcccagtgcgtgagcaccaagttctcagagctggaccgttccctgccaccattgatccattgtccggtatgcgacaatgcgtcgcagcaggagttcatcgtggacaaccagttcctcattgagcagtgcaccgccggagacagtggcgatggggtcggacttctgggtctgactggcgaaggtcagaagagttccgctgcggcgagcatccagtgcagcagctgctccgatggtgcggtggccacgtcgtggtgcgttgactgctcggagtatatttgcgacagttgtgtgcaagctcaccagcgcctgaagatcaccaaggatcacacgatcaagcccaaagatgaggccaacaacgagcagctggccggagctgccggggtggacaagttgcacatgtgccagttgcatccgcaggagaagctttcgctattttgcgagacctgcgacaagctcacttgtcgggattgccagttgagcgaccatcgggatcacaaatacaagtttgcgcacgagattgccacggaatcgcgacaggcgctgtccacactcgtttccgaaatcaactacaaacgcttccttctctcctcggcaaccaaggttattgatgaccgccaacagctgatccacgacaagaagaaagacctcatcaaggagatcacagccatggcggtgaagatcaccaatacggtcaatacccgaggcaagcagctaatcatgagattgaacgaggtgtgcgacagtaaactcaaggtgctggtggaaaagaaggagacgctgcagttgctctccgacaacacggaccactgcatcgattttatgcaaaacgctttggagaagggcagtgatttcgccatcctctcgagcaaaaagtctctggtgcgtcacctgcagaagctgaagtgccaacgggcggatattccaaatccggaaatcccagtgcgcattcaggtgcagcttaatcaggtttccgatctgcagaaggtaatctcccagctgggcatcattatcgtcgatggcaaaccatatccgcccacaccgtcgcccaacggaacccctcagccgcaacacccaccgcgccagcctcctagcccgaacatggctccacccctgcgtcctggtcttccacccggaatgccagctggcctctcgccgaacggaccgcccgtcaacttcggaccgcagaacggaccgccgctctacagcaatgctgcccagcagcaattcaacaatctgtccatgagtcgctcctttccgggtgacgggtcaggtaagggtatgaatgatttttatttttatattcatttattaatgcaaagctaactagggtatttaacttttgttttaatcttaattttataattaatgtaaagtatttatggtaattaaaattttgctgtttttttataataccaaaaatagagctctcaggtgttttatgttccatttaccgaagtttcttgtaatttcaatgtagtaacataccaactgcacgaaggagcaagccagctttcgcagaaagatgctacctccttccagacagtggaagttataatttggcgaacagctttgtaatgtaattttgtctgtgttgcagttcggttcgggggaatgccgccagtgggcatgcagcgacacggacaaccgcacgtgagctcctccacacatccgcagaatatgggtaagtgccaaaggcggactcttaggtaccaggctaggtggaaaattaattttctcttcgcgcaattccagacatcagcctgcggggcctactgaacaaccaggcggcgcagagcccgaatgcccacatggcatttaatggaccgcccagctatccgggtgggccgcaaggagcaccggctccggcccaccaaccgatgggcccgcagatgcgtccgcatttcatgcccggccagcagggtttctcgcagggcggtggaccaggaggcggtccgcgggacgccaactttatgaacagcaacgcgcgcttccagtcgcagtatcagcgtatggccaaccacgctcagcaggcggcggctgcggcggccatggccggtgcggcggggggcggaggcggccaaatcccttcgccgggtgcactgcagcgaccgcagatgatgtccaatcccatgcagaatgtgagtgccatgcagaatgtaagtctttaaagtagaactttcggaatagttagctaatctttcacttttattttgttttttttttttggtccacagtcgttggggtttcatgggagccaggctggctttaataccggcccaccacagacctccccgcagttaggcggcggaggcatgcacagcctggccaagtggcacatcccgcaatccgcgcaacagtcgaacagtgagtaattgaattaaacttctcacacccaattgatttactgtatttatgtaaattcaaatttggtaaaattttcatatgctttcgtcaaggtttttgcattacctattaattctttttgcgtttaatttcagtgtgttcgcaacaaggcccccttttgccttttgcgaatggccgccagacatcggaaaattttaaaatctcacttaaatctcccaacacgctcaaaaatagcaccccgcccagcctggggggcggtggtgcgggtcaccagggccacggaaacggctcctccagcgcccaactgaacgcagctgctctgggattggggccagccgtttcgatactctccaatgtcacctcgacgaatccaaagacgcccagtcccagcactcatgaggtgggtctatatacaatatattgttgttttgaatgcaattcgctaatctctttctcattaccagaacaccaaggacttcaccgaacccattgacaaggtgcgagatgactcaatcaacgatctaattgcaaccatagccaaactggactcgaatggggtacaggtattgccggagggtcggacaaagaccacctcgccgcaggtgcacagctcgacggatctgtccaacacacaggaaggtaagtttactcaccgtggtccgcctgcaaatgcttcatgtgcgtgtggcgttgtagttgccaaatctcatgttcgagtcttatccaaacggtggaggaagtcaatttgtttaagtccttgagtgcttgttataccaacttatgttcccaaccatcagtccttaatccgctttagttttagatgtttttggtgaaggttgaatattgatttgtgtggagtcttgtttgtggttgggaacgctgcgctgcatcattaccattagttttgcttgctggcttaccaaataaaattctaaaattctcataactttgctctctttatttctattttcaaaataaactcgatttccaaataaaatccaaacgcgcgccataaacgaacgacacgaataaattactaacaattgaatcaattccaaaccaacactccaacacactcaaaccaactcgtattaatcaacaacaacaatgcatacacgacacacccacatgaacacacacccgaaccatgaatgcgaatcaaaaactaatcatatcagttaataataaaaacgaacaaaaagatgatcccaacgaggactggtgcgccgtctgtctggatggaggcgagctgatgtgctgcgacaagtgtcccaaagttttccatcagaactgtcacatccctgcgatcagctcgttgccggacgagagcgagagctggcagtgcctactgtgcgtcaacatcaaggagctgacaaagacggagggaagtgaaaagagctcctccggcgagctgagcgccctcgaactccgcatcttgcagcgcatctgcctagaattgtactgccagtacgagcagagtctcaacttccgggagccggagtcgccagccaatacatcctactacgagattgtttccaggtaaattatagaattctttacataagttagattgtatctattggtatttgaaattatatattttaatattttaatgtatattgcagtcccatgtctctagatgttattcgcacccgcctggatccatccagtccgaatcactacaaggacattgcaggcttcgtgtccgacgtgcgtttaatattctccaacacatacctcttttaccaggtgaggtcaatagtaatacattctgatttgcgttccctactaatgcgctatttttcgactaggaggacacgaaaacttactccaatgccaagtacttggaaaatttcttcgaggagcagctggccaagtggttgccgcaatttgagggcaccaagccgcagggtaagcgaaatacctcaaactcgccggcgctgttaggtgtgaatgcaactggttcgccgtcgcccatcgagaacggacggaagagctgcggctcggcatcattgggtgacagcgatggtgcctgcttgccggccaagagggcgagacgctcggcgcacgaatagaacgagctaatgcccggcgggaagggcacagatggggagcagcaggcggagacgggacaagaacgtcgccaggaggagcagcagcaactgcccgctttcctagaggagatggacctggagatgccgcaacggccgcacagcctgggcagtagtgtaatccaagagagcgccgattatgttcttcagttattacacgcgtacgctgcagcctttggtctgtagatgcacatttcccttactccgctaacatagagttcgttgtttcaatgagaaatcgatccgtaggcttgcccccacaatcgtgagacacacatacatctaaacaactagaccttaaaaagcagaggtgcccgattaactttagggtctggaaatatttaaaaactgagttgtaaatagtaaaaccaaggcagtcatttgatatgattttatttttacgtacaatggaataaattgaatccccttgggcgatcgagaattgaaatgagatatgtttagctaaattttaagtgttgaatatccataaacattgatataaatataactataaatatgtatacctttcattagggatccactagagattaaaaataggtgtaagtgttcaagttcgagtgaaattgacatccttgtttcaccgatttgtgtttgggatggaacccgttctaaccaatctttgttggaattgtatttacttttgtgatagcgaaaaacaataagatgaacaaattaccgtttattaatatatattattattaccattaaattaaacaatgtggcaaagttctaccatcatttcgaatttgacatgtacgatatttattgactattgaccgctaaccccatccatcggtagaatctaattaggacgctcatgtgcagctccctaagctcctaagctcaccccaaaaaaacagcatacattcgtataccacttaagaagacacttgaaataagttagctgctttctagccctctaagtttcgcagatgaatcaaacccttaaattacgagtaagcgaattcaatgtttgaatgttgtacgtttgacgtagtaccatacagtaggtgtaaggagtgactagctctatttattaccaatcgatcggcgggacacgacttctgcaagcataagatgtacataaatatttccgacacagaatcagcttttcatatatatttatataaatatatatgtatgtatatctttagccgaccgtgtatgtagttttttataatgccggatcgaaactaaaataaaaccaaatcatctaaggtcgatattttcataaatgttttcaacgcaagacacaaagatcagacacgaacagaattaaaactggacaactacaagaatatattgcaaccaggcggtaaaacgtctgctactcctaatgacgccacaatagggaatatataggggcgcaaaaatattaatgaaattatatagccatgcataaatgtttgtacgacgtgctcgattagcggacgttgatgtgtgctagctatcctattgcaaaacacgagaaaagccaagtagatcatgcggggcatctgctaatgtttgtatgataaatgtgaaactatggaaattattttatctgttttagccgtaagttttacgataactaaagattaaccactgtatatgaatgtactacttactatcgagtggattatgaaataataaaaaaaaacttcctgtaagggctcgcatatcatttatatggcaaagaatccatcctctcgcagatattgctcctcgttttgaggctacaagaggaacctctcgtcgatgagggtcttgcgggagatgttccttcgcacccaatggcggaacacttggcgtagtaactgaaatggattattttttaattattttgttaatcagttttgaatcattatcctactatgtttagggcacaagcgccagcagctgcaattaacaaattagaggtcatcaagaagatcgacagcaccaagaggagttccaggacaaagatgtgcaaatggttacccaagaggagaacgcgagagaagctgaacgagtcgtctatgtaaaaggtacctctgtctgaaaatttaaatggatttaatacataaaagagaaacttcgaattgggtactcactttccgtgatgtagttgtctatttcgcagttcagcaattgttccacaaacgacttttccttaataatgtaatccatgtccttgatagcctgtcacaaatataaaaagagaacattccatcttagaataaaactgagcttacaaacagcaaaaagagttgagatttattagttactaggtattctagactgtagctcttaataatgctagaatctgtaagcttagtctttcgattttttagatcctcagatctcagatcttatacgggcaaactgacggattcggcttgatcgactaggccatattaactggttacatacttcaatggatcaattaaggtagactttaagcttacatggtcgataaaggcgcagaagaagcgattgacgctggcgtacgcaatggaggtacgttccatctgtccatcgatgctcggaacgatgtccttttggtagagcatggtctgcgaaagggtgccggtcagactgcgctgaaagggaagcaggagtcgctccaggtagatgctatagtaaaaacactatgataatcaatatcctcattggagtaaagtcaaaatcttactgaaggtttctgggaggcaggatgacgtacgcctgcttgtccgagtccattagcaatcctcgtcgcccacacatggtctgggttctctgcagctgcaaaatcatcgaggacatatccgtatcggcaaagccgtgcggagatcgtccgtggatgtagtaaccaaatcctggctccgtcagtgagaacagagagatgttggccagactgcacaggtcgatgaacttctggaggggattggctataaacagttggtggcctattatctgaagtagatatgtgagcagataagctgccgctataaggcagcaacgtagaaaaatgtcacccttggtaaacctctccagaaactgatagccagcgatg

SEQ ID NO: 10832 - DNA, 6124 bp, DROSOPHILA
agaagaagcgtccaacgagagcaaacgccgtgagaccgtgtgttttcgcagcgaattacgccaataaaaccgcactaagagcgcgctcgcagcgcgaataaagaatagcagccgcgtatggacgaaatgcggcacgaatcgctggaaaaatcgacggccagaccgaaaaatagcagcgaaattcgagcgaacgtcgtgtataagtaaaacgaaagttgtgtcgctctgtgcgaaagagagagggagaacccaatatttttgcaagccagaagtcgaaggtgaaattaaaatgcattagccacccaattgaagaggagtcaactacgaacaaaactttaagaatcagcgaaaaatcgtttgtgaacatccatacaagcacaaatcgttgtttttgcctgctctcgtgtagttcctgtgtattggtgcgcgcgccctgtgtgtgtttgtgcgtgtgcgtgcgtgtaagcattggaatggattaactacccaactaattccaaaacaataataccgcaacataatcgcaatagtcatgccgtttcaaggcgacagcctttagggaaacattcggtcggtcggtcagtcaaccaaaaatcagttgctataattagcacgcccacgttttaatttcaacgatcgccagcaaccgcctacgcggttaaatcgcaggacttcgccaacatggatatggatttggagcagctaaagaacgacttcctgccgcttatcgccgggatcaagcaggagcagctggatgccgtgcccacggatgccctgccccagatgagcacaccaaacacggccagcggtgcgcccacaacctcgtcattgagctcctcttcgctgagtctgagcaacccctgcgacagtgccgagaaaaggatgcaacaatctttatcgagcacaaacataatcaatcaattggatttatgtgctccaactgaagataaaactaatcaatcttcgcccagcgacattcggagacagagttggggacgcccgacagtgaaggccatgtttacccttttcaagtgcgtttactgcgctcaactcctcggatccaacgatcgccccaagctgttagaatgccttcacgtggcctgtgcccagtgcgtgagcaccaagttctcagagctggaccgttccctgccaccattgatccattgtccggtatgcgacaatgcgtcgcagcaggagttcatcgtggacaaccagttcctcattgagcagtgcaccgccggagacagtggcgatggggtcggacttctgggtctgactggcgaaggtcagaagagttccgctgcggcgagcatccagtgcagcagctgctccgatggtgcggtggccacgtcgtggtgcgttgactgctcggagtatatttgcgacagttgtgtgcaagctcaccagcgcctgaagatcaccaaggatcacacgatcaagcccaaagatgaggccaacaacgagcagctggccggagctgccggggtggacaagttgcacatgtgccagttgcatccgcaggagaagctttcgctattttgcgagacctgcgacaagctcacttgtcgggattgccagttgagcgaccatcgggatcacaaatacaagtttgcgcacgagattgccacggaatcgcgacaggcgctgtccacactcgtttccgaaatcaactacaaacgcttccttctctcctcggcaaccaaggttattgatgaccgccaacagctgatccacgacaagaagaaagacctcatcaaggagatcacagccatggcggtgaagatcaccaatacggtcaatacccgaggcaagcagctaatcatgagattgaacgaggtgtgcgacagtaaactcaaggtgctggtggaaaagaaggagacgctgcagttgctctccgacaacacggaccactgcatcgattttatgcaaaacgctttggagaagggcagtgatttcgccatcctctcgagcaaaaagtctctggtgcgtcacctgcagaagctgaagtgccaacgggcggatattccaaatccggaaatcccagtgcgcattcaggtgcagcttaatcaggtttccgatctgcagaaggtaatctcccagctgggcatcattatcgtcgatggcaaaccatatccgcccacaccgtcgcccaacggaacccctcagccgcaacacccaccgcgccagcctcctagcccgaacatggctccacccctgcgtcctggtcttccacccggaatgccagctggcctctcgccgaacggaccgcccgtcaacttcggaccgcagaacggaccgccgctctacagcaatgctgcccagcagcaattcaacaatctgtccatgagtcgctcctttccgggtgacgggtcagttcggttcgggggaatgccgccagtgggcatgcagcgacacggacaaccgcacgtgagctcctccacacatccgcagaatatggacatcagcctgcggggcctactgaacaaccaggcggcgcagagcccgaatgcccacatggcatttaatggaccgcccagctatccgggtgggccgcaaggagcaccggctccggcccaccaaccgatgggcccgcagatgcgtccgcatttcatgcccggccagcagggtttctcgcagggcggtggaccaggaggcggtccgcgggacgccaactttatgaacagcaacgcgcgcttccagtcgcagtatcagcgtatggccaaccacgctcagcaggcggcggctgcggcggccatggccggtgcggcggggggcggaggcggccaaatcccttcgccgggtgcactgcagcgaccgcagatgatgtccaatcccatgcagaatgtgagtgccatgcagaatacctccccgcagttaggcggcggaggcatgcacagcctggccaagtggcacatcccgcaatccgcgcaacagtcgaacatgtgttcgcaacaaggcccccttttgccttttgcgaatggccgccagacatcggaaaattttaaaatctcacttaaatctcccaacacgctcaaaaatagcaccccgcccagcctggggggcggtggtgcgggtcaccagggccacggaaacggctcctccagcgcccaactgaacgcagctgctctgggattggggccagccgtttcgatactctccaatgtcacctcgacgaatccaaagacgcccagtcccagcactcatgagaacaccaaggacttcaccgaacccattgacaaggtgcgagatgactcaatcaacgatctaattgcaaccatagccaaactggactcgaatggggtacaggtattgccggagggtcggacaaagaccacctcgccgcaggtgcacagctcgacggatctgtccaacacacaggaagatgatcccaacgaggactggtgcgccgtctgtctggatggaggcgagctgatgtgctgcgacaagtgtcccaaagttttccatcagaactgtcacatccctgcgatcagctcgttgccggacgagagcgagagctggcagtgcctactgtgcgtcaacatcaaggagctgacaaagacggagggaagtgaaaagagctcctccggcgagctgagcgccctcgaactccgcatcttgcagcgcatctgcctagaattgtactgccagtacgagcagagtctcaacttccgggagccggagtcgccagccaatacatcctactacgagattgtttccagtcccatgtctctagatgttattcgcacccgcctggatccatccagtccgaatcactacaaggacattgcaggcttcgtgtccgacgtgcgtttaatattctccaacacatacctcttttaccaggaggacacgaaaacttactccaatgccaagtacttggaaaatttcttcgaggagcagctggccaagtggttgccgcaatttgagggcaccaagccgcagggtaagcgaaatacctcaaactcgccggcgctgttaggtgtgaatgcaactggttcgccgtcgcccatcgagaacggacggaagagctgcggctcggcatcattgggtgacagcgatggtgcctgcttgccggccaagagggcgagacgctcggcgcacgaatagaacgagctaatgcccggcgggaagggcacagatggggagcagcaggcggagacgggacaagaacgtcgccaggaggagcagcagcaactgcccgctttcctagaggagatggacctggagatgccgcaacggccgcacagcctgggcagtagtgtaatccaagagagcgccgattatgttcttcagttattacacgcgtacgctgcagcctttggtctgtagatgcacatttcccttactccgctaacatagagttcgttgtttcaatgagaaatcgatccgtaggcttgcccccacaatcgtgagacacacatacatctaaacaactagaccttaaaaagcagaggtgcccgattaactttagggtctggaaatatttaaaaactgagttgtaaatagtaaaaccaaggcagtcatttgatatgattttatttttacgtacaatggaataaattgaatccccttgggcgatcgagaattgaaatgagatatgtttagctaaattttaagtgttgaatatccataaacattgatataaatataactataaatatgtatacctttcattagggatccactagagattaaaaataggtgtaagtgttcaagttcgagtgaaattgacatccttgtttcaccgatttgtgtttgggatggaacccgttctaaccaatctttgttggaattgtatttacttttgtgatagcgaaaaacaataagatgaacaaattaccgtttattaatatatattattattaccattaaattaaacaatgtggcaaagttctaccatcatttcgaatttgacatgtacgatatttattgactattgaccgctaaccccatccatcggtagaatctaattaggacgctcatgtgcagctccctaagctcctaagctcaccccaaaaaaacagcatacattcgtataccacttaagaagacacttgaaataagttagctgctttctagccctctaagtttcgcagatgaatcaaacccttaaattacgagtaagcgaattcaatgtttgaatgttgtacgtttgacgtagtaccatacagtaggtgtaaggagtgactagctctatttattaccaatcgatcggcgggacacgacttctgcaagcataagatgtacataaatatttccgacacagaatcagcttttcatatatatttatataaatatatatgtatgtatatctttagccgaccgtgtatgtagttttttataatgccggatcgaaactaaaataaaaccaaatcatctaaggtcgatattttcataaatgttttcaacgcaagacacaaagatcagacacgaacagaattaaaactggacaactacaagaatatattgcaaccaggcggtaaaacgtctgctactcctaatgacgccacaatagggaatatataggggcgcaaaaatattaatgaaattatatagccatgcataaatgtttgtacgacgtgctcgattagcggacgttgatgtgtgctagctatcctattgcaaaacacgagaaaagccaagtagatcatgcggggcatctgctaatgtttgtatgataaatgtgaaactatggaaattattttatctgttttagccgtaagttttacgataactaaagattaaccactgtatatgaatgtactacttactatcgagtggattatgaaataataaaaaaaaacttcctgtaagggctcgcatatcatttatatggcaaagaatccatcctctcgcagatattgctcctcgttttgaggctacaagaggaacctctcgtcgatgagggtcttgcgggagatgttccttcgcacccaatggcggaacacttggcgtagtaatatgtttagggcacaagcgccagcagctgcaattaacaaattagaggtcatcaagaagatcgacagcaccaagaggagttccaggacaaagatgtgcaaatggttacccaagaggagaacgcgagagaagctgaacgagtcgtctatgtaaaaggtacctctgt

SEQ ID NO: 10833 - protein, 1139 aa, DROSOPHILA
MDLEQLKNDFLPLIAGIKQEQLDAVPTDALPQMSTPNTASGAPTTSSLSSSSLSLSNPCDSAEKRMQQSLSSTNIINQLDLCAPTEDKTNQSSPSDIRRQSWGRPTVKAMFTLFKCVYCAQLLGSNDRPKLLECLHVACAQCVSTKFSELDRSLPPLIHCPVCDNASQQEFIVDNQFLIEQCTAGDSGDGVGLLGLTGEGQKSSAAASIQCSSCSDGAVATSWCVDCSEYICDSCVQAHQRLKITKDHTIKPKDEANNEQLAGAAGVDKLHMCQLHPQEKLSLFCETCDKLTCRDCQLSDHRDHKYKFAHEIATESRQALSTLVSEINYKRFLLSSATKVIDDRQQLIHDKKKDLIKEITAMAVKITNTVNTRGKQLIMRLNEVCDSKLKVLVEKKETLQLLSDNTDHCIDFMQNALEKGSDFAILSSKKSLVRHLQKLKCQRADIPNPEIPVRIQVQLNQVSDLQKVISQLGIIIVDGKPYPPTPSPNGTPQPQHPPRQPPSPNMAPPLRPGLPPGMPAGLSPNGPPVNFGPQNGPPLYSNAAQQQFNNLSMSRSFPGDGSVRFGGMPPVGMQRHGQPHVSSSTHPQNMDISLRGLLNNQAAQSPNAHMAFNGPPSYPGGPQGAPAPAHQPMGPQMRPHFMPGQQGFSQGGGPGGGPRDANFMNSNARFQSQYQRMANHAQQAAAAAAMAGAAGGGGGQIPSPGALQRPQMMSNPMQNVSAMQNTSPQLGGGGMHSLAKWHIPQSAQQSNMCSQQGPLLPFANGRQTSENFKISLKSPNTLKNSTPPSLGGGGAGHQGHGNGSSSAQLNAAALGLGPAVSILSNVTSTNPKTPSPSTHENTKDFTEPIDKVRDDSINDLIATIAKLDSNGVQVLPEGRTKTTSPQVHSSTDLSNTQEDDPNEDWCAVCLDGGELMCCDKCPKVFHQNCHIPAISSLPDESESWQCLLCVNIKELTKTEGSEKSSSGELSALELRILQRICLELYCQYEQSLNFREPESPANTSYYEIVSSPMSLDVIRTRLDPSSPNHYKDIAGFVSDVRLIFSNTYLFYQEDTKTYSNAKYLENFFEEQLAKWLPQFEGTKPQGKRNTSNSPALLGVNATGSPSPIENGRKSCGSASLGDSDGACLPAKRARRSAHE

SEQ ID NO: 10834 - DNA, 8843 bp, DROSOPHILA
gccacatgcgctggcacactccttgccacaagtgtcgcattttatggcctgcgaactgggggggcacatcaaccaaatgccttgataagccaaagatttagttacaaaacctaaacaatgattgctcttagttgaaactcacatagcaagatgatctggaagtgagccagccaatgcatcgttgtcttagtcattggtcggccgtctgctcagaatgctgtgccactcatatgatcttcgcttggtgtcctgtttcgtatccctgagaaagcgcaaatgaaaggaccgagttgccggctcctgactttatatactcatcggctgcaggacagttgcccactttgagatgctggcattcaaagtggtcaatgaagcgtgtggcggatgaatagccaggacgaggactccagtgggcatgtgaacatggagcgcatattaagtaagagcacacagacaattgcagcttgcgcaacaagtttatgggtttattttggggttgtttggggcgggggtcgtttggcagccgcaaatcaaagcagctggacgcaggttgtaaaacttcttaatctagttggcaagtggcaagttaagcatattaaaattgtgagcaacagtcatcaacagtcagtggcaggactactgatttccctagaatgaatacggacgatattgggtgttgttacatagtttgtgcgctagtcagagtaataatttttcttattttatcctaatttttaagtatttagtcattgcacttaattttaatgccgcaggcgtatttgtaacggtcttctatttgaatttaaacttacgatattcgacattcaacatattttccaaagtgtggcaacaccagcaagtttccttcatcagtgtgaccgcttttagtatttttcagtattttcggtggaagaagaagcctgcccactctgcgctttgggaattgaataaacgtaaacattaacttaactccagctctagtcataaatatctattgaatatgtgggagccgccacgattgagtgcatctctgcgcgccaagacggagctggaggcccgtagccggcgcttgaacgtcctgcggcaggcgagaaccacctctgctgcttccacgacgacgaacagccaaaagtgagtagcgatttcaccacctgtgaaatttcgttcaattccgctcctctccagcaaggaggagcagaccatcgcacggctgctggctcagatgccaaccgaaaagcagccggccgctaaggtgcagctacagaagctgcgcaatctggtgcaggagtgtatgggctacgaggagcagccacaggtggtggagcacgcggcgctcttcctcttctggctgctgctggatcagcgggtgctcctggtggccaccacacagcggctacacggcatgttcggacagactttcgatcgcaagaagacccaaattcacgactgcgtccaggccatcggcgatctgctggaggatcacgaaagatccgcgctcaagcggtggcgacagacgcatcacaaggtgcctggagtgggtccactatggggcgcccatatacatgtcaagtgcacgccctccgagtggatggacatcagcctgctgactgatctagcgccggatgcgctactcaaaaaccgaactgtcaacaagttctctatgaagcacacaaccaaggccgccccagtggcgtccacgagctcggaagccgccaagttgagtccagaactgcagactctgcttgaaatctccgcaaagctggacgacgagcacctaataattcgcgtcggcgacattctcggttcccagcgcagcagcgaggtgttgcaaaatgaacttatggaaatcctaggatttgattactttgaattagtagaaaaactgctcatggaacgggacaagatcgctcgccaattagatcagttcgccacacgatcccgccgcgtcatggaggtgaaacagaagcgcatggaggcggctgccagtggtggagctgcagagcggcgtcccaccgtcgccagcgccgtcgtagttcagtcggcccaggagaagcagctgagcaaaatgcagcggcgggaggagaagaaactgcaacgcattatgcgaagcattaaggacgaagaggccgaggatgatccgaattgtgcggttgccgtttccgttcaacaattgcgcatgcagcaccagcgaaagctcttggaggcagcgcagcgggagcctctgttgctcagcactaaggcggcgaaggcggaatacaaacaatcctcgtacaaccagcccatccactatccctatgtgttcgacagccagctgctggcgaaacagcacgctggctttataggtggcagcagaatcactctgcccgataacgcacagcgcatagataacaaacagtgggaggaggtcaagatcccagcgagtgagccacctccgctctctgttggcaacaagcgcgttcaaatcgaagaattggacgacgtgggtagactggcctttgccaactgcaaggagctgaatcgcatccagtcagtggtctttccggttgcctatcacagcaatgaaaatatgctggtttgcgcgcccacgggagccggaaagacgaacgtggcaatgctttccattgtgcacaccatccgttgccacctggaacagggagtcattaaccgggacgaattcaagatcgtctacattgcgcccatgaaggcattggccgcggaaatggttgataacttttcgaagcgcctgaaatctttacaaatcgctgtgcgtgaactgacgggtgatatacagctgaccaaggcggaaatggctgccacccagatactagtcaccacgccggagaaatgggatgtggtaaccagaaagggtaataataatattctatttttttttttgcaatatatgctaacaatattactttccaggcagcggcgacgtggctttgataagcctggtagagctactcatcattgatgaagtgcatcttttgcacggtgagcgaggtcccgttgtggaggcattggtggctcgaaccctccgccttgttgagtcctcgcaatcaatgattcgcatcgttggcctatccgcaacccttccaaactacatcgatgtggctcacttcctgcgggtgaatcctatgaagggcctattttatttcgactcgcgcttccgtcctgttccactggacaccaattttgtgggcatcaagtcggtgaagcagctgcagcagatcgctgatatggaccagtgctgttaccaaaagtgcgttgagatggtacaggaaggtcatcagattatggtctttgtccacgcccggaacgccacggtgcgaacggcaaatgtgattcgcgaactggcccagcagaacaataccagtgccctgtttcttcccaaggattccgctgctcacggacttgcaacgcgttcgatacagagaagtcggaacaagcaactggtggagctattctcttgcggcttggccatgcaccatgcgggtatgctacgcgccgatcgtcagatggttgagaagtactttgtcgaaggtcacatctcggtgctggtctgcacggccacgcttgcctggggtgtcaatctgccggctcacgctgtcattatccgaggcacagatatatacgatgccaagcatggtagctttgtggacctgggcatactcgatgtgctgcagatctttggacgcgccggtcggccacagttcgacaagagtggagtgggtaccatcatcaccagctatgataagctgaatcactacctgtcgctgctgaccaatcaattccccatcgagtccaacttcgtcaattgtctggccgacaatctgaatgcggaaattggtcttggcacaattaccaatgtggacgaagctatcgagtggctcagttacacgtaagttgatacagaacttcattagatggatcatttgttaatattcttcattttataaaggtacttgtttgtgcgcatgagaataaatcctcacgtgtacggtatcgagtattcggagctggagaaggatcccacgctggaagcccgccgccgtgctcttatcatgtccgcagcgatgagtctggacaaggctcgaatgatgcggtttaaccagcgcaccatggacatgaacatcacggacttaggtcgcactgcatcttatttctacattaagtacgacactgtggaaacttttaacgagctgatgaagccatttatgacccaggctgagattttggccatgatttcccaggcgcaggagtttcagcaactcaaggtacgcgatgacgagatggaggaattggacgaactgaaaaacgcctattgtaagataaagccatacggaggaagtgagaatgtacacggcaaggtaacaattgatcttttgcaatgcttttgccaagcttaatttggttttgatttgctaggtgaacattctgattcagacatatctttccaatggttacgtgaagtccttttcactgagctccgacatgtcatatattaccacgaatataggaaggataagcagagcgctattctccattgtactgcgccagaataatgcagtactgtcgggaaacatgctgcagctttgcaagatgtttgaacgtcgccaatgggactttgattgccacctaaaacagttcccaaccattaacgctgagaccatcgacaaacttgaacgacgcggtctgagtgtctataggctgagggatatggagcatcgcgagctaaaggagtggcttcgcagcaatacctacgcagacctggttatccggtcggcgcacgaactacccttgttggaagtggaagcaagtctgcagccaattactcgaacggtgctgcgaatcaaggtggacatttggcccagtttcacatggaacgaccgggttcatggaaagacgtgccaaagcttctggctgtggattgaagatccggagtcgaactacatttaccactcggagctgtttcaggtcacccggaagttggtgatgagtggccagtcgcagcagctggtaatgaccattcctctgaaggagccactgccgccacaatactacatacgagtgagcagcgataactggctgggaagtactacatgcattccattatcatttcaacatcttgtgctgccggaacaccacccgccactaacggagcttctgcccctccgcccactcccagtcagctgcctcaagaacgttgtctacgaatccctctacaaattcacgcactttaatcccattcagacgcagatctttcactgcctgtaccacaccgacaacaatgtgctcttaggcgctcccactggcagtggtaagaccattgtggcggagatagccatcttcagggcactcaaccagaatcccaagtgcaaagtggtgtatatagctccacttaaagcgttggtgaaggaacgcatagcggattgggagcaacgcttccagcgctcctctctgggtctcaaggttgttgagctaacgggcgacgttactcccgacattcaggccatccgagagtctcaactaatcgttaccacgccggagaagtgggacggcatcagtcggtcttggcagacccgcgaatacgtacagcacgtgtcgctaatcgtcatcgatgagatccacctgctgggagaggatcgaggaccggtcatcgaggtgattgtatcgcgaaccaattttatcagttcccataccggtcgggctatccgaatcgtgggattgtccacggcactggctaacgctcaggatctggccaactggctgggaatcaataagatgggactgtacaacttcaagccctcggtgcgtccagtgcctctccaggtgcacatcaatggcttccctggaaagcactactgtcctcgcatggcaacaatgaaccggcccacgtttcaggctattcgcacctactccccctgtgagcccaccatcgtctttgtgtcctcgcgtcggcagacgcgtctcacggcgctggacctgattacctttgtggccggcgaatccaatcccaagcagttcctgcacatacccgaagacgaaatcgagctgatcttgcagaatattcgtgaacagaaccttaaattctgcttagctttcggaattggtctacatcacgccggtttgcaggaacaggatcgaaagtgtgttgaggagctgttcctcaataggaagatccagatcctggtggccacagccacactggcgtggggcgttaatttgccagctcatctggtggtgatcaaaggtaccgaatactttgacgggaaggtgaagaagtacgtggacatgcccattaccgacgtgcttcaaatgatgggacgagccggacggccgcagttcgacaatgaaggtgtggccgtcgttctggtgcacgacgaaaagaagaatttctacaaaaagtttctgtacgatccattcccggtagagtccagtctgctgggagtgctaccggagcacataaacgctgaaatcgttgctggaactgttcagtcaaagcaggccgctctggattatcttacgtggacgtacttcttcaggagattgctccgaaacccgtcgtattaccaactgcaggacatagaaccggagaatgtaaataactttatgtccaatctggttgagcgcgtggtctatgagctttctgccgctgcctgtctggtggagcgcgatggatgtctgataccaacattcttggggcgaatcagttcctattactacctgtcgtaccgcacaatgaagcatttcctggaggatttgcagcctggcatgaacaccaagaaagttctcctcgccatagccgattcctatgaatttgatcagctgcctgttcggcacaacgaggataagcacaatgaggaaatggctgaagtaagccgctttagaccgccctcatcgtcttgggattcttcgtacaccaagactttcctgctactccaggcccactttgcacggcagtcccttccgaattcggattacctaacagacacaaagtcggctctggacaacgccactcgagtgatgcaagccatggtggactacacagcggagcggggatggctctcgacgactctggttgtgcagcaactgatgcagagcgtcattcaggcccgatggttcgacggtagtgagttcctaacgttgccaggagtgaacgaggacaatctcgatgcctttttgaacataccacacgatgactatgactacttaacactacccgtgctgaaggagctgtgcaaacaagagtacgaagtactggcgaagccactgcgagatgccttcgaggagcacgagatcgaaaagatgtataaggtacgattcgaattaaccaaattgctgaacgatattcaaatggtactttaaacatttccaggtaatccaagacttgcccgagatagcaattcaaatattcgtagagggtcggcatatggagaatgagtatgccaagcgaccgctctcactttctgatgacacgaggggcgaatggatgtccctgcatgccaatgaggactacgttctcatagtaaacttgcagcggcttaatgtcagtggacagcgaagaggtggtggacaaagctacacggtgcactgccccaagtatccaaagcccaagaatgaagcgtggttcctgaccctgggctcccaggccaacgacgagctcctcgccatgaagcgtgtatccattcgcggacagcgctgcaccaaccgcatttcgttccaggcaactccgcgacttggacgtctacagcttacgctttatttaatgtccgactgccttatgggctttgaccagcagtacgacctgcaattcgagatcattgatgcaaaagaagtctaagggccctactagagattaaatctaaagtgtaccgtagcattctgtagagttgaggcttaacttttagttaatggagttcatatcgcctatgaacgttttccacaatcactgttatcacctagagttcgtagtaaaactgaacttgcgtatttattgtgtgatcctccaagacatgtataacatttttatcattagtaacttgcttcgagacgaagctcctttgttagccaaccatgtagcacctacatgcatgaatcactttctatgaatttatgaagtaactatttttattgtgtaaagttaataaaatttgtattgaaagcgcagctatgtttttcaatttaatttttttatgtgatcaatataaataccacttagccatccataactatcgacatgttaactacatttattctacgtggcacagtggcggcacctaacgttcacttgtataatgaagaaaatagttcatggtgcgtgtcaaaaaggaaacgtaccaagagacagcattaaataaaacttttattagtattaattgatttatataattctaagttgggtgatgacaaagtaagctaagaaagttaagaatgataaaataaaaaaataaaacaggttaaacagctttaagcctatatgcatagtaataattagttgttaagaccgaaataggctttttaaatagtcccaatattccagtcagaaacgtttttcgctgtgaaaatatgtaaacgacccacctcatccgaatgtatttctacgtgcgccgtcttttaatggcgggttttatccgagtcctgaccatttctggacgcttctgcactcctgcccttctgccccacacatggcgctgagaaatgaaagcatattcaagtgattaatgcagatggccaccacatcgggcaaatgcggatccgctggtccccggggagtcgccgactaggataaggagctggcctcctcccacagcagtcgagtaattaaacttgattaattgtct

SEQ ID NO: 10835 - DNA, 6552 bp, DROSOPHILA
atgtgggagccgccacgattgagtgcatctctgcgcgccaagacggagctggaggcccgtagccggcgcttgaacgtcctgcggcaggcgagaaccacctctgctgcttccacgacgacgaacagccaaaacaaggaggagcagaccatcgcacggctgctggctcagatgccaaccgaaaagcagccggccgctaaggtgcagctacagaagctgcgcaatctggtgcaggagtgtatgggctacgaggagcagccacaggtggtggagcacgcggcgctcttcctcttctggctgctgctggatcagcgggtgctcctggtggccaccacacagcggctacacggcatgttcggacagactttcgatcgcaagaagacccaaattcacgactgcgtccaggccatcggcgatctgctggaggatcacgaaagatccgcgctcaagcggtggcgacagacgcatcacaaggtgcctggagtgggtccactatggggcgcccatatacatgtcaagtgcacgccctccgagtggatggacatcagcctgctgactgatctagcgccggatgcgctactcaaaaaccgaactgtcaacaagttctctatgaagcacacaaccaaggccgccccagtggcgtccacgagctcggaagccgccaagttgagtccagaactgcagactctgcttgaaatctccgcaaagctggacgacgagcacctaataattcgcgtcggcgacattctcggttcccagcgcagcagcgaggtgttgcaaaatgaacttatggaaatcctaggatttgattactttgaattagtagaaaaactgctcatggaacgggacaagatcgctcgccaattagatcagttcgccacacgatcccgccgcgtcatggaggtgaaacagaagcgcatggaggcggctgccagtggtggagctgcagagcggcgtcccaccgtcgccagcgccgtcgtagttcagtcggcccaggagaagcagctgagcaaaatgcagcggcgggaggagaagaaactgcaacgcattatgcgaagcattaaggacgaagaggccgaggatgatccgaattgtgcggttgccgtttccgttcaacaattgcgcatgcagcaccagcgaaagctcttggaggcagcgcagcgggagcctctgttgctcagcactaaggcggcgaaggcggaatacaaacaatcctcgtacaaccagcccatccactatccctatgtgttcgacagccagctgctggcgaaacagcacgctggctttataggtggcagcagaatcactctgcccgataacgcacagcgcatagataacaaacagtgggaggaggtcaagatcccagcgagtgagccacctccgctctctgttggcaacaagcgcgttcaaatcgaagaattggacgacgtgggtagactggcctttgccaactgcaaggagctgaatcgcatccagtcagtggtctttccggttgcctatcacagcaatgaaaatatgctggtttgcgcgcccacgggagccggaaagacgaacgtggcaatgctttccattgtgcacaccatccgttgccacctggaacagggagtcattaaccgggacgaattcaagatcgtctacattgcgcccatgaaggcattggccgcggaaatggttgataacttttcgaagcgcctgaaatctttacaaatcgctgtgcgtgaactgacgggtgatatacagctgaccaaggcggaaatggctgccacccagatactagtcaccacgccggagaaatgggatgtggtaaccagaaagggcagcggcgacgtggctttgataagcctggtagagctactcatcattgatgaagtgcatcttttgcacggtgagcgaggtcccgttgtggaggcattggtggctcgaaccctccgccttgttgagtcctcgcaatcaatgattcgcatcgttggcctatccgcaacccttccaaactacatcgatgtggctcacttcctgcgggtgaatcctatgaagggcctattttatttcgactcgcgcttccgtcctgttccactggacaccaattttgtgggcatcaagtcggtgaagcagctgcagcagatcgctgatatggaccagtgctgttaccaaaagtgcgttgagatggtacaggaaggtcatcagattatggtctttgtccacgcccggaacgccacggtgcgaacggcaaatgtgattcgcgaactggcccagcagaacaataccagtgccctgtttcttcccaaggattccgctgctcacggacttgcaacgcgttcgatacagagaagtcggaacaagcaactggtggagctattctcttgcggcttggccatgcaccatgcgggtatgctacgcgccgatcgtcagatggttgagaagtactttgtcgaaggtcacatctcggtgctggtctgcacggccacgcttgcctggggtgtcaatctgccggctcacgctgtcattatccgaggcacagatatatacgatgccaagcatggtagctttgtggacctgggcatactcgatgtgctgcagatctttggacgcgccggtcggccacagttcgacaagagtggagtgggtaccatcatcaccagctatgataagctgaatcactacctgtcgctgctgaccaatcaattccccatcgagtccaacttcgtcaattgtctggccgacaatctgaatgcggaaattggtcttggcacaattaccaatgtggacgaagctatcgagtggctcagttacacgtacttgtttgtgcgcatgagaataaatcctcacgtgtacggtatcgagtattcggagctggagaaggatcccacgctggaagcccgccgccgtgctcttatcatgtccgcagcgatgagtctggacaaggctcgaatgatgcggtttaaccagcgcaccatggacatgaacatcacggacttaggtcgcactgcatcttatttctacattaagtacgacactgtggaaacttttaacgagctgatgaagccatttatgacccaggctgagattttggccatgatttcccaggcgcaggagtttcagcaactcaaggtacgcgatgacgagatggaggaattggacgaactgaaaaacgcctattgtaagataaagccatacggaggaagtgagaatgtacacggcaaggtgaacattctgattcagacatatctttccaatggttacgtgaagtccttttcactgagctccgacatgtcatatattaccacgaatataggaaggataagcagagcgctattctccattgtactgcgccagaataatgcagtactgtcgggaaacatgctgcagctttgcaagatgtttgaacgtcgccaatgggactttgattgccacctaaaacagttcccaaccattaacgctgagaccatcgacaaacttgaacgacgcggtctgagtgtctataggctgagggatatggagcatcgcgagctaaaggagtggcttcgcagcaatacctacgcagacctggttatccggtcggcgcacgaactacccttgttggaagtggaagcaagtctgcagccaattactcgaacggtgctgcgaatcaaggtggacatttggcccagtttcacatggaacgaccgggttcatggaaagacgtgccaaagcttctggctgtggattgaagatccggagtcgaactacatttaccactcggagctgtttcaggtcacccggaagttggtgatgagtggccagtcgcagcagctggtaatgaccattcctctgaaggagccactgccgccacaatactacatacgagtgagcagcgataactggctgggaagtactacatgcattccattatcatttcaacatcttgtgctgccggaacaccacccgccactaacggagcttctgcccctccgcccactcccagtcagctgcctcaagaacgttgtctacgaatccctctacaaattcacgcactttaatcccattcagacgcagatctttcactgcctgtaccacaccgacaacaatgtgctcttaggcgctcccactggcagtggtaagaccattgtggcggagatagccatcttcagggcactcaaccagaatcccaagtgcaaagtggtgtatatagctccacttaaagcgttggtgaaggaacgcatagcggattgggagcaacgcttccagcgctcctctctgggtctcaaggttgttgagctaacgggcgacgttactcccgacattcaggccatccgagagtctcaactaatcgttaccacgccggagaagtgggacggcatcagtcggtcttggcagacccgcgaatacgtacagcacgtgtcgctaatcgtcatcgatgagatccacctgctgggagaggatcgaggaccggtcatcgaggtgattgtatcgcgaaccaattttatcagttcccataccggtcgggctatccgaatcgtgggattgtccacggcactggctaacgctcaggatctggccaactggctgggaatcaataagatgggactgtacaacttcaagccctcggtgcgtccagtgcctctccaggtgcacatcaatggcttccctggaaagcactactgtcctcgcatggcaacaatgaaccggcccacgtttcaggctattcgcacctactccccctgtgagcccaccatcgtctttgtgtcctcgcgtcggcagacgcgtctcacggcgctggacctgattacctttgtggccggcgaatccaatcccaagcagttcctgcacatacccgaagacgaaatcgagctgatcttgcagaatattcgtgaacagaaccttaaattctgcttagctttcggaattggtctacatcacgccggtttgcaggaacaggatcgaaagtgtgttgaggagctgttcctcaataggaagatccagatcctggtggccacagccacactggcgtggggcgttaatttgccagctcatctggtggtgatcaaaggtaccgaatactttgacgggaaggtgaagaagtacgtggacatgcccattaccgacgtgcttcaaatgatgggacgagccggacggccgcagttcgacaatgaaggtgtggccgtcgttctggtgcacgacgaaaagaagaatttctacaaaaagtttctgtacgatccattcccggtagagtccagtctgctgggagtgctaccggagcacataaacgctgaaatcgttgctggaactgttcagtcaaagcaggccgctctggattatcttacgtggacgtacttcttcaggagattgctccgaaacccgtcgtattaccaactgcaggacatagaaccggagaatgtaaataactttatgtccaatctggttgagcgcgtggtctatgagctttctgccgctgcctgtctggtggagcgcgatggatgtctgataccaacattcttggggcgaatcagttcctattactacctgtcgtaccgcacaatgaagcatttcctggaggatttgcagcctggcatgaacaccaagaaagttctcctcgccatagccgattcctatgaatttgatcagctgcctgttcggcacaacgaggataagcacaatgaggaaatggctgaagtaagccgctttagaccgccctcatcgtcttgggattcttcgtacaccaagactttcctgctactccaggcccactttgcacggcagtcccttccgaattcggattacctaacagacacaaagtcggctctggacaacgccactcgagtgatgcaagccatggtggactacacagcggagcggggatggctctcgacgactctggttgtgcagcaactgatgcagagcgtcattcaggcccgatggttcgacggtagtgagttcctaacgttgccaggagtgaacgaggacaatctcgatgcctttttgaacataccacacgatgactatgactacttaacactacccgtgctgaaggagctgtgcaaacaagagtacgaagtactggcgaagccactgcgagatgccttcgaggagcacgagatcgaaaagatgtataaggtaatccaagacttgcccgagatagcaattcaaatattcgtagagggtcggcatatggagaatgagtatgccaagcgaccgctctcactttctgatgacacgaggggcgaatggatgtccctgcatgccaatgaggactacgttctcatagtaaacttgcagcggcttaatgtcagtggacagcgaagaggtggtggacaaagctacacggtgcactgccccaagtatccaaagcccaagaatgaagcgtggttcctgaccctgggctcccaggccaacgacgagctcctcgccatgaagcgtgtatccattcgcggacagcgctgcaccaaccgcatttcgttccaggcaactccgcgacttggacgtctacagcttacgctttatttaatgtccgactgccttatgggctttgaccagcagtacgacctgcaattcgagatcattgatgcaaaagaagtctaa

SEQ ID NO: 10836 - protein, 1809 aa, DROSOPHILA
MQHQRKLLEAAQREPLLLSTKAAKAEYKQSSYNQPIHYPYVFDSQLLAKQHAGFIGGSRITLPDNAQRIDNKQWEEVKIPASEPPPLSVGNKRVQIEELDDVGRLAFANCKELNRIQSVVFPVAYHSNENMLVCAPTGAGKTNVAMLSIVHTIRCHLEQGVINRDEFKIVYIAPMKALAAEMVDNFSKRLKSLQIAVRELTGDIQLTKAEMAATQILVTTPEKWDVVTRKGSGDVALISLVELLIIDEVHLLHGERGPVVEALVARTLRLVESSQSMIRIVGLSATLPNYIDVAHFLRVNPMKGLFYFDSRFRPVPLDTNFVGIKSVKQLQQIADMDQCCYQKCVEMVQEGHQIMVFVHARNATVRTANVIRELAQQNNTSALFLPKDSAAHGLATRSIQRSRNKQLVELFSCGLAMHHAGMLRADRQMVEKYFVEGHISVLVCTATLAWGVNLPAHAVIIRGTDIYDAKHGSFVDLGILDVLQIFGRAGRPQFDKSGVGTIITSYDKLNHYLSLLTNQFPIESNFVNCLADNLNAEIGLGTITNVDEAIEWLSYTYLFVRMRINPHVYGIEYSELEKDPTLEARRRALIMSAAMSLDKARMMRFNQRTMDMNITDLGRTASYFYIKYDTVETFNELMKPFMTQAEILAMISQAQEFQQLKVRDDEMEELDELKNAYCKIKPYGGSENVHGKVNILIQTYLSNGYVKSFSLSSDMSYITTNIGRISRALFSIVLRQNNAVLSGNMLQLCKMFERRQWDFDCHLKQFPTINAETIDKLERRGLSVYRLRDMEHRELKEWLRSNTYADLVIRSAHELPLLEVEASLQPITRTVLRIKVDIWPSFTWNDRVHGKTCQSFWLWIEDPESNYIYHSELFQVTRKLVMSGQSQQLVMTIPLKEPLPPQYYIRVSSDNWLGSTTCIPLSFQHLVLPEHHPPLTELLPLRPLPVSCLKNVVYESLYKFTHFNPIQTQIFHCLYHTDNNVLLGAPTGSGKTIVAEIAIFRALNQNPKCKVVYIAPLKALVKERIADWEQRFQRSSLGLKVVELTGDVTPDIQAIRESQLIVTTPEKWDGISRSWQTREYVQHVSLIVIDEIHLLGEDRGPVIEVIVSRTNFISSHTGRAIRIVGLSTALANAQDLANWLGINKMGLYNFKPSVRPVPLQVHINGFPGKHYCPRMATMNRPTFQAIRTYSPCEPTIVFVSSRRQTRLTALDLITFVAGESNPKQFLHIPEDEIELILQNIREQNLKFCLAFGIGLHHAGLQEQDRKCVEELFLNRKIQILVATATLAWGVNLPAHLVVIKGTEYFDGKVKKYVDMPITDVLQMMGRAGRPQFDNEGVAVVLVHDEKKNFYKKFLYDPFPVESSLLGVLPEHINAEIVAGTVQSKQAALDYLTWTYFFRRLLRNPSYYQLQDIEPENVNNFMSNLVERVVYELSAAACLVERDGCLIPTFLGRISSYYYLSYRTMKHFLEDLQPGMNTKKVLLAIADSYEFDQLPVRHNEDKHNEEMAEVSRFRPPSSSWDSSYTKTFLLLQAHFARQSLPNSDYLTDTKSALDNATRVMQAMVDYTAERGWLSTTLVVQQLMQSVIQARWFDGSEFLTLPGVNEDNLDAFLNIPHDDYDYLTLPVLKELCKQEYEVLAKPLRDAFEEHEIEKMYKVIQDLPEIAIQIFVEGRHMENEYAKRPLSLSDDTRGEWMSLHANEDYVLIVNLQRLNVSGQRRGGGQSYTVHCPKYPKPKNEAWFLTLGSQANDELLAMKRVSIRGQRCTNRISFQATPRLGRLQLTLYLMSDCLMGFDQQYDLQFEIIDAKEV

SEQ ID NO: 10837 - DNA, 4580 bp, DROSOPHILA
gggacctggttgtggagcgaggagcaccgcacatgctaaaagttcccttcgcaaatgagggccaccaaatgcgaggcggcgaatttggggatctgattgtagtcatctcccagatggaacatccaatctttcagcgccgccatgccaatctgtacatgcgagacctggagatcaacatcacggaggccttgtgcggctactcgcattgtttcaagcacttggatggacgaaacgtctgtctgcgcacgtaccctggtgaagtgttgcagcacaaccagatcaagatggtgcgaggcagtggtatgcctgtttttaacaaggccaccgacagtggagatctctacatgaagtttaaggttaagtttccggacaacgactttgccacggcaccgcagttggccatgctggaggacttactccctcccagacagccgatagtgatcccaaagaacgccgaggaagtgcaaatgacggactataagccgcagccacgacagcaggaagacgaggacggacagtcgtctcactttgagggcgtacagtgccagacggcttagtgcatgtggttgtggctcctgcaggcgcggtatctctgcctcgatttgtggctcatcctgggcactttcagcgtagatgaagtctgcttcctggtgccgctgttcgtcctgatatgcatagtattatttttcatacaggaatgtttgctgtgaaaagcgcgtgatctaaattcgtagtgttattattcgagactaaagcttagctgatctgtcactaatacattagccacgctaaattaactattaactacttatttattggtacctattttttgggctgaacttgccccaattatccctacaaaactataaacgaatacacaataatagttctctcatagaaatcttaaaaaccggataaatttaaatcgatttacgtatttttatttaatttttaatattgttgctgagaattgagtattcaaagattcgaaagatccgttttaatcgctttcattggattcatcagcggatgtcgtttcgtctgattgaccaccatctgtcttggtcaaattcataggcgaccctttgggctttggcatgacttgtgatgaattcaatgatttaaatgacaagggttctaaatttggctccgtcttggctccctcttgcggcagctcatcgctgttgcctgccaagtcctccgtctggtcatccctgggctttcgtaaatccagtgccgaggtcgaatgagcactatccaccatctcgatgatctcctccgtttccatgggatgatggtcgtctagcttctccggcggcatcacaatcatttcacccgtgcgcattcccttcgaatcggccaattgttcggcgcttaccttcatcatagtcagatactgattgtacttggcgtagttgcgcctaccggtctcatcgttcatcagcacctgggcctggttatgggatctatcgcggagggccttcaaacggatgtgcttggtgatgtcccagcgccagttggagcgataggcgcacagagagcattcaaagggcttcctatttagatgaccaacgatgtggacatggaagcgagatgcagtggctgcccaaaaactgcaatgaggacacttaaaaaccttcttcaatggcgccaaatcttcgggttcctctggcaaaacttctgtgacctgaaattaaagggataagtttgcaacaccatgtacttatatatatatggactttacctccccatagccaggagctgtttctacgccgcaataactgagatcagtgggagcattggggaagtcctcatcgtgaagatccacctccgcgttgatagaagcctgcagttgggtggtgttgtgcaaggccaaagtgcacacttgtagatggttgatcaactgcatggcattgcccacccgcttctggcagtgtgaacaaacgatccccgaagtccggggaagcagagattctgtcgatgcaacggtagcaccaccatttttaaacgtttctggtttcctggaaccacttgactgctgatccaccagatcctcagcctcatctcggcttcggttgcccatttggtgaaccggcatgggcacatgatggtttgattcgtgtatggtcagcgattgtttgatatccgtgctaaagtcacagcacgagcacttgaaatggccattggcaccatggttcttggtgtgccggtctagattccacttgtagggtgtgtgaaaatcacatgagctgcacttgatcagtggcatggaatggtacttcacatgctttttgaatctggctcgaatgggcgtgctatatgaacacttctggcattgaaactgctccttacccgacaccaattcacgggtatccggcgaaggactcttcgcagtctcctcggaatcggagctgctgttttgctgttccaatttcagggactctgcttgcttaggcggcattaacttggtctggaactcgtaggccatggagaatatgttgtcgtggctctcgacgatctgctgcagctgcagcatctcctgctgtcgattgtacgcctggacactggccagtagctgcatctcttgctgctgcagttctactttcagctgctccagtggcggtccattttggatcatgcgcagcacgctgaggtctaggcattgcccagtcgcaccctggccttcaatgctctcctccagacgacgcttgcgcacctccctggagagatttcgcttaccacgcggctgagcacctgatccctgcactgcgccgccatcatcggaacagccgtgcaccattttcatgtgccgcaccagcttctggaagtggcgtgaggcatagaggcacaacttgcactcgttgatcacaatccgctcgccatgtacgtcccgcagatgcgagagatgactgcgcggattttgcgtgaagaatgcgcactggttgcagctgtagttacgccgtatcttgcactgcggcagctcatcgtcgttgttgttgttgcacggattaccatctggcagtgagttctccatattttccttggccaagtcccccggtggtgcagagtctgcggaaacaaacccggccatcgatagtggaaacataaagttattcgccttatactgctccagttgttgctccaaaaagtcctgacctattagcggctgcacgctttgggacataggaagcacagcacctgctccgccctcaatagatgactgataaagtggagcaccactaaccaagctgcgcaccaccaagcgatcacccgaacgctccaccattgaaggcagctccatgacttgacaaaatctgaaacaagcaaaattttccttggattttttcacagaacacttttcaaccgtccggtgcgagttctcctgtaagactgattcacttttccgatggtcctgctaaacttcttttggcttttccaagggctacttcgatatgacagaaaacgagttctcagggacgtgagatgttcaaatgccaaataaaaaattcgtagttctcaccgaattaaggtttaggttttattttatattttataaaaatagcaatgtcattctttctttcacataaccacaatttataaaacttgcttcttgggtgtcaataaaaaacgcatggttccggttcaagattcggttccaagtgtttatgtggttccaatgttaatgttaacataagcctatttaattttagattttaataaataagaattattgtaataaaatattaaacatttcttagtgtatctattttgcatcttaagaaaagttttttaacaggttttatttccatccaaatgataatttcatgttatcgctgaaatgttatttaatattattttgtaatacatttttattatttattttttttcctttccagggcaggacacttaacatcagtaacaagaggacaattagatatttgaacaacctgaaaaatccctgccatagttagtttattttgaaaatcttctagactgcttcaaaggcttctacgaccgaatacttgtcctccattgaagacaaatggatcggtaataggttgacccaaagttttggatctgtacccatctccaggctgttgaagtcgaacagaggggggagcggattgccattgggcatgggcaacgccatggcgtccatgatgcgcaattcatcataggaaccatgactacatgccatcataggtgagattctagcggcggcttcatagatgaaacacgagttcaacagaccgcacagatcctgcggaacagccgtattcaggagataattccaactgggacgagtggtccgtgggtgaagtgaatttccacactttgagagtatttcaggagctcgttccaagccatcggtgcccagcatattaacgatgagtcgcagctgctttcggtcatgtttgtggctggagaagagcggatatcccttgagcagctccgccaggacgcaaccagcactccagatgtccacggcacacgaataaagttcgtacccggcaaaaagctccggagcacgataaagcctggagcaaatgtagcttatactgggctcctggggcaccagg

SEQ ID NO: 10838 - DNA, 2317 bp, DROSOPHILA
aaagaaagaatgacattgctatttttataaaatataaaataaaacctaaaccttaattcgattttgtcaagtcatggagctgccttcaatggtggagcgttcgggtgatcgcttggtggtgcgcagcttggttagtggtgctccactttatcagtcatctattgagggcggagcaggtgctgtgcttcctatgtcccaaagcgtgcagccgctaataggtcaggactttttggagcaacaactggagcagtataaggcgaataactttatgtttccactatcgatggccgggtttgtttccgcagactctgcaccaccgggggacttggccaaggaaaatatggagaactcactgccagatggtaatccgtgcaacaacaacaacgacgatgagctgccgcagtgcaagatacggcgtaactacagctgcaaccagtgcgcattcttcacgcaaaatccgcgcagtcatctctcgcatctgcgggacgtacatggcgagcggattgtgatcaacgagtgcaagttgtgcctctatgcctcacgccacttccagaagctggtgcggcacatgaaaatggtgcacggctgttccgatgatggcggcgcagtgcagggatcaggtgctcagccgcgtggtaagcgaaatctctccagggaggtgcgcaagcgtcgtctggaggagagcattgaaggccagggtgcgactgggcaatgcctagacctcagcgtgctgcgcatgatccaaaatggaccgccactggagcagctgaaagtagaactgcagcagcaagagatgcagctactggccagtgtccaggcgtacaatcgacagcaggagatgctgcagctgcagcagatcgtcgagagccacgacaacatattctccatggcctacgagttccagaccaagttaatgccgcctaagcaagcagagtccctgaaattggaacagcaaaacagcagctccgattccgaggagactgcgaagagtccttcgccggatacccgtgaattggtgtcgggtaaggagcagtttcaatgccagaagtgttcatatagcacgcccattcgagccagattcaaaaagcatgtgaagtaccattccatgccactgatcaagtgcagctcatgtgattttcacacaccctacaagtggaatctagaccggcacaccaagaaccatggtgccaatggccatttcaagtgctcgtgctgtgactttagcacggatatcaaacaatcgctgaccatacacgaatcaaaccatcatgtgcccatgccggttcaccaaatgggcaaccgaagccgagatgaggctgaggatctggtggatcagcagtcaagtggttccaggaaaccagaaacgtttaaaaatggtggtgctaccgttgcatcgacagaatctctgcttccccggacttcggggatcgtttgttcacactgccagaagcgggtgggcaatgccatgcagttgatcaaccatctacaagtgtgcactttggccttgcacaacaccacccaactgcaggcttctatcaacgcggaggtggatcttcacgatgaggacttccccaatgctcccactgatctcagttattgcggcgtagaaacagctcctggctatggggaggtcacagaagttttgccagaggaacccgaagatttggcgccattgaagaaggtttttaagtgtcctcattgcagtttttgggcagccactgcatctcgcttccatgtccacatcgttggtcatctaaataggaagccctttgaatgctctctgtgcgcctatcgctccaactggcgctgggacatcaccaagcacatccgtttgaaggccctccgcgatagatcccataaccaggcccaggtgctgatgaacgatgagaccggtaggcgcaactacgccaagtacaatcagtatctgactatgatgaaggtaagcgccgaacaattggccgattcgaagggaatgcgcacgggtgaaatgattgtgatgccgccggagaagctagacgaccatcatcccatggaaacggaggagatcatcgagatggtggatagtgctcattcgacctcggcactggatttacgaaagcccagggatgaccagacggaggacttggcaggcaacagcgatgagctgccgcaagagggagccaagacggagccaaatttagaacccttgtcatttaaatcattgaattcatcacaagtcatgccaaagcccaaagggtcgcctatgaatttgaccaagacagatggtggtcaatcagacgaaacgacatccgctgatgaatccaatgaaagcgattaa

SEQ ID NO: 10839 - protein, 747 aa, DROSOPHILA
MELPSMVERSGDRLVVRSLVSGAPLYQSSIEGGAGAVLPMSQSVQPLIGQDFLEQQLEQYKANNFMFPLSMAGFVSADSAPPGDLAKENMENSLPDGNPCNNNNDDELPQCKIRRNYSCNQCAFFTQNPRSHLSHLRDVHGERIVINECKLCLYASRHFQKLVRHMKMVHGCSDDGGAVQGSGAQPRGKRNLSREVRKRRLEESIEGQGATGQCLDLSVLRMIQNGPPLEQLKVELQQQEMQLLASVQAYNRQQEMLQLQQIVESHDNIFSMAYEFQTKLMPPKQAESLKLEQQNSSSDSEETAKSPSPDTRELVSGKEQFQCQKCSYSTPIRARFKKHVKYHSMPLIKCSSCDFHTPYKWNLDRHTKNHGANGHFKCSCCDFSTDIKQSLTIHESNHHVPMPVHQMGNRSRDEAEDLVDQQSSGSRKPETFKNGGATVASTESLLPRTSGIVCSHCQKRVGNAMQLINHLQVCTLALHNTTQLQASINAEVDLHDEDFPNAPTDLSYCGVETAPGYGEVTEVLPEEPEDLAPLKKVFKCPHCSFWAATASRFHVHIVGHLNRKPFECSLCAYRSNWRWDITKHIRLKALRDRSHNQAQVLMNDETGRRNYAKYNQYLTMMKVSAEQLADSKGMRTGEMIVMPPEKLDDHHPMETEEIIEMVDSAHSTSALDLRKPRDDQTEDLAGNSDELPQEGAKTEPNLEPLSFKSLNSSQVMPKPKGSPMNLTKTDGGQSDETTSADESNESD

SEQ ID NO: 10840 - DNA, 8863 bp, DROSOPHILA
ctccgcttactgtcaaataaccacagaaataggccaaagcgcggagatcatttttgttggcaattttctagctaaaaccgtggtttgagtccgcgctgcatgagcacggcatcgaacctagggcagctttgctgctcaactgagcgtccatcaccaagggaaagtaaccgataaccgcttgcaagaaagatcgactgtatcgagtacacatcgatttttgttccagcactagcaacgctgcgttcgcgtgaataaataattaattaattgctgaaaaaatggattagctggcgaaacatgcatccgaccaagtgcaacagcaaccgtgcgcagtactcagtaatcgggcgtttgtgagcgtaagcgccatgaattgtgtgtctaaaaaaaagtaatggtttagcaaaaacaacaacgctaaagcccaaaagtgctaataaaaagtacacacatacgcactcacacaaacgcgcgcgcgagcaaaggtgaaaattataaattaataaatacgcgatccgatagcatatcaaattagcgaaatatgctcgtttctcgtgctgatcgaatcaaaactgtgaattgcaacagaaaataatttcaaggtttgcagcaggcgaatagaaggcgaaaaggtaattgaaaaatagaacgaattttggcacaagcgcactgtagctatatatttttgttgtctggccgaccgtggctaggtgggtggggcgtgattttgggggccaatcttgtgtgttctgtgtactgtgcgctgctgctctgtgtggtgaaaacaacaaaacccgcttaccccgcaggagccccacccctctcccttaaatgtaatgcatgtaatttaccgcaattttgcccgtgcattgctcagtgtgtcactctcactcgcacacataccactgccgacgagcgcagcaaggtctccgtctgtgtgtgcgtgtaagtgagtgctctccccattttcttgacagcagtagcagcatcagcatcagcatcaatcctgtcagaaaaaaaaggcgcgcgctccttttcgcccgtttcgctctgcctgccgctgcgctgcttctgcagctccaccattttctttctaaatcgctgacgccagcgccaaatcattcgccatcagccgctcctcctccgcggtgctccccactgcagcttctcgtcttcagctgagcttcgctgtgctaaaccaattcttctgttctgtgtggttggatctgcagttttgcagatataatcaaatttattcgcaacgtacatatgtaaataaaagcgttcggaatatgccaagcgcctgtgatcgcgactgctgaaagggcagccaaaatacgataatatataagagcgtgtgagtttgcagtatcctttacgtttgcgtgtgtgtgcgtgcttgcaatctttgaactttgaacttttgttgaacttcggtaatttttttatttgcaagccggttagaaaacaacagcaattgcagtgacgcataacctcaaagatcgacatgcacaagtaccgttagatcgagtcgccccaaacgactcttttgcgctcccagtctcgcagggaaatgtgaaatttcatataaaacgttacgttaaatagcaaagaagttaacatcggtaaattccatagcagtgaatgtgctttaaatgcagtaattggggcccgttatgttttactgcttgctcacacacactaacttaagttggggtaccaatacacagtcagttacactgtctctggcttagattacagtcaacactcgatgtcgtaaaccaggataaaaaaataaaatgcagcaatttctcttaaaactacattttacattaaaaaatagatactttaattttcaaattttttgactcccatgcgttgatttgttcaatgttttgtgtgcttactgtgaaaacacggcaacaaaaatcgaagaaagtcgtcagagtaaaagcaataataacaacaacagcaacggcggcagaagaaacaagattcgaaatgggcacaaacgaaactaaatgaaaagcgcgaaactgtgcaaaaaaaatacaacctaaccaaacttctcgcccccgctctactttcccgcccggaaatcaaaatccgaacgccgccaagtcgaaatcagcgatttcgtatttgaaatgtttgttattttattgatttatcgtccctcgtcatttgcgccatcaaagcgaatcgaaggtgttatatatttgttgcttgtttatttgctttcctgataagccagccgaccaagcaaatgctaatttccattcgtcaattacagataattgttgttgctattgcgcttgtaaatttaacaaattagcgaaaactgatttgattaaattcgaacgttatttgcggcttaaagtttattttattatcgctgcacggcactctaatcccgagtggagcaatggcgacaaatccatggaataagggagaagctattgattggatcacgtggttcggaattgtggtatttttctatggaagtgattagattgggctaaactaggctttaagcgaatgatacagctcattgagcataaaaaaaattgtattaccacagtcacaaagtttagctttacataatagttcaattattaatcctaccccgttatctttacttgcagcaacgcaaccaaataaccacaaagaagccgtaacaaatacaataccataaactatagtaagaactatccccaaaaaacaagaagcaactaacaacgagatgaagtacgcaactggaactgacaacgcgatgacctccggcatcagcggccaaaccaataactctaacagtgcatccaacgagatgcagccaaccacatcaacgcctactgcagcccacaaggaggccacatcaacggccacgacgacggcgacatacgccaatggcaatcccaattctaacgccaatcccagccagagccagccgtccaatgcgctgttttgcgagcaggtgaccacagtgacaaatctcttcgagaagtggaacgactgcgagcgaaccgtcgtgatgtacgcgctgctcaagcggctgcgctacccgagcctcaagtttctacagtattctatcgacagcaacctgacccagaacctgggcacctcccagaccaatctgagcagcgtggttattgacatcaatgccaacaatccggtgtacctgcagaatctactcaacgcctacaagacgttccagccatgtgacctgctcgacgccatgtcctcctcgtcgtccgacaaggactcgatgccatgctacggcagtgacttccagatcaccacatcggcgcagtgtgacgagcggaagctgtatgcccgcaaggaggacattctgcatgaagtactgaacatgctgcctctgctgaagccgggcaatgaggaggccaagcttatctacctgacccttataccagttgccgtcaaggacaccatgcagcaaattgtgcccacggagttggtgcagcagatcttctcgtacctactcatccatccagctatcaccagcgaggacagacgttcgctcaacatttggctgcgtcacttggaggatcatatccaagcggctgcggcgggcctgacaaatcgcagttacttcctgcagccctcgccgcaactggtcgctggtggtagctcaacaggcagtggtagctgttcctcttcggcgaccagctcttcgacagcatcctgttcgtcggtggcctcatcctcgttgtgccccgcaagcggcagccgttcctcacgcaccaacgactggcaaacgatcgccccgcccagcaagcaattgcaaaacaaattggccggtgattggcgtggcaatggaggcggcagctccagcgggtcgatcaatccactctgtgataatcttaatggtattaccctgaacgaattagcttctagtcagaacagtctcggcctgtcgctggagggcagctcttccctggtcaacggtgtggtcgctggtgcaggctctatgttgggaatcgctggtggcgacgatcatgacacgtcatttagcaagaatggcacggagattctcgattttgacccggtgacggcggacatgggtgaggcctgtagtctggccagcagtagcctttgtggacgtaacggtggaaatcctgttgaggatcgatcgcaacctccgccgaatcttcagcagcaattgcttcagcctcctccctatgcctcgatccttatgggaaacgtgggcgatcagtttggagagatcaaccggtggagcctggacagcaagattgcagccctgaagacgcggcgctctaacagcctcaccacgcaaacgatctctagctgttccagctcgtctaactcatcggtgatcacggtcaatgacaactgctccaattcaacggagaatctggcacagtttgccaacaagccccgtagtttttccttatcgattgagcatcagcgcggcgccttgatgaacagcggttccgatactcgtctggatgaattcaagcccaattatattaagttccacacgcgcaacgtgggcatgtcgggaatcggactctggctaaaatccttgcgtctgcacaagtacatcgagctgttcaagaacatgacgtacgaggaaatgctcttgatcaccgaggactttctgcagagtgttggcgtcaccaagggcgcctcccacaagcttgccctttgcattgataagctgaaggaacgggccaatattcttaaccgggtagaacaagaactgctatcgggtcaaatggagctgagcacggcggttgaggagctaacaaatattgtgctgacaccaatgaagccactggagtctccaggaccaccggaggaaaacattggtctgcgttttcttaaggtcattgacattgtgaccaatacgttgcagcaggatccgtatgctgtccaagacgacgagactttgggtgtgcttatgtggattctagaccgctctatccacaacgaggcatttatgaatcacgccagtcaactcaaggacctgaagtttaagttgtccaaaatgaagatctccatggttcccaaaatgcatcacgtcaagccagccggcgtcgggccaaacaatgggaacattaacaagccaaggtaaggttttcaataagataaaaagtaatgcattttaaaaatgagctgttattttagatggaatggtaagactcgcaaatgcgatactaaaaatggcagcaacgataggattaacaaccgcaaaaactccaacgacatgctaaacttttcgctaaattgcctgccacacccgctgccccatcattcgcagcaggctccgccgcctctgccacagtttgactacaacggctatggcggcggtccatcccatcagccgcagtacaagagctcctcgtacccaagcttcatgggtaatcctcagcagcagccaccaccgccgccgtctagtaagtcgcatcatcatccccagcagatgcaacagatgttgcagcaacacaaccactttccagcgctgcctcagcagacgccaccacaatcgcatcgccggtcgctgaataatcttattctggtggccggaggtccgcagcaaccgcagcaattgatctttaagcccggtcagggagtgctcaccaacaacggatctaacgacaacctggtattggaacgcaatcagcagtcgcagcagcagcagcagcagagaaaacttagcggaggagtgtccagtgcggagcaacaaccaaagaagaccatggccgctgttgtgatggttagtaatccaaaccagaatcaggaccagcacgatcagccccagatcctgatcaacaacaataataacaacagcatgctgaacaacaatttgattaaccagcaacagttgcaacttttggcagcagctgctgccgccgtgggcagtggcagctgtctgtgctccaatggtggtggtggtgcctgtgtccacaatatctgtcaccaaagcagcaagaacaacaatcatggcgtagaccattgcctgtcccagtcaccgttgggcagcctgggcatgtcgccccacgtcaccgagtacaagatgaacgactttaagagcctagaacagctggagacgttgtgtcgccaaatgactgaacaggcaatgaactgagcaagattcagggctatctgggttttgaaatcatcatgtaatggcgttagatttgaggctgccagctgtttttgtgttcatttagctttgagccgtgtttgatgtttgatttcataacgaacataaatgtttttatatttagatatttaagattcgtgtctatttttgtgtcgcgtcaagttgtccaccctgcgtctcctttcacatcccgttctgtaatcgtttttagttagtaagacgatagtttgttttaatgttaagtttattaactgtatgccaaggcgcccccaaagatatgatcaattgactcgggctcgcaggaccaacggctggccgatgaacttgtggagcccatgctgcactccccgacggtaatcccatgtcggttgtcagcgggggcgtggcatcttactgtcaatgttattaatgtataggtttcgtaaatgttgtcgccatttatgtagttaaactaacaagccaagccccacaacacacacacacacagatcgcaacaacagaatacagtaacttctctctacctaggaaaatttggccaaatttgatcaacattttacgctattctaaaccccaatcacaacatcaactatttcattcactatcaacaacgtcgccaaatgaaagaaataccccgatctgaacgacgacgaaaaatggtttatctagtaaaaaattataaaatgaactctgcatcgtgaccatgagactgactaagattacttttcgcaactataaaaactagaaggaagaaagctggatggagagggaattgaaaagtgagaattgagaaacgagagctgataattgtttgcgcgaatcaaaactaggcttgctgaatgaagtagtagtcacataatgaatatgtttatatatacacgtacacataatttattttaaattaaaaggaacatatttgctgaaccgtaactgcaccagaggaaatcgcaacggcggaaactaccactagactaaactttaacagaaaagagtttcaatgtttcactgtttgtgtttgagaatcggaaccacatattgtattttgcatatttaagcgtaagccaaatccatgtattgcataccgatcatgatcaccattgtcattgattagattatctctactattactattatgtttgctttagtcaattgtttataatgtaaatggcaagccaatcactcgatatgttatgttttagttgtttttttaaaaattatatatatttatatatacaaatgtatgtcgctaagcttaggttcaaacaaaaaacgacgatgggccaagctggaaaaaagaaggcagccaaaaaatatttaccttaagagcgtaaaaacgtgtagtctaattgtaaatgtataaaaacgaacaaatgcatgtgtaaaaatcttggttggaaatgtttttgttttctaatttctcgtcgatatttccaagatttgtttgtttacaacaaccgcaacactgtaaatcgcagatgcttttatttaataataaaaacctattgtacggccagttgggatacaaagataatcgaaacctaattgtcaaactttagcgagttcaaaacgatccacaaactaaatggtttattgtaaaagtgcaactactcgtagacgaatgtgcataagtcagttaaatgttcgcaaaattatcataatgcgagcataaaccaagcgtgtacctacccacacatatacacacatacaatacctacatatatttattttcaataaattatttcgagatttaaaaatacccatgctgtttacctaacaacccaggttgccatgcgtctccacttttgttgtccggcgaaaaacaacttcataccgaggctagccttcaaacacaccaaacgaaattatcgaagcgattttctatagtatatacaagccttacttttccggagcaaaaattattagctttacagaatgagccgacatcgcttcaacaacgtgcagatcaaggcattgcccggtggtctgatggcccaccacgaaccggatgcggatggcggacagcccggttcgcagaagctgcccatgtggcccagtgaacgcattcctcctggcggtgctggagccttccactcggccaaggtgcaatatagcaaggagacagctgatctgatccgatgtaagtgcgttttgggcatgccaaatatctaaggaataagaggataagaggaccatccataaagataatcgtgtacattttccgcttcgttataacctcccttgttagtgcttgtcaaggagtccaagatgtcgatgttggtacgcaagcagatcgatgagagcctgcgcaatggggagccattgccattgcccgaaccgccgcgtcccaataccaacaacgatccggacaaggaaacactggccattttggatcgggcacgcaatgccaagcgtaagaatctgcggcagatcgaggcgagcggagcttacaagcagagctattaccgcccgcccgccgacaaccgaatgcatggagagaaggccaagtcgcagctgcagttcaccatggccggcactcatttgcccgatccggcgatcaagccgcgacgtcgtcctcgcgaagagcaactggtgacggaggaggatctcataaacgagcgtaagttggaatatttcttaagcggaataaagcggaattatacattgagttggcatgctcctacagttttggaccaaatcaacgagcgtgctgagtggttg

SEQ ID NO: 10841 - DNA, 4600 bp, DROSOPHILA
tcaatcctgtcagaaaaaaaaggcgcgcgctccttttcgcccgtttcgctctgcctgccgctgcgctgcttctgcagctccaccattttctttctaaatcgctgacgccagcgccaaatcattcgccatcagccgctcctcctccgcggtgctccccactgcagcttctcgtcttcagctgagcttcgctgtgctaaaccaattcttctgttctgtgtggttggatctgcagttttgcagatataatcaaatttattcgcaacgtacatatgtaaataaaagcgttcggaatatgccaagcgcctgtgatcgcgactgctgaaagggcagccaaaatacgataatatataagagcgtcaacgcaaccaaataaccacaaagaagccgtaacaaatacaataccataaactatagtaagaactatccccaaaaaacaagaagcaactaacaacgagatgaagtacgcaactggaactgacaacgcgatgacctccggcatcagcggccaaaccaataactctaacagtgcatccaacgagatgcagccaaccacatcaacgcctactgcagcccacaaggaggccacatcaacggccacgacgacggcgacatacgccaatggcaatcccaattctaacgccaatcccagccagagccagccgtccaatgcgctgttttgcgagcaggtgaccacagtgacaaatctcttcgagaagtggaacgactgcgagcgaaccgtcgtgatgtacgcgctgctcaagcggctgcgctacccgagcctcaagtttctacagtattctatcgacagcaacctgacccagaacctgggcacctcccagaccaatctgagcagcgtggttattgacatcaatgccaacaatccggtgtacctgcagaatctactcaacgcctacaagacgttccagccatgtgacctgctcgacgccatgtcctcctcgtcgtccgacaaggactcgatgccatgctacggcagtgacttccagatcaccacatcggcgcagtgtgacgagcggaagctgtatgcccgcaaggaggacattctgcatgaagtactgaacatgctgcctctgctgaagccgggcaatgaggaggccaagcttatctacctgacccttataccagttgccgtcaaggacaccatgcagcaaattgtgcccacggagttggtgcagcagatcttctcgtacctactcatccatccagctatcaccagcgaggacagacgttcgctcaacatttggctgcgtcacttggaggatcatatccaagcggctgcggcgggcctgacaaatcgcagttacttcctgcagccctcgccgcaactggtcgctggtggtagctcaacaggcagtggtagctgttcctcttcggcgaccagctcttcgacagcatcctgttcgtcggtggcctcatcctcgttgtgccccgcaagcggcagccgttcctcacgcaccaacgactggcaaacgatcgccccgcccagcaagcaattgcaaaacaaattggccggtgattggcgtggcaatggaggcggcagctccagcgggtcgatcaatccactctgtgataatcttaatggtattaccctgaacgaattagcttctagtcagaacagtctcggcctgtcgctggagggcagctcttccctggtcaacggtgtggtcgctggtgcaggctctatgttgggaatcgctggtggcgacgatcatgacacgtcatttagcaagaatggcacggagattctcgattttgacccggtgacggcggacatgggtgaggcctgtagtctggccagcagtagcctttgtggacgtaacggtggaaatcctgttgaggatcgatcgcaacctccgccgaatcttcagcagcaattgcttcagcctcctccctatgcctcgatccttatgggaaacgtgggcgatcagtttggagagatcaaccggtggagcctggacagcaagattgcagccctgaagacgcggcgctctaacagcctcaccacgcaaacgatctctagctgttccagctcgtctaactcatcggtgatcacggtcaatgacaactgctccaattcaacggagaatctggcacagtttgccaacaagccccgtagtttttccttatcgattgagcatcagcgcggcgccttgatgaacagcggttccgatactcgtctggatgaattcaagcccaattatattaagttccacacgcgcaacgtgggcatgtcgggaatcggactctggctaaaatccttgcgtctgcacaagtacatcgagctgttcaagaacatgacgtacgaggaaatgctcttgatcaccgaggactttctgcagagtgttggcgtcaccaagggcgcctcccacaagcttgccctttgcattgataagctgaaggaacgggccaatattcttaaccgggtagaacaagaactgctatcgggtcaaatggagctgagcacggcggttgaggagctaacaaatattgtgctgacaccaatgaagccactggagtctccaggaccaccggaggaaaacattggtctgcgttttcttaaggtcattgacattgtgaccaatacgttgcagcaggatccgtatgctgtccaagacgacgagactttgggtgtgcttatgtggattctagaccgctctatccacaacgaggcatttatgaatcacgccagtcaactcaaggacctgaagtttaagttgtccaaaatgaagatctccatggttcccaaaatgcatcacgtcaagccagccggcgtcgggccaaacaatgggaacattaacaagccaagatggaatggtaagactcgcaaatgcgatactaaaaatggcagcaacgataggattaacaaccgcaaaaactccaacgacatgctaaacttttcgctaaattgcctgccacacccgctgccccatcattcgcagcaggctccgccgcctctgccacagtttgactacaacggctatggcggcggtccatcccatcagccgcagtacaagagctcctcgtacccaagcttcatgggtaatcctcagcagcagccaccaccgccgccgtctagtaagtcgcatcatcatccccagcagatgcaacagatgttgcagcaacacaaccactttccagcgctgcctcagcagacgccaccacaatcgcatcgccggtcgctgaataatcttattctggtggccggaggtccgcagcaaccgcagcaattgatctttaagcccggtcagggagtgctcaccaacaacggatctaacgacaacctggtattggaacgcaatcagcagtcgcagcagcagcagcagcagagaaaacttagcggaggagtgtccagtgcggagcaacaaccaaagaagaccatggccgctgttgtgatggttagtaatccacaagaacaacattttacgctattctaaaccccaatcacaacatcaactatttcattcactatcaacaacgtcgccaaatgaaagaaataccccgatctgaacgacgacgaaaaatggtttatctagtaaaaaattataaaatgaactctgcatcgtgaccatgagactgactaagattacttttcgcaactataaaaactagaaggaagaaagctggatggagagggaattgaaaagtgagaattgagaaacgagagctgataattgtttgcgcgaatcaaaactaggcttgctgaatgaagtagtagtcacataatgaatatgtttatatatacacgtacacataatttattttaaattaaaaggaacatatttgctgaaccgtaactgcaccagaggaaatcgcaacggcggaaactaccactagactaaactttaacagaaaagagtttcaatgtttcactgtttgtgtttgagaatcggaaccacatattgtattttgcatatttaagcgtaagccaaatccatgtattgcataccgatcatgatcaccattgtcattgattagattatctctactattactattatgtttgctttagtcaattgtttataatgtaaatggcaagccaatcactcgatatgttatgttttagttgtttttttaaaaattatatatatttatatatacaaatgtatgtcgctaagcttaggttcaaacaaaaaacgacgatgggccaagctggaaaaaagaaggcagccaaaaaatatttaccttaagagcgtaaaaacgtgtagtctaattgtaaatgtataaaaacgaacaaatgcatgtgtaaaaatcttggttggaaatgtttttgttttctaatttctcgtcgatatttccaagatttgtttgtttacaacaaccgcaacactgtaaatcgcagatgcttttatttaataataaaaacctattgtacggccagttgggatacaaagataatcgaaacctaattgtcaaactttagcgagttcaaaacgatccacaaactaaatggtttattgtaaaagtgcaactactcgtagacgaatgtgcataagtcagttaaatgttcgcaaaattatcataatgcgagcataaaccaagcgtgtacctacccacacatatacacacatacaatacctacata

SEQ ID NO: 10842 - protein, 998 aa, DROSOPHILA
MKYATGTDNAMTSGISGQTNNSNSASNEMQPTTSTPTAAHKEATSTATTTATYANGNPNSNANPSQSQPSNALFCEQVTTVTNLFEKWNDCERTVVMYALLKRLRYPSLKFLQYSIDSNLTQNLGTSQTNLSSVVIDINANNPVYLQNLLNAYKTFQPCDLLDAMSSSSSDKDSMPCYGSDFQITTSAQCDERKLYARKEDILHEVLNMLPLLKPGNEEAKLIYLTLIPVAVKDTMQQIVPTELVQQIFSYLLIHPAITSEDRRSLNIWLRHLEDHIQAAAAGLTNRSYFLQPSPQLVAGGSSTGSGSCSSSATSSSTASCSSVASSSLCPASGSRSSRTNDWQTIAPPSKQLQNKLAGDWRGNGGGSSSGSINPLCDNLNGITLNELASSQNSLGLSLEGSSSLVNGVVAGAGSMLGIAGGDDHDTSFSKNGTEILDFDPVTADMGEACSLASSSLCGRNGGNPVEDRSQPPPNLQQQLLQPPPYASILMGNVGDQFGEINRWSLDSKIAALKTRRSNSLTTQTISSCSSSSNSSVITVNDNCSNSTENLAQFANKPRSFSLSIEHQRGALMNSGSDTRLDEFKPNYIKFHTRNVGMSGIGLWLKSLRLHKYIELFKNMTYEEMLLITEDFLQSVGVTKGASHKLALCIDKLKERANILNRVEQELLSGQMELSTAVEELTNIVLTPMKPLESPGPPEENIGLRFLKVIDIVTNTLQQDPYAVQDDETLGVLMWILDRSIHNEAFMNHASQLKDLKFKLSKMKISMVPKMHHVKPAGVGPNNGNINKPRWNGKTRKCDTKNGSNDRINNRKNSNDMLNFSLNCLPHPLPHHSQQAPPPLPQFDYNGYGGGPSHQPQYKSSSYPSFMGNPQQQPPPPPSSKSHHHPQQMQQMLQQHNHFPALPQQTPPQSHRRSLNNLILVAGGPQQPQQLIFKPGQGVLTNNGSNDNLVLERNQQSQQQQQQRKLSGGVSSAEQQPKKTMAAVVMVSNPQEQHFTLF

SEQ ID NO: 10843 - DNA, 4043 bp, DROSOPHILA
aaaatatgaatatcatatatcctccatttatatatccatttcttttcagtagaatttaaccaatatgttgattgctgagtgccttgttcttccgccattacacagtaaagtttttatgttcgccccatagaagctcttccgtaaatacgaaattgtgggcaaagtttacctttaaaaaaactgtttaggctgtcgtcgtggctcgtcggttccaattccaacctttcctgggcggaaaggtaaatgctttctaataccccaggagatgatgtgagaggcgaaagtggttgggacaaggaggaggactaaagatagagctgctctcatcacgtttcatttcatttctttcgttcgttcgtattgttgggtcccattcgagagcctttttgtgcctttgtctgccaatggttgtagttgtgaaatcgtgcatagcacagagctatagcttacgcgttccgtgtgtgtaatacgctgcgtatgcgaaattttcgacgttttcgcttcaatgacaaatgttgagcagtcaatttggagctttcgttgccagctttgttgggtactcgatgctcgatgggggtgtcagccactctggttgctttaataatgaagccgattaagtattttctgtcaaagtcaattggattctggctattcatcggagcataaacagcattggcgcacaagccgcagcgaatgcctaaatattcccctgggtcttcggattgtgtaatttatgaacagcgtgtcgcaaattattgctgtattgaaacgaacaatcgatacataaaattgtgtaaccaagaagatgcgatagcgaaatttatatttcgaacatgaattcggtattcaattaaattgcgtaggcaatcaataattatttgccaaatttgaaatttatattatatgtgcctttgtgtaccaaactgaacagtagcacataactgatataaattaacccgagcatatttcctttgacacccaaaaatgaactgaaaccattatgtgttctgaggcactttatgacattacaaatataaatgggacaaatatatttcttgatcaagcattttcttcacatggtcagctatacataaatcaaattggactcccactttagttggtcagacgatacttaatggccctcaggatggggtacttctcgttggtgcagagtcctcggaaatcatcgtaggacaggtcgaatagcgcgactccacccagattttcagtgcgcacatagccggccttatcggcggcagtatcgggatcctcgaagctcacccagatgccattgtcgccctttttatcggctgccctgtaggcataagagccgaaacgcttggcaggatcctgaaccttgatcagcggagcattggcgcccttcaaataggcgttgttctggttgggcagcagggcgcagacctccggccagctgtaaatgccaggcacctgagtgttaccacccactggagcctcgtccttgacgtccttcaccggcggaacaccagtgtcgccagagtcatcggtcagtttccatgggcgaccgtaggtggccacgcccacattgatcttgctggcgggacagttgttgcgcaaccagtacttcacctgagcagccacattgaactcgggattgcgttcgctcagttcataaatgggtgcggcatagtcggcaacttcgggattacgctggggtgtaaagaaatcgaaggtacccagattcacaaagtctaaatagttgaccacagcgggaatgtcgtagaacactgtgttgatagaattcgttttaaaatttaaatctctagacattgcgaacgggaatactaacgggatgagttcacattgggcagaacagtggtggagagcagcaggttgtccggacggaaggcgttcttaacatcacggagtagagcggtgaactgctccttgtgctcctcggacttctcatcgacgatcgagtcgccggagaagaccttcttgaagcccttccacaggctgccaattccactgtgcaccttcttcggcttattcttggggaactgccaggcgacatccaagccatcgaatccgtaggtctttaccagcgagtagacggtattcacgaaacgagtgcgacctgtggggctctcgagcagttcgagatacttgttgggcagctccttggcatccttgtccagctcaatgtccttgtcaccacccacactcagcaggatcttgacattgggatacttgcgcttcaagcgggtcaccgtgcggtaaagtcccttgcccaaatccaaatccaactgctggttcagactcaccgccttgtgcgaatcgcgctcgattccggcatagccgtagaccagatagtcgcagaattgcagagccggttccagttcatcgattaccagcttgcccagacctagattaaagagcggattcggcgattaggagaagggatttacgtactgggaaaaccctggattctgtcttatagtgctgtcatcattttaatacatagtttatggcaaatagataagaaatctatttaaaattaaataaagacttctttcacacatttttgttgcaattgaaaagcttttagttatgccaattattttaaatttacgaccagtctcggtgagatttacttttcgattatcgcttccacactcgacccaaattgcaaacaaactaaacaaatcgagttccgagtatttgttgataagcctagtcgttgttttcgatttcgttttcttattttacttttgctaattagcaacttccactggaggttatataatatttaagagggcaaagtatattacaaagtaagtaataccatgtaaaaccatgcggaatgtacccaccttccttgacgaaactggcggaatcgtagtagcagaccaggtgcttcttgggcaactgcggagctcccaccttggaggcctgaatgctggccaggcacagcgaaacgatcgctagggctttaatgatcatctttgattcgcggatttcacttgataccgttgagttgtgcgccgctcaagtgtcgacttggaactgaaactggggctttacttcgcatcccagcttgtcgaaggttgagacgtggtcgtcattgttgttcttgtttttttttttttttgttgctgttgtgggttgagagcaaagtgtgagctgataaacaaagctaagctcggacgtgcgatcattagaaataaatacagtggagagtgaataaggtggactaggcctatacctactgctagttgctaatttcaaatatatactttctttttgacagcgcttattcctacgcacctgactataaaacttaaaaaatatgatactacattttatatttcactcatcttgaatttaactggtttaaactattttggaagaccttagttgacttgtacatgtaagtcgtccttctaagcttgtttccactgtattaattccagtacttttgtgtgggcttcgcacaaacatatttaaatttttacgacttagatgtcgagaaattttatttttgcttctttttcctcaactcacttatctttggtttgttttcttttcttgtttgctgctgctcatgaattttttgtgcctcggcatcgccaaattcgagcttttaggctacagctgctccgctgttatcaattcccgacctcgatttggggtttttgttctgaaccctaagcctgggcttctcgtttccagtctcttctttgtttcccccagtttccttcttgttgattttgccataattcttgtgtttgcttgccctaatcgctgttcaatccactcgcctccttttgttctgaatctcttttggtcacacatgctgattttcaggttctgcatcgaaaaaaattgattactagttaaaattaaaagtaatattatacaatattttcctcgcctcgtaaaaagtaaaaaaaaactttttatctggttttttttttttcaaaataaatgtaaaccaaacggttttagtatcttcaaaatggcgtgttttgcttatttttatcatttgaaatagagttgcattt

SEQ ID NO: 10844 - DNA, 1533 bp, DROSOPHILA
ccaagtcgacacttgagcggcgcacaactcaacggtatcaagtgaaatccgcgaatcaaagatgatcattaaagccctagcgatcgtttcgctgtgcctggccagcattcaggcctccaaggtgggagctccgcagttgcccaagaagcacctggtctgctactacgattccgccagtttcgtcaaggaaggtctgggcaagctggtaatcgatgaactggaaccggctctgcaattctgcgactatctggtctacggctatgccggaatcgagcgcgattcgcacaaggcggtgagtctgaaccagcagttggatttggatttgggcaagggactttaccgcacggtgacccgcttgaagcgcaagtatcccaatgtcaagatcctgctgagtgtgggtggtgacaaggacattgagctggacaaggatgccaaggagctgcccaacaagtatctcgaactgctcgagagccccacaggtcgcactcgtttcgtgaataccgtctactcgctggtaaagacctacggattcgatggcttggatgtcgcctggcagttccccaagaataagccgaagaaggtgcacagtggaattggcagcctgtggaagggcttcaagaaggtcttctccggcgactcgatcgtcgatgagaagtccgaggagcacaaggagcagttcaccgctctactccgtgatgttaagaacgccttccgtccggacaacctgctgctctccaccactgttctgcccaatgtgaactcatccctgttctacgacattcccgctgtggtcaactatttagactttgtgaatctgggtaccttcgatttctttacaccccagcgtaatcccgaagttgccgactatgccgcacccatttatgaactgagcgaacgcaatcccgagttcaatgtggctgctcaggtgaagtactggttgcgcaacaactgtcccgccagcaagatcaatgtgggcgtggccacctacggtcgcccatggaaactgaccgatgactctggcgacactggtgttccgccggtgaaggacgtcaaggacgaggctccagtgggtggtaacactcaggtgcctggcatttacagctggccggaggtctgcgccctgctgcccaaccagaacaacgcctatttgaagggcgccaatgctccgctgatcaaggttcaggatcctgccaagcgtttcggctcttatgcctacagggcagccgataaaaagggcgacaatggcatctgggtgagcttcgaggatcccgatactgccgccgataaggccggctatgtgcgcactgaaaatctgggtggagtcgcgctattcgacctgtcctacgatgatttccgaggactctgcaccaacgagaagtaccccatcctgagggccattaagtatcgtctgaccaactaaagtgggagtccaatttgatttatgtatagctgaccatgtgaagaaaatgcttgatcaagaaatatatttgtcccatttatatttgtaatgtcataaagtgcctcagaacacat

SEQ ID NO: 10845 - protein, 452 aa, DROSOPHILA
MIIKALAIVSLCLASIQASKVGAPQLPKKHLVCYYDSASFVKEGLGKLVIDELEPALQFCDYLVYGYAGIERDSHKAVSLNQQLDLDLGKGLYRTVTRLKRKYPNVKILLSVGGDKDIELDKDAKELPNKYLELLESPTGRTRFVNTVYSLVKTYGFDGLDVAWQFPKNKPKKVHSGIGSLWKGFKKVFSGDSIVDEKSEEHKEQFTALLRDVKNAFRPDNLLLSTTVLPNVNSSLFYDIPAVVNYLDFVNLGTFDFFTPQRNPEVADYAAPIYELSERNPEFNVAAQVKYWLRNNCPASKINVGVATYGRPWKLTDDSGDTGVPPVKDVKDEAPVGGNTQVPGIYSWPEVCALLPNQNNAYLKGANAPLIKVQDPAKRFGSYAYRAADKKGDNGIWVSFEDPDTAADKAGYVRTENLGGVALFDLSYDDFRGLCTNEKYPILRAIKYRLTN

SEQ ID NO: 10846 - DNA, 6060 bp, DROSOPHILA
cccccccccggcacaattgtttatagaaatcaaatgattaatatattattatagaagaaaaaccgtttaatagcacaagcgtaaacaccaattggaagcaaatcaataaatttgaaggaaagctaaaaaaatccataaataaaatatcattgaaatggacaactaatgtgtttttatcagactgcttactaaactaaatatcatctttttcaaaacccccccaaaaaaataaggtgttttagtttcggtgtgttctgtgaaatggtattttttatttattatactctcggaaattatatcaatttaaaaaaatttacttttgaatcagcgaacatatttataggaaaaggtttgaagtgtttgtatgtgataaatacaaattaaactacaattattgtatatgtgtttgcaatcttagacagctatcgtattttgactcttgtttgctaaaaaaaagcatagttttaaagtatttgcaagacgtttgcagtcgagtagaatttttttcagatacaaaacatgaatttcaataaaaaaaatgaattaaacaacattgaatgatggtgtagatacaattaaaaacgaaataaaattaaaatgctccacaacggatttttacaacaaatatctatccgttgcgttacagaagttttgtgaaaattgctgttttctaatttcaaatttgtatttgtgtgttaaactaattctttccgatcatcggaacttcgtttatgtttaaaagtcaaaatgtatcacaattttgatcattttgttataataaatacggctgcacctgtcacaatgctaattatttagtacacatttatgctgaatgtctcgactatatttaatgggtcttgcacaaatttgattcaatgaaacccaaaaggtagtatagtaaaatttcattaaaccgatatttacaaataccagaaaataagcagatacttaaggatgcacatttaaatgagtatgcatggatcgcgcattaaatcggtgcttttaaattttaaaacgtatttatgatattccttttacaatcgtgattacaagatataggagagcccagttgttaattcgatgacaaaaaaaaaaaaagaataatttgtggggtgaattattctttataaatctctacagaaaatgccggaaaagtactccttatcgaatataaaatgatataagtatgtacaatgagcaaaacctaccattcgatattatatttataaaacatgatttcctctctctacctttcttgtacagtgcacacaattttggataaaagaacgtttctaacaaactattatcaaaatttattgacagtcgagtactttctcaatttcagtatgagatttttataccctgtatcaatatttttgtgtagtatgcgtaaatgtaaaaacgatcgtacatatgtaagttttggatacatattctatacaaacatatgcgtaattgagtaaagcaaagtgaactcggctatataatttcacaattatttgaaacgcttcaatcaagttaaatgaaaatccgtcaaagcaacctaatcaatttgatgcctggcttcagttattaatgctaagagtgcatccagtttaagatctttaaaccgttcaaagtggtccataagtggctgaattgcatccgactcaatggctgccgagatggtctggttttgaatagtgcgattgaggcaggatgcaacctgtgccagaaattctcgccacttttgcctgttctcctcgctaagagttgcgtcagttcgcgagacgtagatttcctcggcgcgaagtatcagggcaaccagcgaaaggattccaaactgccaatttaataattagtacgcgtatctattacttaatactgaggataacttacgcgactgcaaaaaattccagcaagtttcttgtcattcagcgtaatagcagatgaaatgctcactaggagttcgaaagtagctttgttaacgtgttttttaaactctgggtaaagagcgtacaagacgccttcaacgtcgtccttgtcctttttcaccactgtttgtagggaacagaagacgccgctccacacgacccagcgaatgctttgatccgcaataaagggcattatgcgtctaataagtatctgcaaaggaaagattgatttaaataaaatagtgagtttcatgcgtatagcactagaacataaatcgaattctatttggttgcacttgttaaaattagtataagaaaaagtacacacctttcccttgcgcacattcatcatggcgataaccttgtcgaaggccagacctgcctttaatttattgaccaacgcagctttcgtctctacctcatagttgaacttgttctttagttgcggattcatggtttgcggattggcggcttcagcagcacgttcttcgggcgttttattggccatttccagctgctcaagggctgcgatccgttcggcttcctttttctttttcagctcaatggtggccatcacttctgggctttccaaatcctccaacttcagcagatagcgatacagtgtttcaatcagaagcaaaatgtgtcgcgacttccgcatgctactgggatttacatcatggctcgcggaggtgggcagcggagtcgagctttttgatgaagaagttgcgttggcttcagcagcggcatttgattcaccactcataatgtcagcatcgataatttttcgcggagctgtcacacttccgtactgtagctttcccagtgagttctcgaacttcagtggtgagaatatatagcctgtcaggttgttgttgttaccacctgatccattgttcgtgttgcctgacgtgctgttggtgttctccgagttgcgtcgctcacgtccgtgtccattgcgagtaccattcttgttgcccaactgtacgagaataagctgcgcatggccgcgtggctgagtaagcggatgattcaactggttgtccttgtgcgcctgactgttgcgcatttgcccgttctgttgggccttgcgctccctgaacaccgtgtagtaatagtcgtcgatatacggcgtgtccgtattcagctgcgaaagctggattccgattagccagtgcttgtcgcgcgtgctcattaggttggcatattcatcgtactcttccagcgggtaatttcctgtaccatctggacgtcgtccttgttgctgctgttgcgcctgcgatctctgacgatcgctggccacggatcctgctctgctctgttgcatttggcgtacaacagcagcctgttgaagcagcggatggttttgctggatctcttgcactagtcgcatgttgaacatgttatacatggaattcggtggctgctgacctaatagacttgtggcagcttgcagcgggtgcggcggcattcgcggtggcagcatctggtgcggatggggaggttgcataaaagcccctggatggattccagcggcgcgcatcgcattgaagcttggatgcatcgcgaaattgttcagggccgtgggcagagcttgtggattgggtagaggtcgctggttgccgccgggcagtggaaagttgtgcggcatgtgctgctgcattagaggatgctggggcaattgcggaatattcccgggcagaccttgcgggtaaataaatccgggcggcactcggttgccaccaataccgtttagttgttgctgcgacgatggcgtgggcagtagctcgggtccggggaaacccaaatttggcctcggtggagaggtgtgcggcgtgcccaagaagccagggggtactgcaatgaattgttaaatggtgttattttcatatgtcgcagaaatctatcagggacttgaagtttgttccttaaatggttaaatctgtcttaaaaattgtccccaaaaatagattcgtaagaaataaatatttttaggaattatactttttgttggacatgttttctttttaaatactgaggcctgtttttgtatgcatcaatactttttagttttaatatataattacccttgtgctgcgcttgttgtggcggctgctgctgcgactgttgtttctgatgatgctgctgctgcaacatctgttgctgcaacatggttggtgtaggcacctgctgcctgttacccagactaaaatcatcaaacattttgcgttccgcctgttgctggctctgctgctgttgtttcggaatggcctgctgaatgatcatattgcgctctatatcctcgagagttgtaatttttggaaaaggctgtggattcagtgcaaagttggcattcgcttcctgcggtggcttcatttgttgtggttggtgctgctgatgttgctgctgctgtggcttgaaggcgctgcgcataggctcgcggaacaaatgttggttgttgggaaacggctgtgatccccagaccccggagtccagcttaatgcggttgctcagcccaccggcttcgctatcagtggtgaaagaggacaggtccatgtcgtccaacttcatggaggaaatgtttagctccaagtccgagtcccctatgtgacgagactgtcggaagggggcattcaaaggggccggagtggagccgcttgaagagggcgccgatgatagcggattagcgtgtcgcaggaaggcaccatttccctgatcggcaaaatccgtatttccactagattccgcgggtcgcttccgcaccctttcgccattcccgcccaggcgtaccatcgtctcatgggcttcctcccagtcgccatttatagcggatccaaaggtttcgtcattgagggcatcgtattccgcctcgacgatgcgtccatcgccaccatcttcgtcctggagaaacaattgaagcaagtaaattagacattcctactttttctgcccccggtggccttcgatgcccccttatttgccgagtgaaaagtgtgcgttgggcatttgccgacccctgtgcggcccgctatcccggatattgcagccgcaatgtcgggaccgctgcttaccggtagattcgtgtcaaagccgaaaaacgagtcatccatggcgataaatctattgctttacaaaaaattatcatgacttgtcagtgacaagttgtcacctcagcagtatagctgtcaaaatatcgatggtactatcgatagtctgacgtcgatggttttctgactatcgccacaatacatcaatttcgctcgcatataaatattatcatattacaaatgttggaattaacatgcaaatttaaaatatatatttttttcatacgttttttttcaataggtgaacgactgaagatttgtctaaatttataagtttgcattttgctacagtgatgttagaaaaaaatgatgatttaaccactgccaaatttcgtatgttgcatatttatttattcagtttgggacttaccacgactggttaataagtcaacaacattagattttactgatcaatgaaaaatctgccctaattaaggtgcatttgcactccttcaatgtattcgatattttgaactagttcgaaacttgaaatcagcgcccgcaagctcatccctaaattactagttcttgaactattgctttggacggaactacgagcctgtttccttttccaaaacaacttagtcgaaatgaagcggaaaacgagcgagatctggtgctttttccgggcggtggacgacacgtttgcggtgtgtaatatctgcaaggcgaagctctcttacaagacgaccaccacgaatctaagcaagcacatgaacaggatgcaccccacatcgggactcaaccggaactccaagtacaaattccagccgcagaccaccatcgccatcgaccggaacaaagccaagccgcgcaactcaacgcaagagctgatattgttagaattcgtgaagaaacatccgcgtctgcttcagaatccgacgtgggaaacacggggcaatctggagtcgctgtgggaggaactgtcatccgaacttaatagccacggtccgccgcgaaaagatatagccacctggagaagggtattctaacttactttttttctaaccgcttgcattataagttgatttgtttgtagg

SEQ ID NO: 10847 - DNA, 3487 bp, DROSOPHILA
tcatgataattttttgtaaagcaatagatttatcgccatggatgactcgtttttcggctttgacacgaatctaccggacgaagatggtggcgatggacgcatcgtcgaggcggaatacgatgccctcaatgacgaaacctttggatccgctataaatggcgactgggaggaagcccatgagacgatggtacgcctgggcgggaatggcgaaagggtgcggaagcgacccgcggaatctagtggaaatacggattttgccgatcagggaaatggtgccttcctgcgacacgctaatccgctatcatcggcgccctcttcaagcggctccactccggcccctttgaatgcccccttccgacagtctcgtcacataggggactcggacttggagctaaacatttcctccatgaagttggacgacatggacctgtcctctttcaccactgatagcgaagccggtgggctgagcaaccgcattaagctggactccggggtctggggatcacagccgtttcccaacaaccaacatttgttccgcgagcctatgcgcagcgccttcaagccacagcagcagcaacatcagcagcaccaaccacaacaaatgaagccaccgcaggaagcgaatgccaactttgcactgaatccacagccttttccaaaaattacaactctcgaggatatagagcgcaatatgatcattcagcaggccattccgaaacaacagcagcagagccagcaacaggcggaacgcaaaatgtttgatgattttagtctgggtaacaggcagcaggtgcctacaccaaccatgttgcagcaacagatgttgcagcagcagcatcatcagaaacaacagtcgcagcagcagccgccacaacaagcgcagcacaaggtaccccctggcttcttgggcacgccgcacacctctccaccgaggccaaatttgggtttccccggacccgagctactgcccacgccatcgtcgcagcaacaactaaacggtattggtggcaaccgagtgccgcccggatttatttacccgcaaggtctgcccgggaatattccgcaattgccccagcatcctctaatgcagcagcacatgccgcacaactttccactgcccggcggcaaccagcgacctctacccaatccacaagctctgcccacggccctgaacaatttcgcgatgcatccaagcttcaatgcgatgcgcgccgctggaatccatccaggggcttttatgcaacctccccatccgcaccagatgctgccaccgcgaatgccgccgcacccgctgcaagctgccacaagtctattaggtcagcagccaccgaattccatgtataacatgttcaacatgcgactagtgcaagagatccagcaaaaccatccgctgcttcaacaggctgctgttgtacgccaaatgcaacagagcagagcaggatccgtggccagcgatcgtcagagatcgcaggcgcaacagcagcaacaaggacgacgtccagatggtacaggaaattacccgctggaagagtacgatgaatatgccaacctaatgagcacgcgcgacaagcactggctaatcggaatccagctttcgcagctgaatacggacacgccgtatatcgacgactattactacacggtgttcagggagcgcaaggcccaacagaacgggcaaatgcgcaacagtcaggcgcacaaggacaaccagttgaatcatccgcttactcagccacgcggccatgcgcagcttattctcgtacagttgggcaacaagaatggtactcgcaatggacacggacgtgagcgacgcaactcggagaacaccaacagcacgtcaggcaacacgaacaatggatcaggtggtaacaacaacaacctgacaggctatatattctcaccactgaagttcgagaactcactgggaaagctacagtacggaagtgtgacagctccgcgaaaaattatcgatgctgacattatgagtggtgaatcaaatgccgctgctgaagccaacgcaacttcttcatcaaaaagctcgactccgctgcccacctccgcgagccatgatgtaaatcccagtagcatgcggaagtcgcgacacattttgcttctgattgaaacactgtatcgctatctgctgaagttggaggatttggaaagcccagaagtgatggccaccattgagctgaaaaagaaaaaggaagccgaacggatcgcagcccttgagcagctggaaatggccaataaaacgcccgaagaacgtgctgctgaagccgccaatccgcaaaccatgaatccgcaactaaagaacaagttcaactatgaggtagagacgaaagctgcgttggtcaataaattaaaggcaggtctggccttcgacaaggttatcgccatgatgaatgtgcgcaagggaaagatacttattagacgcataatgccctttattgcggatcaaagcattcgctgggtcgtgtggagcggcgtcttctgttccctacaaacagtggtgaaaaaggacaaggacgacgttgaaggcgtcttgtacgctctttacccagagtttaaaaaacacgttaacaaagctactttcgaactcctagtgagcatttcatctgctattacgctgaatgacaagaaacttgctggaattttttgcagtcgctttggaatcctttcgctggttgccctgatacttcgcgccgaggaaatctacgtctcgcgaactgacgcaactcttagcgaggagaacaggcaaaagtggcgagaatttctggcacaggttgcatcctgcctcaatcgcactattcaaaaccagaccatctcggcagccattgagtcggatgcaattcagccacttatggaccactttgaacggtttaaagatcttaaactggatgcactcttagcattaataactgaagccaggcatcaaattgattaggttgctttgacggattttcatttaacttgattgaagcgtttcaaataattgtgaaattatatagccgagttcactttgctttactcaattacgcatatgtttgtatagaatatgtatccaaaacttacatatgtacgatcgtttttacatttacgcatactacacaaaaatattgatacagggtataaaaatctcatactgaaattgagaaagtactcgactgtcaataaattttgataatagtttgttagaaacgttcttttatccaaaattgtgtgcactgtacaagaaaggtagagagaggaaatcatgttttataaatataatatcgaatggtaggttttgctcattgtacatacttatatcattttatattcgataaggagtacttttccggcattttctgtagagatttataaagaataattcaccccacaaattattctttttttttttttgtcatcgaattaacaactgggctctcctatatcttgtaatcacgattgtaaaaggaatatcataaatacgttttaaaatttaaaa

SEQ ID NO: 10848 - protein, 968 aa, DROSOPHILA
MDDSFFGFDTNLPDEDGGDGRIVEAEYDALNDETFGSAINGDWEEAHETMVRLGGNGERVRKRPAESSGNTDFADQGNGAFLRHANPLSSAPSSSGSTPAPLNAPFRQSRHIGDSDLELNISSMKLDDMDLSSFTTDSEAGGLSNRIKLDSGVWGSQPFPNNQHLFREPMRSAFKPQQQQHQQHQPQQMKPPQEANANFALNPQPFPKITTLEDIERNMIIQQAIPKQQQQSQQQAERKMFDDFSLGNRQQVPTPTMLQQQMLQQQHHQKQQSQQQPPQQAQHKVPPGFLGTPHTSPPRPNLGFPGPELLPTPSSQQQLNGIGGNRVPPGFIYPQGLPGNIPQLPQHPLMQQHMPHNFPLPGGNQRPLPNPQALPTALNNFAMHPSFNAMRAAGIHPGAFMQPPHPHQMLPPRMPPHPLQAATSLLGQQPPNSMYNMFNMRLVQEIQQNHPLLQQAAVVRQMQQSRAGSVASDRQRSQAQQQQQGRRPDGTGNYPLEEYDEYANLMSTRDKHWLIGIQLSQLNTDTPYIDDYYYTVFRERKAQQNGQMRNSQAHKDNQLNHPLTQPRGHAQLILVQLGNKNGTRNGHGRERRNSENTNSTSGNTNNGSGGNNNNLTGYIFSPLKFENSLGKLQYGSVTAPRKIIDADIMSGESNAAAEANATSSSKSSTPLPTSASHDVNPSSMRKSRHILLLIETLYRYLLKLEDLESPEVMATIELKKKKEAERIAALEQLEMANKTPEERAAEAANPQTMNPQLKNKFNYEVETKAALVNKLKAGLAFDKVIAMMNVRKGKILIRRIMPFIADQSIRWVVWSGVFCSLQTVVKKDKDDVEGVLYALYPEFKKHVNKATFELLVSISSAITLNDKKLAGIFCSRFGILSLVALILRAEEIYVSRTDATLSEENRQKWREFLAQVASCLNRTIQNQTISAAIESDAIQPLMDHFERFKDLKLDALLALITEARHQID

SEQ ID NO: 10849 - DNA, 31882 bp, DROSOPHILA
aaaaatttttgcttgacttgacaggttcgtagaaaagtcgcagaagaaaaagctgttccgtcggaattaaggcagccactatgtcgtatcaactgtaccgcaacaccacgctcggcaacaccctgcaggagagcctcgacgagctgattcaggtgagttcgcgctggcgaagtgaaacgcattgtaattttgggcttccatattgcagtacggccagattacgcccggactggctttcaaggttctgctgcaattcgacaagagcatcaacaatgccctaaaccagcgggtcaaggcccgcgtcaccttcaaggctggaaaactaaacacctaccgcttctgcgacaatgtctggactctcatgcttaacgatgtggagttccgcgaagtgcacgagatcgtcaaggtggacaaggtgaagatcgtggcctgcgacggcaagagcggcgagttctgaacaccaccgacccgatctgaacacccaatgtaaccccactaaacacaccatgtaaccccacaaaacacaccattataaccattacaaatagctgtaagattcgtaggcgataagctgggttggaaaacgaaaaccgaccgtgcgatgcagcaggcattgcaagaaatacactgttaattcacagttcaccgagtcgagtatgtttgttatgtattccgttaaaaaaaagggagttcttggaaacatgaggtgggtatgcaaataattgcgttacaaaaatctgtagggcacaaaagggttctttaatgccattaccaaatagtaatgcaaaatatgtgtacgtgtgaaaacatttatttattatttgctaataattgtagttcatttagtttgagcactttacagagctctgttagtcagctaatggtgagtgacctcgctagatagcagtgatatgttattttggtattttttagtcacactttttggtgtagccatttcgagtgggctcgctagcctcgcgacctgcagtcacacttgctccaacgaacaaaaaccaccgcccgcataaccacgcatcgttatttgttgttgtctacgccgtttaatcgctgacaattaacaacaaaacaataacaggaacggcaggcactgccttcactttaagagaagcccgcgaatcgaaactgccaggcgatcgaagtcgaggcgattttaaatcgaaaacgcgcgcgagatgcggaaaagccaaacgccgcgagctttgtttatgtgtatcggaaaataacataagaaaatcccttagattctttgtgcggatgagccagtgcgaaagcaatatcaataatatcccaagcagattgctgaataaatcgcattcgagaggtaaaaatgcaaaacgaagtgtgattttgaagagtgtgcctagtgtgtgctgcgaagtgactaagcgccgcaaagaaagtggaaaagcggaaaagcggagctagcggtggttggggaggcgagaagtgggcaagggaaaaatctaaagtgcatttatattgcgtgctaatctccgccgttttccactgcagaaacgtgaatataattacggcgaaagcggatcaatttttcgtgcagtcaacgagaaaagaaaaaaaaaaattgaaaataaaaccttgcgttggcgtcgcagcagcagaaaaattggaaacaaattgagcagcgccctgtgaaatataaataaatttatgtacccccttcccttctagttttgtatgtttccaattggactcctgctgcgtctccatcactttaaaaaaatacttctcgccttctaggaagtaaaagttgcgttgaatagcaattaaaattaatccataatatccgtatcgattatttaaaggtttgactaaaagatcggcaaaattaatttccgtcgcattaaaatctttacatcaaaactggattataacagatccgttgatattggcactcagcaggaaaacaactcgggggtaaccaacaaaatggtgaaacggtaagtaatcgtccaataatcgtaaatgcatttcagttttatcagtcaagcctatgtattctccgatatcaagcaatgtcgttaacccatttcgacagaccaattagcgtctatgttcgtcacaggcagggttctacagtcaacgctccataaagcagatccataaataaacaccagagctattgcttagaatgggttttttggaaagtgaatatagattacgattaactgtaagttcaagtacaatcttcgtaaaattcatttggatttcttttctctagccgaagtttcctgtacttcgtatttagaatggggatttgcgttgcattcgccgcgtctggtcgggtctattgaaccccaaaagtctgataaacaatttcacattctcaccgcatccatatcgcacaaattataacgcaatttataattgttttccttgtgagaggtttctgtttttttcttttcggttttgttaatcgctactacgtcgcaatgcaagatagctgtttctatttgtgtgcgcattttgtcactgccttgctttctttcccccaacttcatgttttcccaccgaacagcggctccaacaacaacctacccccaagctgggaaaaacacccccttcagggtgcatttccatcacccaccaccgcaccaccgaaatcttcctgcttcagcactgaaaactcagaactccagaacgcaacgccgcataaatttcgtgtgcgtttttccccaaacaaaaataaattgtaaaaaacaacgcatacagtaggcgtgttttcaaaaccggatctttagtacccttctataaaattattcattcgcctattaagaactgtaagttgcagtcggaaaattagtaagttcaatataacgtttaaatcaggcctcttgagatttaacgtataaccataaaaagtgattgatttccatgtataatcgctcttcgtttgattagtgtaatttaattactgtttgaagtttaatgtttttatcagttgtacttttcttttgcttgttttaatgaaataagttttttgattaagtgggattgtcataagttcaataccacattacacacatcaaagttaactatgcaaaagagtttttaaagatgtctgttttgtgttttatagaaagcgcttagctatagtttgtctctataaagggtatgaaaatctttagcccacttaattcaattcctgggataccctttttccagttgggttaacagatgatgactagttaccgataactgctttctattccccaccatcaagttcaaagtgtttagggaaatgaaaacttgagtgaaaagctctcaatgaaaataaaaaataacaaaaaagtagtgttgccaacacggcgacggaatgggaatacccttcaacttcaaactgaaaggatacagcgccataacatcgttgagatgacagcaaaatagaaaagcggcattcggtttaacgcatgcgccctgacgtcacgactgcagcggcagcagcaacaacaacaacaaccacgaacaacgacgacaatataatgtccaagtggagtttggctttgcaatttgattttctacacgattttcagacttttcatctgggggcccccaaaatagcaaaaacaaaaaacatggcagcgcctacataaataactgcatacgttgcattctcttgcccgcgctctctttctctcgctcccacttctttgggcttctcgctctcgcttgcttaattatagactttgtatctaacaatttgtatacccttacttgggttgctaagaattaatgtggctctttgtagtgctgtatataaatttcagagatattaatatatttccacgttgtttaataaattacggtctaataaaaataaaataatataaaattaacctacacacatatattactgacagggtgcagagaattcggcttttcgcacttaacttctcctctcgttttccattactttgtcgcgttgtttttcgtgttcttgtttccttctctgtctttcgctgatgttgttgttgttgttgttctccaagcaggttcttcttgctgcattttttacagttgttagggtcttgttgttgttattcagtttttctagatttttggtttgatgttttcgttgtcgcgccccctcagcatcataacccccgccccttggctgcttttccagaattttcaggcctttttccaactacactacctgcttgccccttttatcgatatattttatcacagcggcagtgggtcttatcgatgctgtctcgctcgcactcgcacacttcctgccgtttacctgagtccgcgacctgttccccatgttgttgtttttgttattgttgttcctctgtggctattcgggttccttggttgttgttgtacttgttgttgtggctctggtgatcgtctcgcagggatttatgtacaaatccacacagccttcatgcatatggccgtgtctgttctgttctgttttgttcggatcggtgtttattaaattccacgacgcttgcacagacgcgggtagaaatatagagtcagctcacagtttaataaaattattttttaaaaaacttgttatctatatttctcacgagtcaacaaatttctagctatttaggtaaaaacaggatataacaattatgaattccgatggtttattttgtattctctttatcatcttatcattacaatgtgataggcctaatttgtggcctactatcttggccaccgctgtgcgcttgcattttcagctttcagtggctgcaaggcggccgtttgccttatgcttggaaatttatttgtctgcacgccgatccccattatgtatgttcattggtgtgtgtatgtatgtagcaatgtacatatggtttgtatggaataagtcgcttccttgtatttctgtccatctctttctttcattcatccatctgtttgttcttttttggcgattaaaattaaaatttaattccgtcattctgcaggctgttgtagtgtgtatgtagttgttgttgcttgctcttgtctggcggctgccattgccccgtttttccattgagcttggctttgttttacggacttccttgttgttttcccccactcccctttttgccagaccaccaaactgcaattttaccaccgcctgttgctgttgcgcttagcaacattttgcttatgttgctcatttgttaagtgctaatttatttatgaaattaccactccatacgacacaccatttctggctgattcatatacacaaacgctcgtacaaacataattaactgatattattcatgcccatgactccagtgaataacgccggaattactttgcggacaagggttgagagattctcactttgaggtacaaaataaaccaactatgtaggcatttttgtttcattaaaacattttaaagactttaacgaacatccaaagatactggatatttttctccagtatgcaaatgtcttcaaactgaaatttttgtggtttctatatctcgcagcgatttgaacccattttttgtttaactcctatgtactttaaagccgacgaaataaatattcttatcagggcgacagctgctgagcttatgaagctgataatttacaacgcctttatcatgcaaacgaagaaatgccaattttagaaatgggagtttccctatttcaactcaattaaatgaatgaaatgtgacacagtttaatttcaggggagttccaaatgtagagaagcttagagtgtcagtgctatttgaattggaaattgttagcatccgcctcagaatttcatgctcgccttgacagttctttagctgaaagcttaataaacgaggattaacatttcagactgtctaatggttctatccccctttcacagtctaccttttttttggtcattctagacttacgagcaaactctggcagtttgagttacattctaagttggcattaaacctgtctcagcttttctgctgctgcattttgcatttgcccttgcttatcatttcacttttgtttcaaatgcagcgtgcactgataaggagcagaaaaatctctgattagcagcagctacaaaaagtgaaaaaaagaagaaattaatcagacaagtaaatacacgtgacctggatctgggactgaaaatctaaagaggggaacttaattaggacggtatttgctcgtgtgtgtctggctctgataagctctctggcggaaaatgtcaagcgaaaaatgcaaacagaaccaacagcagttccatgagctggttggataaataaactaaataaaaataaaaataacttttcgtactaatcacgagtgcgctgccgttgtgctcctaccattgaattccttctcattcggagcacaaagagccggaatcatcggtatcaacaacctcgtcgaggtcccatcctccgtcccattttccgcttccccgctttcccacggctctgaccgaaaaccgattcagctgtaatatttactgctgaccgatctgaatcgcagtacagtgaccactccctaatgcacatgcagtgcagtaagatgctgttcaaaaatagttttaaaaaattgattaacttggatgagcttttaaaaatatcaaatcaaattaactactcgttgcaatctgtaagatggtttggaaaatctcaaatttaacgacatcccagatttaaagtttctaattcgaggaaaatccactttggtagattgggaaaacgagcagatcgaatttcgatagctgggggctctgggttcaaagttcacggcgcttatcagtgcgcacatctctttcggacagcgcctgagattggagccaaattgccgtggcgtgcattggcatttgaactcgaagtgtcaaaagcacgaaccgtttgagattgcccaaaatgggaggcaagtttgatgctctcgggcgtttgacccacataaggaaccacccaaccacccccctggtttcggccctcttttcctaatggccaagtgaaagttttctctctcgctgctccggtggcttggcttggcttggcttggcttaagtaatttacaacaatttacgacaaatttgcattggacctgatgaaattttcgggctgtggtgtgaaaaaatatgaaagtggaaatgaaaatgaaaattgcccaacgaacgcatttaactttgatttgcaagtggctgcagctctgcttaaagtgaaatgattgggttattttcagtatgcaggtggggtcatttgcacatgcatgctcgtatgatatcgctttccgcaggtccagacaggatatgcgcctcgtcgggctgcagctgcagtgcaaaaaacttggctacatcctgcggggaaaatgaaacagtgcttaataaaaaaaaaaaaaaaaaacggcacaaaaagtgccaccattgtcattgtcgcctgaaacgtcggagaggaagtcaagggtgaacgaccacagggacattcagttgacagacagacaggcgattcgattaaacttttatgcaaggtggaatattcagaaagtcctaaacttcgtttaaccgcctctaagtctgctaaaagtttccgaaagccaactaaaatagtgcaggctttttgggaaaaccttctcaagagggaaaattatttatttgccacttaaagtgaaacagtaacagtaagttggtgttatattagaatagagaatatttcaaaacttttgtgtatactgattcgatcgtttttatcccgtcaattaataactagcatatgcataattaatgtgtcattaatgagtcgagcttagagcacaaagatcagattcctgatttccacaccatagaagctgctgaaagcgagccaagttggctgaatgagggcttagacctttgctgttgctgtttctgttcctgtttcggttgccttagccattcgccagacgccgacgagctttttgtatatgatttgaccttaattccctggcacattgcactttaaatgcaggccgactgtaggaaactgctcctttaagcgcattttgaactttgtttgcggctttcctctttcctctactcgccagcttattttttggttttgtcgggcatttccggtttgtgtgcgaagacgatgaataagacgaagatgaggagcctggctaagctcgtaccggtgaaagacgttggtgggccaggacctcaagtggacaggacggaggaaggatggaggagtcacatcctttgtctgccagttggcttagttcgagcttccacggcacaatgcgcccgcaggaaagtgagtgtgtgctagtctctgtttctgccacaaaggatagaggatattgctctcccacatgttagtgttgtctcagtgtgtggatgtgtgtgtgttaggtcattggctgctgtcctgccgctccatccttttccctccttgaacaaaactttgtcccaatacataaaattttatactaaaaaatttgttttcttcctctgctcttcttttgcaggtaagtttcggttgaaaactttcggagtttaaggcaattggaaagtgttgcctgcccccacacattgccacttgactttggccaagacctggaggtggattcaattggtttcggtctgctatttttcgacaactttttcgaccggcttacttatttatttaatttttctatgcggttttgtgaactcatttgaaataattacacggctctaactccaatgtctcgagtttttgcctgggacgcgtttattttggtgaacaattgatttcccacacgcggagacacagaaatcgcaaaaatcacaaagaccagaaatgggaaattccttagttattgttggattcgcataaatatgtatcttagttaagagttgaaaatcgcgtgggccgattccgcgaagtcagttggagttcagttcagttttgcagaggaggagcggaggctcgttagccttgttaactaaggctttgtaggttggcaaatccgttctgagaattcgtttcagatgtgccaaccaactgtaattggcaagaaattaagttaaggcataaaacttagctgcattagaactagaatagcttcccacttagctaaaatgagtcgtattaattatagttacgtccatgtacatatttgtggaatttatttatgtgggaagatcagcgccctgaaataacgaagccccaatgaagttagaaataaatacatttttaaagcgtagaaagtcccatacaaaatacaaagtagtggtataaactaatgattaattatacgaatcctttctgtaacatctatgaattttgcagtgcctttaaagtgtattccaatgactaagcgcttctagctaaaaagcaaacttttaatggggtctaaagagccactgggggaaaagtcgggacatgcattatctatgagtatatgcatttcggccgagtccaaagctgcgctcgttcccgttttcgtggctaagagcgatgcaaccaccgattaacttggcggttgcacatggccattctgcaatttcccgttgcgtcccttctcccgtgtgagcccatttcgtgacccaattaaactgtttacttgcataatttccacattagttagtgcgtaattgcattagttgaagtgttaatagaccatgcataacttttcgcgcaattctcaaatggcaaacagactaaaattgatgaacaaactgccgtgattatgcttttgatgttgatgatgatgatgatgattaaggcgcgcctacatttcggttttctatagtttgtttagtttggtttgggttgggttgggtctggatctaggtctggctctctgatttgtaactgcaattgcagcacacatactggcattcttggcacacaattgccgtggcatttattgggtgttattgttgcggtttcgcagttgacccacatatttgccaatatgttgcgcagtttatgctgctaacaagtcggctgatatgggggggataggtttcagagataaccaaccgaccgatcgagaggaagttacaccaaaggtgtcattatgattattatttatgcatatgttgtctgtatcgattcgtgggaaaactggagcaaaattaatctgtcggatgaaaagggagacgagaactagtttccgcacaaacaagctatctttctctgcggctcttaaaagtattaaaattcgcataagtaatttgttgtgagcataagttggccccaaattgctttcaacttttggggccaaacgtaaacacttaaatattcatggccagctgacgttgctatgcagaaataaaggagcaaaatgaaaactgtaggactatttaagataatctagcataacatttcagttacgaaatgagtaataaagtgaattataacgtcatgtctttgtgctgacctctttttcgctgtaaattgttaaatggactgcaaaaaaaaaaaaaatctgtggaaaatgcaatggtaattgctgttatcttcctgccttcatccagccgcaaaaatgagagacaggccaagaataacaataccatttttgctgataagcctgcaggcggatgaagccaagttgcggtcgtgactttgtgcgcgttgccgcagaaagagattgggaatctcttcatgaattcgaatactaagtactaagtttgaatgggtctatgagtttaggtaccttagtcataaaggttataaagctatttaccatgatatctttcctaatctgcctgaattttgatcctcttaatcatgggtcaatgtcttacctgctgagactttcttttatcatctgcaaaaacaagttacttatgttttaattatctgggtggattattgggcttaagagggttttctcatgagcaggcagatatgataagcaaagatttgcagatctattttacttacagatagccagtacagattaaatgggttcaaaaatcggcataggtttatctttaggatgctcattatattttcttcaaatgccgtttacctgacccacattccatctgtttgataacagctgtttgatgacctcagcttaattgacgctctgaatcatttcatcttacgatgctttgtttcaattgttaggcatttacacgtaatatacctctcattgccactcccacttttcgccctcatctggaataaaccacgcccccttcgacaactgctgccaattagtgggaagctgaaaaaagcaaaacatccatgaaattgctgcaattaactaacaaattgttgaggcagatcagtgattaaaacacgaaaatgcttttattaagcgaataaaaaaaaaacaaagaaaccaataaacgtaaggcacaaaaaatgttttcaatgcagcagccaattaactaaaacaaaaaaacaattttcgtggtttgtatgcaaacgtgtttaatattaaatactgtttaaattaataatccattaaatggtgtggaataatgcatttaaatgaaggaatgaagagtgtctcgcatatggttgagttggaaaattttcggattaagattgatcatcagataaagtcaattattctgttgataacttataatgttagattggatcggttattgaatcagacagagagatcaattaagactgtcgtctgaggtcagtttattgagtaagataaattacaatgttttatttcgtatgatattctatagacacaaaaggtctgaaaattgccataactagaatttttaaatgcctattttaatgatgatttttaaacaccttgagtctggatgatcattgcaatagtgaagaacttgcccctgaagagctcactgctctagtgcaatctataaatattttctatcagataatgcattaaacaatcattttttttctatattaaagtaaacttcataaaaaaaaggcgataagagcttcaagggtatgcactctcttgtctttcttgtcctctaatgaagctgcgtattaacaattgtttgctctggaaaactgaagttcaaacagattaaatcaccgataaaaaaccacgcaaaaagcgaaagaaaaatgaaaacctgatggggttttgctgactgcgtcacagatggaagtaaaactggttcgacttggggccccccaacatcgatgaggcaatgtggcaatgtcgctgaccagcttttcattgcacctttactttattttactttactttatactataactatactatgcttcacctcacttatccccttggctgcctttcttcgcgtgaaagtgagttcgcttggcctttgtctttggccggcggtcggcgtctgagcttgcactgattatggcaattgcaattgcaattgcaattgtcgctgcaaacaatgcggcataaaaagcaaaagagtcaaagaaaataaaagctcgacgcaatagccaaagccaaacaaaagtaatgaaaagaaatgcggctcgttgagcgatattactcttggacgaggtgtcgtaatttacagaaaaaggcgggcggaaattaaagagttctgaatatatattgaaaaatttaagaataactgcacctatcacacttatagaacattttataggtaatacgttttatgtgacttaataaaaacttatctttcggatatctttctgttctatttctgtgactttcgtaacgggaaaggtttaatttcctaacgcatataatataactagcctagagtattgctacactcactaacccctggatagacttccttttgatgttgatttttctgctgctgctgctatctgtcattgtcgccttgaaacgacatcgtctgctgctgctgctgcgtcttttgggttcagcgtctgattattgacgaagtcgacgtcgtcgttgtcacaatgttgttgacatgcccgctgtcccccgccggcgatccccatacccatccccgccagcttcagcccgctgacgactccgctgtcttctcctccgatccgtatccataaatcccaggctgcgccaaggtgctcgtggtgtgctctgtgtgtgcactgcacttgtcaacgcaatttgtagttttgtttcaatctccgccactctgccactcctcctccggtttccccctttctggagacgtctgctggctacttgtcatgtatatatatgtatatatatatacacgtgtatctatggggcttttatatgtatgtatattttacccgtgtgcgtgtccattgcggccgtgtgtggcctgaaccgggcttgtccatatggggagccatagcatttgcattaaaaatccatgagaaattgattttttcgttcggcttttcctcgtgttgagattggtttttgttttcgttcggcgactgcggttgctgcaattaaataaaaattatctgcacgctttggcgatttgagaattcagtgaacagatacccagatgtgcaatatgtcggttgtgcggggggagtggtgatactcgtatggatatggatggcattgcatcgggtatttgcacttgtctgcgatttgtccgggcgcgttaaattgatttgcgcgtataatgatgaccaattgactttgattcagaggcgataactgggtgcgcagcgtttatgacagtttttcaagcgtttctttgtgataattttcaggtgttgttttagatattgtttggcattagtatttatagaatttattatgaagtaaacaaaccataaataaagacacaaattatcattgcgtatttgctcttgaaaatttctttgttctagtcttatttttagaagacgaaatatttgtattctattttatgcttgcaaaaatcttttcgtcattaatgcagcagtatttcgcagaaaggtttattggtacattttatggagtatttatagctctaaaatgtatcataatttaaatccatatatatattcaatataattttcatgtaggtgaaaaatcaatgacaatttgtgaaattatttgggttaactggccaccttgaaaacaatttgtgaaggtcgaaaataaatgattttacagcggaattttcgttgaaaagtacgcaacttccgttgataagatcctacgtgtttgtagagcagcggaaacggaatagaaaacccagccaaaaatgtaacaactttgcgagtgaaacttatcagagtgtgtgtgtgtgcatagcgttcataaacatatttactttttacatgtggacgtaagcacgacttggggctataaaagttttacgccaatatccgttccaaattgccggggccaaaagtaaacgaaagaaaagagtggtacaagcggtggaaaaactaaaattgaaagtgcgcgatggtaaaatttgactaatgggggtttttcctgcattatacactcacactctgatggataacctttggccactcactcaacgtaatcgaatcgacaaattcttggcatttccaaaatcagttggactcttcggtgggcggaagggggcccttgccaccctccttgaaacttggaaactagaacggaactgagcagcgtttgttgcattagcaaaattgaaataacaacagaagcaatcctacacatatgtatgtatgtatgtatgtatatagtgtgtggcatggtatatactcgtatgccaaacaagggcacatatagcccgaattggggtcgtggtcgtaccatcagaaaggaaggctcaaaacatttctcaacaattaaatttctggtctgccgcttagcgagttgccctttgacatttgcatttggcttgggatctggatttgcagagatgtcaaaatacagaggacctcgcatcttttttgccattaacccgagcattttgcgattaacggttccgacagctcgaaaagccatttgtcacatgtctcgcttttaagtcgcaaaaagcaacagcgaggtataagcccagttaattgtacagtggaaagcatttcaattgacatgctttataaaattatgattgctgtaaaatataaaaatatatttgatttgactataagaaacttatgtattctgttcagtgtattctaagaccttgaaaacttaaaaagaatcatttatttgggttttcaaatatttgtttgaaagatccaaaacgtcgagcgctcgacttgtcgaaaataatttaaatctcgatcggttagcctgacagctccattgcacatttgctttgccgggctcgagatctctcgacatgtcaacagaaataagccagcttacgagccacgacacagagaacccggtcgaaaggaggagaggcaaggcaagaaccaaacagacgacaaatgccacagaacacgtaatgatgataaacgcgggatgcaagaagtggccgagtgggtggcggtggaacctctgcaggaatggggagggttaaattcggtggtatgggaggctaggtggttgggtggctgggcttgggttggaggggcctgttctttaacccatacagctcggtgacataatcggcacagttggcctggcaacaactgttttgccagcgcttgtttgttaccacacagtcagctggaggggcttctcaaaggggccgagtggataataggggaagaggagcacttggtattaaaataaacatacacttatgtgcgtaccgcttgcggacttccgatgacgaatgggacattttcttgattttgtatacctttgctggattttcgagaaaattataccctagtcggtgcttagaagttgcgctgggcaacgaacgatttccaattaattatttgcatagcgtagtaccgagaaatgcgagcgacaggtataattggaaggaacacattaaatatgattcaggcaacttgacggttaattcgtctagagggtacagagggagcctctctatcgataggggcaatcagcgtaatgatgcttttcccgggcaatcgatagcccttgatgattggggcttgtataatgcggaggtaacggaagttacaatgctatacctatggttaccaactggcaactgccaactggcaactaccaaccaaccaaccaatgtacgaatcaatattcacgcacactcgcttagtggcccacatccttttcttggaatcggagattggaggtcatgccgtgtctgacccaaaactgcacgctttctgtccgttatgtgtttgctttttggtctgtgacctttgacatccgactgcttttggcagctacgtattagagctcgggttgattgacataattcgaccgaccgccttgatttgaatttgagtttttgcgatggattgaatgttatggaatggaatggattggaaaagctgtgcccgtgctggccctttgttgcatatcgattttgtggaaatgtcaatcgaaactctggtgaaatgtcattcaaccggcggtgtcgatcggggggcgtaagcttggcctgtgggcgtggtcgggcaagacatttgccttggccattttatggcttcatttcaatttaacattaattggtgaatgttgctgattgttgctgctgctgttgttgttgcgcctgcattttcatagtttcgcctgcggccggcaatcaacaagcagctggcatctctcccgctctctttctcttggtacactgagagaaaagcttgctattgagtcataattggtagttagtagttggaaccaaactataaactagttgggaataataattgtaattataccaacacacaccaaagactttcaagattaaagatctttctatctattatgtagcaaatttcggagttaactaattctcaaggtgtagtttctcgattggttttcttttccccaggtgtagtgccttattttcctttcgctcctcctcgtcctgcccacccatccacaaccatgctccactgggtcggctgtgtctgcgttttggccatgcagattgtttgctggctggaacattttcaatgcataatcaacagcaacaacatccagctacgtgacgaattacgtgcaaaattgctacccaacagccacatcgacgagccaagtgttgccctttgtgcagctgctgttgctgttgttgctgttgttgctgttgttgctgttgttgctgttgctgctgctgctgctgctgcttttgttgtggatgtggatgttggtgttgccatgacgtttcgctgctttttaatagttttatttcatttgcgattcaaagacctttttctaatgcgcaaaaaacatattctctttgcgctggatcaccacttggagtgtcacgtacatcgtgtctaaagttttattgatcctaccctcatttttggctttgttctcagctgatagttttgtatgggagtttttgtggtacgcacaacgcataatttttgaatcaaattgcaattttcgtggctgccagaagaggaagatcacagaggtaaactccccttcttaacttctttttttttttcggattttttcctttggatcgactgagtggctgttgcgcttgcaggtgaaattgtgtgcagcgtaacatattattaaattgccttgattatggccagagagccatcgctcggagctccaaagtcgggctggtcagaaaaaaaaaatagccaatttgaaaccgcccgagtatttcctgtcgtgttgccgctgttcctctccgctgaccggcaattaaagtgtgtaaacatggccgacagagccggccaaaaagtgagctaaatcgactgtcggagtggcagacgtttgatcataaatcttagagtgctgccaaaaatagagtcattcttttggggggctacaaatggaatggactcgattcaattcaattcgatccgatgcgatgcgatccgatccaatggatggatggatgcatggctgcttgagcatgttcagaacagcagaacaggaacgaaaagagcgataaagaccaaaaataaacccgccacacacatgcagcagacaacaaagaaatcggctgccacgaaggagcctcaaaaatggtgaggtactgcattcgaaagcaaaagaaaactatttttgtagcaccgatctggaaatactctggcatatgtcgggaagttcattagagttcggtaattaaaggtgattgatattgtggagtaaataaaggcacaactattttaaggatcaatatgtttaatgtcatttaagcggccagtgagaactgattttaagtggtaagggaaatcttttagccgcagtgtaatccccctctatgggtaacctcatatgtgagcattttggttccattactggagtttcatttcattcacgggattaccttatcgttattatcgcttattggtaacgccacaaagtaagggtatcgaaagggttttgccgctctaatgattgatctacgattagttgagcaaatggaggttctttcaaatgccctctggagtggtgggtattcgggttggaatcgatccgaaccgaactgaggcgtttatatgggtcaatagactgacgatcgattgataatggcttgtcagataattgttgtgccagtttttccctatttccaatttacttctttggcttttttatcataaatagaacttatagatggagtttcttaatcaactttcaggaaagtagggaacctctcgtttagatttatttattattataaaataggcgatagcttggtttagttactttatttccttgcttttggtcgatgtgtttattatgtcataacgattttagtcacgcatctgtgtcgacaattttcataactttttctttattgttttgctttcttagcttttcttttctgctttgtttctgctgcgtttgcttttagcacctgcaaaatgtaacgctttggtttttctacacacacttttcactcgcctttcatttggccaaattatgtcacattttgtttaaatgcttatttaaacagcgccaaaaagtttcaatttccgtttgctcattaggccgaggcgtgctgttggttttgggacgtttcgaagcagtttagaggggaattggtaggtgaaggagggccaacataattaagcgctttccgaccaactacgggccgacagaggaaccgcccacacgcagcggtagaaataacttaatgccccatcaaactagctgcgatttcgtttcgcctttgctgctgcacatgcaaataccctggaatatggcaaaaaacaaagcagcgaagaatgccaagtgataatgtttacaattacgtgaaaaccaactctaaacataagtgtaaagtgtaaactatgaataaagaagtaaaaatacatttccacaagggtaacatctagtcttgtttctatcactacgagtattactttattctctttgcggatgatttattcttcccttctaatattttttgggtgctaatgagtttaacaacctgtggccaacactgcgccacttgcttcttatcaaagtccaaaagtgttatcgcaatataaaaaaaaaagtgcatatcaaacttgtgaacccatgacatcatatacacacagctaaaagaatagatgatgaaatggttatggcacatgcagtacttcagtgtcttatttttgctgaccgttcccagatccatttagaggggcagaataattaaatgccatctattgagaagatggtgatgttgatgatgaagatgatgatcatgggagaatggtttctatagtcgggcaagcaaatatcgttcccttcattctccactgtttatttcttctatctataagcttgtcattagtttcataatcacgcatactggcagcaaaaagtcgtgcgcagctcaacccagcacttggcatttgtttattaaaattgctgaaagcaacgcgagcgataatgacgtttggccataaaaacgaagaaattagcatattcatgctttcattacgatgacaaactgcagggaggcggtgatgggagcagttcggttttctatgccactaatgcatcccagccaaaagtgagacaaaacaatgcaccaaatcggagcagacaacttggtaatggaggctactgcagaaatagaaacactccacgaatgaaaagcgaaatgggttgtttctccatcttggcactccgcgtgctttttttatttttagacaaaataaaaacgaggagggtaaaaactaaaaacgaatactactgtcagtcggcaaaggaaaatccataaacttaggaacataatgtagccaaagcttgaggaaatctagccacgcaacgatcaaagggttccgaaaatactcttctcggccaatagaagtttacagcgctgagaactaaaagctaacaatatataaagtgaattccaaagaaaatataaattgtctttatatttatagttaagataagatataagtatagacttcctgacttacattctctttaatcgagatatttatttatagctttagaatgttgatacgaaaccagatatttggtaggcttacaaataatccgataaatagataaatactatttattcatactagtttggatgtctagatatattcaccatacctctttttgcatagagtctttgcaaaaaaaaaaaaacgtgctcaagagcagctcagacgtttgcttttgccaagtaaactaaatacactttttttttttgctgccctggccgtctgtttgtttgtttaattttagtcagctttgttttggtcgcctgggtgcgatggagtagtgcaaatttgtttgccaaaaaagcagctgggaaaggcaaggcgatggcaaaaatattgttcgagacgtgcggctgcataggcaaacaaaaaaatccaaaaactggcaagatcagggagcagtgccggacaaaaaagtatagctttcattgttcagtttagacatgtgttttgtaagaaaaatacaatacaatataagaccaaactaccagcgacgccaaacaagcttttaaatgaaatttctgctgattatgtaacaaactgaaagcgagtgtgggacaaagaaagagctatctttgttgtttttccaaccgggtgcttaaagaaaagtggttaagaaattgacgagcggcaatttgcataaatggaattagtgagccgccgctaacaaggcttaaaaaacccagcccagacccaaaaactctttgaccctgccagtcgataacaataagttgtatctgaaagatacacagtcctgcgctctgtatattttacgtgtagaagatattttatggtacaagtgttctaatgaattacctaaatgcacatctccttgcagtccaaagatcgttcacgaatgtatgtatctgcgctagtttcatggataatttgttgcttatgtgtatacattttacttggcttgcttattttttatgctccgcaatttggatgttctcttttggccattctttgtgcttgaatttcgctggcaaaacgagtttttttttcgtgaatgttttttgaagttgtctcaatgagagtttcattcttgaaatgcaaacagctgtgtggcagagacatgtgcacagatacagatacagatacagatgcggatatggatacagatacgaatacgaatgcgaatgcgaatactgagatacaagcactcagatacagatacatccacggcatgtgaatgggcatgggaagcatgagaagagcccggcatttcgcccatcagctaacccaagcacagaccgcaaatttaaccataaaatatggtaacgaaacacctgctcttacctgcgcaaaaaaaaaaagtgtcgtctgtccgcccttctcacctgagtgagtgttctgtgtttgtgcgtgtgtatgtgtgtggctgccattgtttccctcctgtttattgtttaatctgccattgcactttgctggttcttgcatttatttggcatgacactcgaggggcgacactgcagtttgaatattctactagcacttctttaccctactcaaatttcaaatgctacggatgaacaagaagtggaactatctatttctgctcttcaactacacttatccactgtcgccgcatgtaaatagagaccctactttgctccattcactcctcctctgctgttgacgacaggcaaactcagagatttatgaaagttataaatatagtgagccagcccagtccacggttgccaacgaatctggagcaaacgaagaagcagatgcagctgccatttgtactgggaacagccattcgaatttgatcgaaaactttgcccgcagaatgttatttttaaagttttgctatcgttgtcgcattgagttatggcactactttcctggttaaccacagcactgtaaatgagtgtggatgtattatggtaatctatggtttgtgagcaacttaatatttcagaaaatagatcatagatttcgtcaaagttcaaagtacatccaagtacacatttggattacccctctgtacaattgatttctgtgtttccattcacgctgacctttcgactctcgctgcctgtcgcttgttgctcttcacacattggaccccgtcatccgcagaccccgcggtaaactcaattagaggtgcagccagacgctaaaagccttgcgagagctcatttgtcgggcggctgtcgcccacctggactaatcaaatgagtgcaacgaatacgtgtgttactttggtgtaataatcaaattaatttgcataagctgcgatgcgaccccgtgacattaaaccgttgcggttccactggtggcacatcgatggcctatggtcaggtcacctcggttgccctgatttcagagccctacccttgatggcggggtcctgctgcagtttttagcatgcaatcgcatgggtgtgggtgagaaggggaggggggcggcatgtttgccctttgcgttagttggaaaatttattgtaatgcgattgtgttggccaactatgggtctcgttctgggctggttgctagcatgcaaggcaaaccggcgaaaatcgatgcttagagggcactgtcatgcaacggggaggtaactatatataatggagcacacttttacgcccatttccccacaaataccagctgcagttgtacacttcaaaaaaaaatcactttctggaaacaaaaatacattgcaggtttagatatcttattattcacataaaggttctgatttttttgcgtgcagcgaaaacctaaacacacagacacgaaaattgatttccctaaacaacagcaaaagtacaaaaccgaagccggcaccgcaaatacagatacaaatgcaaatacaaataccagcacaaactctggggtcgcgccatcaaagatatcgtatctcatggatgccccttttagtatctgtggatagctacatgtgtacgtgattttttttttatagcgtacacagtattttcaatgtactcctgtttttttttttttgccagcttttttggttgggccgtcgtaatgtgcttggtttagttttttgaaattgaaatgtatgcaaatagtggcatgttgcctttgaaaatcgataaattctttgatggcagagagcacagctgattgcatgtgaagtagtcacgcaaataatgggacatgggggttgtaaagccctcaaaactgttgtttcaaataatcaagatttatgcgatttgttaatgaattctcgccaccataccccaaagggaaatatatgtagtaccaaaaatggaaaatgtttcaattgaatgttgagtaatatgatggccctagatgggtaatagttgtttgaggattgtgggacttttcccatggctacacgcatattgtgtaaatatttactccgattccaatagtgatcacatctcgaattatttgtttgcctttgtttccccccaaaagttggtttgttaattgaattcaatttggacagcagtcaaatgacaaactttcattattattaatcaggctaggcttaatcaatttaacccagtttattctcggctgctgctaccgggtgggtggtcccattgttcgagtagtaaatgtcgcctaattaaagctactaataattgtatgataaatgggattaagtaattccttagttttaagacatttgattgtcggaagcttaagctcaaacatatttttaaagatcacatattttgtttttaaacaggttagttaaatacgaatgttgtaccaatgcgtaccttaatatatttgtcagttaattaagtataactttgttttggctatcaacctcaagctccaatgccaaatgatggtgccaagctgtccagatctcattgacaggactgtacatcaagccagaagatatgtctgtacatatctaaacaaagttgcagcgctaatttgaagccagcaaacagtgaggcagacgagaggccgagagtgatgagcatttgccatttcaccttgcaacgcgaccagagcctgggtggtgcaccacaccactccccggctgccacccaccgccccctgaaattctgtctgcagtgcacattttgaagagccacccccttctgttgcgcccatttagcccacgcaaaaggggagcaagtttaaatgcagcaagcaaaaatcaatgcaaccccagagcagccccaccatgcaccaccccttcgaacccctttggcacctccgccggtagagtacattaaaaaaaaaatccatttgccatgtttgtgagtgggcgtggaccggcgccatgctggtttattagattgccgtaaataagtttacgatgtgcccgaaaaaatagccaacaaaacttgtattagttgtaataaaaataaaccggggtcacagaacatccacatgctaatgagaaattcgttattgggcacaattttccaccattttgggatataattaaccctctaattatgcgattacgtacaagttgtcgatcttggtgctgtaatttgaggcaggatggaaggtgacacactcctaagacttccaagggaaaactaattacacttggagaaaaggaaagcttagataaagtgcacatccatgctggatttttgcactgtttagataacttatgttttatttttcactgcactgcagcggagactgagcggagccatttcctcatttgaaattctagaaaaccaagaagttgcagagtattatatatatacgtatatagaagaaagggcgtcccaaggcaagtgtgagccactgagatgttggaaatgagcaatttctttggcatttactttgaaattgttttgctttagttttctgcttctgccattttgctacttgttttgtttggttcccccctgctaactgagaaaacttttcctttattgttttcctttacttgcataacataatggctcagcagttgtagccattttcaggcattgtgtgaattaccaaaaaaaaaaaaataataataatagtaatatgaaaacaccgaaaccataaccatgtgcatttccattaaatatgtaattttcaattccattttcacttgcagcaccgacggcactgaatctcccatactggctgaagacggtggcgatggtcatgataaaccgcgattgcgctacggtgaactagtgatactcgggtaagtccaagaaaataataacaataatgttgttcttgacataaagtactttgtttgtacaataattacatacatatgtaggtgcttttatacggcagagtttgctgcttgccaagtgctgaaatgggcacttcaagtcttttgagttctctgttcttcgatttaaagccttttacagggctatttaaaataaaacattggctaggtcaataaagtactcaagtcaattaagatattgcagttgttgcagctaactttcgctttctcttgtgtacttgaaaggatttacacaagagcgcccagtatgctaagatcatttacctaattgatgaaggttaaacaatgactttagttgtatttaaacacataaatgctgcttttgggtttgataatcttataattagctgaatcgatagtaatactctcgaattatgtcactttgctgattaacatctaagcggcttaaacagattacctactttagcatacgaagatcagagattagctaaccagttacatctgacaccatctagccaacaccagccaaaccgaatcttttgacatcctattaccgtccatctcggaatcataaattaagattcactgcacttttatgggatcttcagccgaaccgcgcacacctaaaatacccaccgattccggccaccagccccaatcagtcaaacgcggctccatccaatccgctgcttacagaagtttaagtgctggctctgtaagcatgaagctagacacataaatttgatccacgcagcggtccgccggcggagattgatgattctggccagcagctgggacggatgattgtaaatcttgacggcggccggcgggaggggccaaccagctaagcgcttgacattgtgctgattggcaacgctttggggctgactcacagccaaagtgcgactcacagactccgggaatcgtttggtctccaggcttgagtcattagccgaaagcgttccgacctcgagctgcagttccagttctttacgtggcagttgttgttggcatttgttatcttaacactttttaattggacataggacaaaggcggggctggacaaaaattaagggagcggagaccctgtgtagttcttcatcaatttcccatttatcacgacaaccatgctggtccctcgagcaacatgtggtcactcattgaggattccccactccatggttacggcgtatgtgatatatgatagacaaccggacgatgattgctggacaacaaacctcggcgaaagatgttggactcgtatgaacacttggattgttgtcagcaaatctgaaactcttaattgttgtcatcaaaatgagacataaccaattaacgaactgaaaagcacaatgctggccaaatgtgggcatgaataaatccaaaaaccaaagtagcctcacatttacaaagcaaaaggtcaacatgtcccgagggttcaaacgtggggctgtaaacatggattggatttatgtttttcattagtttcacaggtactaaccttcggttctgggaactctttacatcacgcacggaaagttgatggttcatgaatagatagatcagttcaaagctaaaaattttggagaatttcctaaattcttatttttattaccaacacggaggaacatgcttgcttgtcaatgaaatcacatacaatattattattggcattttatgtctgatcattaatgtcaaataaaaagcggcatcaagaaaaagctatgaaaggaaccttatagctttattctgatttggtaaatcataaaattaaaagtcataaatatgcactacattttaaaaagagaacaaccatgaacatattaacacttaaattcatttgccgtttaatctgaaaagagattaaaatgcagccattaaactattgtgttgctcattttgtttcctaacttctaatgattggacacatctgctaagggattttgtccttcaacaaaatgagacacattttgcacgcatcaacactatcgatccagagtcaataatatatccatttattagtacagacatccatgggtaattgcatggcttgtggtctagctaatgtagcaaaaagaccaaaatagccaagggaaaacaaaagctaacccgcaattctttgagttattagtggccattatctaggcgaggcagggaagtgtgctgcccactaattgtgtaaacatattgccgacgtagaacttgacccacaaaaccgaacgaattatatttgttgagcaataatcccgcatgccagctctcttatcaacttgccccacatctgtcagcaaatgtatctcacactaaatcgctatctgtcccgttgcagctacaatggttacttgccacagggagatcgcggtcgacgacgctccaagtttgtgctccacaagcggacggaggcgagtggcgtcaagcgttccaagcactacatcgtccaatcgccacagacttcgaaggccattctggatgccaatcagcattcaatctcgtacacactctcacgcaaccaggcggtaatcgtggagtacaaggaggacacggaaacggacatgtttcaggtgagacaccccaaaggtttctgggccgcccggcggtctcaagagtttcggtttcacggtctgactttgatgaatgttgtttgcctaattagagccgccaaggcccagcaatagtgccccattcctggaggtcagaggtctgctctgttgacttctgaccttagctggtctcacaaagcgacattcaatattcatatcagtctggccagcaaagtatctcttcctgattgacatcacaagttacacttgtgatttatttactttgtgatatattgcctaatcattttctcatcccccatatggctcacactcgactaatcatgattgctgttctccgccaggtgggacgctcatcggagtcacccattgactttgtggtgatggatacgctgccaggcgataaaaaggatgccaaggttatgcagagcacaatttctcggttcgcctgccgcattctggtcaaccgctgtgagcctgccaaggcgagaatattcgctgccggctttgattcgagcagaaatatattccttggggtaagtcagctgtccatctggtaatctcctgctgattctaatgagattcgaacttgattttacacaggagaaggccaccaagtggcaggacaatgtggaaatcgatggcctgaccaccaacggtgtgctgattatgcaccccaaaggatccttctgtggcggcaatgccaagtgcggactatggcgcgagtgctccgtgggcggcgacgttttcagccttcgcgaatcgcgttcagcccagcaaaaggggcagccggtaggtgaaatttgaaatccaattcaatcagttgattaaaattcctgcttttcaactattgtagatctatgacgaatgcaacattctgcaggatggcacacttattgatctctgcggcgcaaccttgctttggcgttccgccgagggcttgcagcattcgccggttagtatctcaaatacaaatcagtcatattgcctagaaattaaataatttattaattacagaccaaacacgatttggagaaacttatcgatgccattaatgccggtcgtccacagtgcccggtgggcctgaacacgctggttataccacgcaaagttaacattggggatcaggtgaaccagccttacgtgtacttaaactgtggccatgtccagggtatgctataatgatttaagatattggagcaaaattatctaattctccctacattggcaggccatcacgattggggtcaggatgagaacactggcgcccgccgctgtccgatgtgcctggaactcggtccggtggtcaccctgtgcatgggcttggaaccagccttctatgtggacgtgggcgccccgacgtacgcgttcaatccatgcggacacatggcgactgaaaaaactgtcaagtgagcgattgcagccagttgtggctatgaaatgactctactaattgtgggtttatccttgaatcttgtagatactgggccaatgtggagatacctcacggtaccaacggatttcaggccgtctgtcccttctgtgcgacgcccttggatggagcgactggctacataaagttaatattccaggataatctagattaaatataaatttaatggattaacaaatgtatttacgtctatatagatactgtagtaattgaaagatgtccaagtttgaagcaggcattaaaactaggctttatttattatcattaattaacatttaacggcaacagaaaacggaaacaatttctgaatactgaattaaacaaacacaagaggagaacaaatttaattgaagaaaatgttgtatttgttgtgtctctggctgctatagttttgcattattcgattgctactatataattactgcattatgtttatcaaatcaatgcgattaattacgaaatgagcaatgccgctttcatcgctccattatacaccccattccccgatcgaaattgcatgttaatgtttcatgtttggtttcccccactgtataatgtaaaaatgatttgaaattatgaaagcgaggcatacaaacgcaatgatcagcaagcagcacacatcaaccatacgaattaattgaaattgcataattgtaaaagttgagaccgaatgtaaatcccagatatatttattgtgtataattgtgtaaaaacaaaaacaaaagattgaaatgtaatcgttgaacctaattattcgcaatcaattgcaaatacccaacatttgctatggaacgggcaaccaaaccatgagcagcaacatcatttacgtatttctcaccaaatctagagcttacatttagatcgtttagtgatcgaggagaacctaacacaattataaacaacaattaaacttcagcaattgaaaacatggtaaagcattattctaaataacaaataataatgaaaagtaaatatacaaaaaccgtataaacaacatgtacagtttcgaaactctgtcaacaaatacgtataaaaagcgaaatcacgaaatcgaacagattaagtatgtagcagcatacaaacggctagatctatataggtttaaatatatctgcagcgatctatgtatgttgatattcattttctgcccaaatcgcattatacattactaagttagttaatattacaccttattattatacattacgattatgtgtattattattttgtatgcattaaacacatttgtgtgttcattcaattttgcgttgcggtgtgttaacaaatcacaacattgcaaaacaaaaacaaaacaacaaaatagttcataataaatacaaaatgtaaaataaaaactttctagcaatacataaactaaatatgagtttttacttctggtggaggttcaaatttgatgtggatatggaaacgcttctatgaacattcgtttactctatatcaatttggaaatgattgcccctataatttatatggcaaaatccattttggagttctttgggattccattaaaataaagtcttcatgtgaacaattatcttatctttttgttattattcaataggaacacttttctttttattttttaaagcattccggagttgcaagtagattttatttgaattggttgatctaaaaagcatactttattcatttacgatcctaaatatttattactacatatatacatacatatctggccagaacatttgtttacctcctatcgactcagctgggtctgaaatgcgaacgtttagtgcgcatgctagtgaattttgtgtggcatacttataggggtgctttatttcgccacgcgttcgttgcaattcccaactggttttagctgctcagccatggaaaccctgctgccgagcatcgaaaagcatacttacctggcgtagaggttaaccgtgatcacgaaggcggttcctccggagtgaggcttggccattgcacctcggctgagttgacctctgcgattattcctaatgtgaataactcgtgcgtgtaatttttggtagccgggaatggcgttcgcgccgtcccgacatttataataaatattcaaactattaaggaaatagcaaaatgttatgaacaacgcggaatatagttgatatcgaattatggcaaattcttgcgcactttgtgtttgttgttgtctggctgatggatttgaaaaaagccacatacaagagaaaattaaaattattggcaaccaaagacatgaatattatattccattctaatgtctttgtggcaaccgtgtgatgccaactgttttttaaaaagttatacaaaactgtaacccacagcatttaaacaaaacatacccttgttttcagaaatttatttgtagaa

SEQ ID NO: 10850 - DNA, 2966 bp, DROSOPHILA
caacgaacaaaaaccaccgcccgcataaccacgcatcgttatttgttgttgtctacgccgtttaatcgctgacaattaacaacaaaacaataacaggaacggcaggcactgccttcactttaagagaagcccgcgaatcgaaactgccaggcgatcgaagtcgaggcgattttaaatcgaaaacgcgcgcgagatgcggaaaagccaaacgccgcgagctttgtttatgtgtatcggaaaataacataagaaaatcccttagattctttgtgcggatgagccagtgcgaaagcaatatcaataatatcccaagcagattgctgaataaatcgcattcgagaggtttgactaaaagatcggcaaaattaatttccgtcgcattaaaatctttacatcaaaactggattataacagatccgttgatattggcactcagcaggaaaacaactcgggggtaaccaacaaaatggtgaaacgcaccgacggcactgaatctcccatactggctgaagacggtggcgatggtcatgataaaccgcgattgcgctacggtgaactagtgatactcggctacaatggttacttgccacagggagatcgcggtcgacgacgctccaagtttgtgctccacaagcggacggaggcgagtggcgtcaagcgttccaagcactacatcgtccaatcgccacagacttcgaaggccattctggatgccaatcagcattcaatctcgtacacactctcacgcaaccaggcggtaatcgtggagtacaaggaggacacggaaacggacatgtttcaggtgggacgctcatcggagtcacccattgactttgtggtgatggatacgctgccaggcgataaaaaggatgccaaggttatgcagagcacaatttctcggttcgcctgccgcattctggtcaaccgctgtgagcctgccaaggcgagaatattcgctgccggctttgattcgagcagaaatatattccttggggagaaggccaccaagtggcaggacaatgtggaaatcgatggcctgaccaccaacggtgtgctgattatgcaccccaaaggatccttctgtggcggcaatgccaagtgcggactatggcgcgagtgctccgtgggcggcgacgttttcagccttcgcgaatcgcgttcagcccagcaaaaggggcagccgatctatgacgaatgcaacattctgcaggatggcacacttattgatctctgcggcgcaaccttgctttggcgttccgccgagggcttgcagcattcgccgaccaaacacgatttggagaaacttatcgatgccattaatgccggtcgtccacagtgcccggtgggcctgaacacgctggttataccacgcaaagttaacattggggatcaggtgaaccagccttacgtgtacttaaactgtggccatgtccagggccatcacgattggggtcaggatgagaacactggcgcccgccgctgtccgatgtgcctggaactcggtccggtggtcaccctgtgcatgggcttggaaccagccttctatgtggacgtgggcgccccgacgtacgcgttcaatccatgcggacacatggcgactgaaaaaactgtcaaatactgggccaatgtggagatacctcacggtaccaacggatttcaggccgtctgtcccttctgtgcgacgcccttggatggagcgactggctacataaagttaatattccaggataatctagattaaatataaatttaatggattaacaaatgtatttacgtctatatagatactgtagtaattgaaagatgtccaagtttgaagcaggcattaaaactaggctttatttattatcattaattaacatttaacggcaacagaaaacggaaacaatttctgaatactgaattaaacaaacacaagaggagaacaaatttaattgaagaaaatgttgtatttgttgtgtctctggctgctatagttttgcattattcgattgctactatataattactgcattatgtttatcaaatcaatgcgattaattacgaaatgagcaatgccgctttcatcgctccattatacaccccattccccgatcgaaattgcatgttaatgtttcatgtttggtttcccccactgtataatgtaaaaatgatttgaaattatgaaagcgaggcatacaaacgcaatgatcagcaagcagcacacatcaaccatacgaattaattgaaattgcataattgtaaaagttgagaccgaatgtaaatcccagatatatttattgtgtataattgtgtaaaaacaaaaacaaaagattgaaatgtaatcgttgaacctaattattcgcaatcaattgcaaatacccaacatttgctatggaacgggcaaccaaaccatgagcagcaacatcatttacgtatttctcaccaaatctagagcttacatttagatcgtttagtgatcgaggagaacctaacacaattataaacaacaattaaacttcagcaattgaaaacatggtaaagcattattctaaataacaaataataatgaaaagtaaatatacaaaaaccgtataaacaacatgtacagtttcgaaactctgtcaacaaatacgtataaaaagcgaaatcacgaaatcgaacagattaagtatgtagcagcatacaaacggctagatctatataggtttaaatatatctgcagcgatctatgtatgttgatattcattttctgcccaaatcgcattatacattactaagttagttaatattacaccttattattatacattacgattatgtgtattattattttgtatgcattaaacacatttgtgtgttcattcaattttgcgttgcggtgtgttaacaaatcacaacattgcaaaacaaaaacaaaacaacaaaatagttcataataaatacaaaatgtaaaataaaaactttctagcaatacataaactaaa

SEQ ID NO: 10851 - protein, 424 aa, DROSOPHILA
MVKRTDGTESPILAEDGGDGHDKPRLRYGELVILGYNGYLPQGDRGRRRSKFVLHKRTEASGVKRSKHYIVQSPQTSKAILDANQHSISYTLSRNQAVIVEYKEDTETDMFQVGRSSESPIDFVVMDTLPGDKKDAKVMQSTISRFACRILVNRCEPAKARIFAAGFDSSRNIFLGEKATKWQDNVEIDGLTTNGVLIMHPKGSFCGGNAKCGLWRECSVGGDVFSLRESRSAQQKGQPIYDECNILQDGTLIDLCGATLLWRSAEGLQHSPTKHDLEKLIDAINAGRPQCPVGLNTLVIPRKVNIGDQVNQPYVYLNCGHVQGHHDWGQDENTGARRCPMCLELGPVVTLCMGLEPAFYVDVGAPTYAFNPCGHMATEKTVKYWANVEIPHGTNGFQAVCPFCATPLDGATGYIKLIFQDNLD

SEQ ID NO: 10852 - DNA, 2921 bp, DROSOPHILA
tagttgttaagaccgaaataggctttttaaatagtcccaatattccagtcagaaacgtttttcgctgtgaaaatatgtaaacgacccacctcatccgaatgtatttctacgtgcgccgtcttttaatggcgggttttatccgagtcctgaccatttctggacgcttctgcactcctgcccttctgccccacacatggcgctgagaaatgaaagcatattcaagtgattaatgcagatggccaccacatcgggcaaatgcggatccgctggtccccggggagtcgccgactaggataaggagctggcctcctcccacagcagtcgagtaattaaacttgattaattgtctagtcagcatgaaggtaaaaatcggcgtagccaagataaacgaaacggaaatggaaattaattaatatgaggctaagtaaaacaaaaagaaataatgaacaagtttactttggcaataaacaaaggaacattcaatgatccaatcgatgggcctcgagtgccatgtcggttccccaaatcgcacaatactcgtatccaatttaattttcacctgcacactttttacattcctctgtgcagtgctccaccttcgaatcgcaatgtcgaaattccataatcagcaaacaaataaataaacagctggaaaacttttcaaaaacttttgcaccttgtgcacataaagggtttcattttgtcttggcacgcaaacttctcagccaaatcagcgatttcgcaaggcggaatttatttaatttgcatacgtatttatgtgttaaatagttctttaatgcagatgaagttttattgtatttattcaaatagaatttaagttaagttcaattcaaggcagccaactcttgacaccacgtaagttgacaaaagtataaatgtattagtgttggtaaataaccaagtaattgttgaccaaagctatcctgtttgtcatggaagtcattgtcaaacacattctgaaaaaaaacttttaacatttggaagggcagctttgcagtatttttagaattttcagtcaatttgggatattataatcattctaaaattttctacgccaagtgtttcatttggatcccattccgaagaaagcataagatctctgcggtcatctttcacctttgcttctatctatagcgcagagaaaatgaccaagaaggagtcatccgtcccgacgctatgttggggatacgccgggatacgcggcatgttccaaactggaagaccagtggatccgccccctcctctccctaatttgcggatgaagacgaacctgatcctcaactaccttccgcaggacatgacggagtctgagctgcaccgtctcttctccaagttcggtgagatccgcaaggccaagatcatccgccaccgcaggactggcataagctgttgctacggattcgtcgactacgtgtcggaacgccaggcggctgctgccgtgaatggcatggatggctacgagactcgcggcaagcgactgaaagtggccttcgcccgaccttcggaatatgaaagcaccagctccagcctgtacgtggggaacctgcccacgtacatggatgagaagaaggtacgagaactcttcgccacctacggcaacatcgtggatgtgaacttgctgcgccacaagttcaacaataggtcccgtggcgtggccttcttgcaatttgagttggtccgcgacgccgaggtggccaagtacggcatggatcggtacatgatcgaaggcgcctcccggcccctgacggtcaagttcgtggagcgcgagaaaaaaggctcgagttctacctccagtggctcccagtataaggacaagcgtaaatcttccccaccaccctacaagcgtcgcgagaggacgaacgatcatcatgtgtctaagcgttctcgagattcggactaatcattatgcgtatttttgatagaacttgctgattaatttgattaatatatatatagaacctgtaaggaacacctttttttaaacctcagctgaagaacaaattgtgattttgcacttttgtcgtatactcaatttcctttaggtagtccggtccaattaattttggtcttaacgcattcgttcggttatgcatttggctgccctctgattttggccttacataaataattcattaaattgccgcaggagctgggcttatcgttcgcaaacaagccactcctacggacatgagatcctcggctcctaaaaagcattaacagctttatcagtcgcctggtaacctcgatttagccaggggccaccagttggccaaaaaaggtgcggagcgtccgattcggtttcggtttcgggttttgatttcgattgcgggatgcatgcaaaggattggcggttcaaataaataatgaaaacaaagggcgcataaatatttgaagatcgcaaaccgaatgaaccgaaacgacttacgaaagtaggtgggaaacaagtgaattgaaaattatttccaattcgtttgcttttctcattataattgaggcgcaaagttgcccctgcatctcggaatcggtatctcctcctccggttacccagctggtatccccttcgactgctgctcttgtttcagtctctggttccagttcagatttaacttacagattttgctttacaaggacccttcatgcacgactgtggtatgcacttttgacggtcacagtttaaatgaagttacataaactctgggttggattcggcaataaaatatggaggattttgccaataactacatttttatatagggttgtatgggttgtgttgctcttttgaattaatgtgcctcctggacttcctattttgcataaaagcacgcttaatacataaaattttaaagaaaatcagttgtttaaagcttagagaaaatcgttcgctttgtaaaaactagaat

SEQ ID NO: 10853 - DNA, 921 bp, DROSOPHILA
ggaagggcagctttgcagtatttttagaattttcagtcaatttgggatattataatcattctaaaattttctacgccaagtgtttcatttggatcccattccgaagaaagcataagatctctgcggtcatctttcacctttgcttctatctatagcgcagagaaaatgaccaagaaggagtcatccgtcccgacgctatgttggggatacgccgggatacgcggcatgttccaaactggaagaccagtggatccgccccctcctctccctaatttgcggatgaagacgaacctgatcctcaactaccttccgcaggacatgacggagtctgagctgcaccgtctcttctccaagttcggtgagatccgcaaggccaagatcatccgccaccgcaggactggcataagctgttgctacggattcgtcgactacgtgtcggaacgccaggcggctgctgccgtgaatggcatggatggctacgagactcgcggcaagcgactgaaagtggccttcgcccgaccttcggaatatgaaagcaccagctccagcctgtacgtggggaacctgcccacgtacatggatgagaagaaggtacgagaactcttcgccacctacggcaacatcgtggatgtgaacttgctgcgccacaagttcaacaataggtcccgtggcgtggccttcttgcaatttgagttggtccgcgacgccgaggtggccaagtacggcatggatcggtacatgatcgaaggcgcctcccggcccctgacggtcaagttcgtggagcgcgagaaaaaaggctcgagttctacctccagtggctcccagtataaggacaagcgtaaatcttccccaccaccctacaagcgtcgcgagaggacgaacgatcatcatgtgtctaagcgttctcgagattcggactaa

SEQ ID NO: 10854 - protein, 251 aa, DROSOPHILA
MTKKESSVPTLCWGYAGIRGMFQTGRPVDPPPPLPNLRMKTNLILNYLPQDMTESELHRLFSKFGEIRKAKIIRHRRTGISCCYGFVDYVSERQAAAAVNGMDGYETRGKRLKVAFARPSEYESTSSSLYVGNLPTYMDEKKVRELFATYGNIVDVNLLRHKFNNRSRGVAFLQFELVRDAEVAKYGMDRYMIEGASRPLTVKFVEREKKGSSSTSSGSQYKDKRKSSPPPYKRRERTNDHHVSKRSRDSD

SEQ ID NO: 10855 - DNA, 4446 bp, DROSOPHILA
gcgattgcagctgcaatttggaagtcgcccaggaaggcaagtaaacaagtggactcgtggagggagtggtgttgctatagctacccaaccccccgattttcgccgggcacgcatgcaaaatggccattatccggagggttggctcaggtgcttactccctctcggccgaatgtcctttgaccaggaggccaccttaagtgtaatgagtcctcgagactttttacctgctgggtttcctttcatattccagcacttgcgtgctcaaaattgtgattgccatcattattagttactttcttaggattttgcatacaatttgtaggtatgtaaattagcaaggactattttagaaattaaatcctacgtaaaggaattatttgttgggttacttaattaattattctctctaaagagaccatttgtatagtcaattcttttgcacttctacgtttttaaatgggtttgaatggtttttgcaaaaattaaattagtaagataataataaataaaaaataaaaataaataattcagattgtataataagctaaatcgcttttacaattattttcctatattatttattttttcaattcacttctaaaatataacttttttaatgtggtagctataggatataatataatataagctcatactaatcattatatttgtatttaaaaaacaaatagatttcaagcacacttttttattagcttaaaaaagaatatttggcagttagatgcattagaatttgagctctgcgaaagctaagactattggctgtactaatcaaatcttaaacagttgcaaaaaaatatctatatgccttaagtaaatttttaagcgcattaacaatgtttatgtttatgtttatacgccaacaaatgttaaattatttgcttatgtatatgaaagtcgggcataaagctgtctgtcgtttttagagcttttggccgcgacgtgcgacggtcacactgatggcctcccccacttcttccttgcaaggacaacacaattaggcggcggacacatacagtttttttcccccgatccgtggccgccagttagcccagtctcgtcccccgaccgacgagtgattcccgacagcaaccgttggtcattcgaatccaggatgctgcactggcgccgcacagattagatattcgcagtcccagacgaaaatgaacaatttggtaagtgggcggtgacggcggtggcagtggaggtagcagggctcgatttcaagctcagatcttgggtgtctctgtttccgattgtgtgaactaatcactgcgatccttgcaggagcactccaagcatttctatcctgataactacaaattggatctgtctgagaccatgaaggcggctctgtccaaaggacccggtggtggtgccggtggcgggggcgtggcaggcggagatatgctgccgcagccaaatgctggaatgccaggagtgggctatgttacggaaaagctgtacatgctgctgcagctgtatctgcagaacaaaggctggaatcccagtgctgagctgctgcagtgcttcagcgatctcaaggacaatgccatgctgcccagcgccgcctatctgcagtaagtaggggttgtgggttttttcagatccgttctcataacttcctcgtttgcagagtcctggccaaccgcttaaccctggactcccagggacggctaatactgcgcgacaatggaaagattgtcttgccctttgagcattttgccaatgcggtcatgctaaagcacatgtcaggtccgcacggcctgcaccttagtgtcgatgccacggtgagggcagtcattgagtcgtacaccatcggtcgggatcagttcggcatggagaaagagttcatcatcgaggtggtgcagtcctgcccaagtcccgcatgtcgctactataaaaaccacatgggaatttcgcccatgccgttcatggagcagcagtatccgggcgtaaacactcccgagttcctgcagcgcttggcgcatctgccgcctgggggagcagccggatctgggccaggaggctccgcagccggatccacctccagcgtggcaagcagctcgagttcggcgaacgtggaaatcgatctgtccaagtcgacgggcgcgaaggtgccccaggtgccggtgccgccgcagttgcagcacctgaccaagcagcagcagagcactctccagacgcagctctcccagatcagtgctgccgccgctcatcatcaacaacaacaacagcagcaacaacagcaacagcagcagcagcagcaacaacaacagcaagcagcagccaagcaccagcagcaattgactgctgccctcatccaacagcaaaaccgtgtcctcgcccagcaaaatttagagaagcttagcaaccacctcagtccgctggaaaagcagcgagttttcgcccagctggatccaaagcactttgatcccatggccgttgcggctgcagccgccaatcttcaaatccaaggcctgatgcaatcgcaggcagtggctgccgccgtcgccgccaatcagcagactccggcggctacgactacatctgctgcaggaggagctgcagccggcccgcaggcccatcacggacaccatcccttgccaccgccatcgcagtcgccacactcatcctcttcgtcttcctctcattcctcgttggaccagattacccacaagaacgtcgccgactccttgcggtgggtgagatttattagatattattattttaaattctttttcttggcaaaacatgtgtacaaagacttatttttttattaaaacaaacaaaaaatattgtatgtatttgataagtaacgaattaggttgtttacaatattatttattatttgctatatgtaaagtaaattgatcacttttaaatgtttgctttaggcccttaattgaattcatttaacttttccgatttcagttccaatctggactcaatagaatcgaataaggatctgctggcgctgcacaacggagcctgggccaccggcgatgccaatcgaatggatcacttggccgtgggtcaggacaagatagtgcgcatctttgcggagctgatgcgaaacatgtcgcggatgaaaacctacatacgtccctcgatgtgcaagccctacggcaagcagagtgagagtctgcagaaaagtgagtaccttggctgggaaccggtttcgctatctgcgatgctgaccgcctcctgcttgctcgttctcttccccgacagccctcatggacaccattcagatcgtgcagacgctgcgcaactgcctcccagctcctcacatacccgtgtcgtcctggaaaagtgagagcgagggcaacgtgggatcaggagtgagcgcgggagtaggagtgggtgtccctgcaggacttaacctgggcgccgccttgggtctgccatcgggcaacatgcactagatgcgggctggagctcatcgggtagcatgcaatagctccggatttatccactcacattcttccagcagttagagaacacttagtacttacacgcagagaaaagcatagatgataggcatagcaatttaccctcgtaggcgtggctccagttttccttttagcaattacgtgccatgttcaacacaagacttgatttcacattttccacatttgactgacctttaggcatacatatgtatcgaatcccgcggcttgaatttgattcccatcactctttgttttccagtttggcatgcaaaattatgaagcaaatcggcaaattagttaaacaattggcaaaacgtctgtgatatttgaattatgttggcaaacggaagacaaaactaaatttaatttattacgttgtgtgccctctgttgtaatgtcttactttttactttgtgcaatatctactaagcatatattcttagccgttctcgtgcaatcgacgacttttcgcccatatcaaaagcaactcgaatgtagcctatacttaaactaacctactgataatcggacatgatagacgcgtaagacttacattatattttgcattaggacttcagagtatctgaataacaattggcggatggccgcggtggcgaaagcgacattacgagttgtgtttaaatttaagaagctgaagaagggttgtactccgcatgcaagggctatttaaatatatattttaacccgcccgagctcaccattaccagaaattcgataaacgagcaaacagtattatacgcaataaaaagacacctgcaaccataagtatttacctagctgatgtgtgggaatttatcgtaacataccatattatcgcttaatgtttaacttctggacttaataataaataaatattttattctacgacaaagaagaacttttcaatgtaacattattaactgctttaagtcatatccttaaactttcgccttgaaaatctttaaaaccctac

SEQ ID NO: 10856 - DNA, 1966 bp, DROSOPHILA
gcaaggacaacacaattaggcggcggacacatacagtttttttcccccgatccgtggccgccagttagcccagtctcgtcccccgaccgacgagtgattcccgacagcaaccgttggtcattcgaatccaggatgctgcactggcgccgcacagattagatattcgcagtcccagacgaaaatgaacaatttggagcactccaagcatttctatcctgataactacaaattggatctgtctgagaccatgaaggcggctctgtccaaaggacccggtggtggtgccggtggcgggggcgtggcaggcggagatatgctgccgcagccaaatgctggaatgccaggagtgggctatgttacggaaaagctgtacatgctgctgcagctgtatctgcagaacaaaggctggaatcccagtgctgagctgctgcagtgcttcagcgatctcaaggacaatgccatgctgcccagcgccgcctatctgcaagtcctggccaaccgcttaaccctggactcccagggacggctaatactgcgcgacaatggaaagattgtcttgccctttgagcattttgccaatgcggtcatgctaaagcacatgtcaggtccgcacggcctgcaccttagtgtcgatgccacggtgagggcagtcattgagtcgtacaccatcggtcgggatcagttcggcatggagaaagagttcatcatcgaggtggtgcagtcctgcccaagtcccgcatgtcgctactataaaaaccacatgggaatttcgcccatgccgttcatggagcagcagtatccgggcgtaaacactcccgagttcctgcagcgcttggcgcatctgccgcctgggggagcagccggatctgggccaggaggctccgcagccggatccacctccagcgtggcaagcagctcgagttcggcgaacgtggaaatcgatctgtccaagtcgacgggcgcgaaggtgccccaggtgccggtgccgccgcagttgcagcacctgaccaagcagcagcagagcactctccagacgcagctctcccagatcagtgctgccgccgctcatcatcaacaacaacaacagcagcaacaacagcaacagcagcagcagcagcaacaacaacagcaagcagcagccaagcaccagcagcaattgactgctgccctcatccaacagcaaaaccgtgtcctcgcccagcaaaatttagagaagcttagcaaccacctcagtccgctggaaaagcagcgagttttcgcccagctggatccaaagcactttgatcccatggccgttgcggctgcagccgccaatcttcaaatccaaggcctgatgcaatcgcaggcagtggctgccgccgtcgccgccaatcagcagactccggcggctacgactacatctgctgcaggaggagctgcagccggcccgcaggcccatcacggacaccatcccttgccaccgccatcgcagtcgccacactcatcctcttcgtcttcctctcattcctcgttggaccagattacccacaagaacgtcgccgactccttgcgttccaatctggactcaatagaatcgaataaggatctgctggcgctgcacaacggagcctgggccaccggcgatgccaatcgaatggatcacttggccgtgggtcaggacaagatagtgcgcatctttgcggagctgatgcgaaacatgtcgcggatgaaaacctacatacgtccctcgatgtgcaagccctacggcaagcagagtgagagtctgcagaaaaccctcatggacaccattcagatcgtgcagacgctgcgcaactgcctcccagctcctcacatacccgtgtcgtcctggaaaagtgagagcgagggcaacgtgggatcaggagtgagcgcgggagtaggagtgggtgtccctgcaggacttaacctgggcgccgccttgggtctgccatcgggcaacatgcactag

SEQ ID NO: 10857 - protein, 572 aa, DROSOPHILA
MKAALSKGPGGGAGGGGVAGGDMLPQPNAGMPGVGYVTEKLYMLLQLYLQNKGWNPSAELLQCFSDLKDNAMLPSAAYLQVLANRLTLDSQGRLILRDNGKIVLPFEHFANAVMLKHMSGPHGLHLSVDATVRAVIESYTIGRDQFGMEKEFIIEVVQSCPSPACRYYKNHMGISPMPFMEQQYPGVNTPEFLQRLAHLPPGGAAGSGPGGSAAGSTSSVASSSSSANVEIDLSKSTGAKVPQVPVPPQLQHLTKQQQSTLQTQLSQISAAAAHHQQQQQQQQQQQQQQQQQQQQAAAKHQQQLTAALIQQQNRVLAQQNLEKLSNHLSPLEKQRVFAQLDPKHFDPMAVAAAAANLQIQGLMQSQAVAAAVAANQQTPAATTTSAAGGAAAGPQAHHGHHPLPPPSQSPHSSSSSSSHSSLDQITHKNVADSLRSNLDSIESNKDLLALHNGAWATGDANRMDHLAVGQDKIVRIFAELMRNMSRMKTYIRPSMCKPYGKQSESLQKTLMDTIQIVQTLRNCLPAPHIPVSSWKSESEGNVGSGVSAGVGVGVPAGLNLGAALGLPSGNMH

SEQ ID NO: 10858 - DNA, 3247 bp, DROSOPHILA
acgaccaccacgaatctaagcaagcacatgaacaggatgcaccccacatcgggactcaaccggaactccaagtacaaattccagccgcagaccaccatcgccatcgaccggaacaaagccaagccgcgcaactcaacgcaagagctgatattgttagaattcgtgaagaaacatccgcgtctgcttcagaatccgacgtgggaaacacggggcaatctggagtcgctgtgggaggaactgtcatccgaacttaatagccacggtccgccgcgaaaagatatagccacctggagaagggtattctaacttactttttttctaaccgcttgcattataagttgatttgtttgtaggccttaaaggactggaagaggtttatcctgagaaaggtggaaaagaatgagatgcagaacatgccttttggcaccagtcttacttcgtcggaggaaacaatagccacactgtgtagattaaacgaggatgtaagtcagattattatgaaggtctccgacgatgaaatgcatgagaattccaccacggaatttgatgtggacgaagtagaggatgtggtcccggaagaagatggtggcgcccttcagacttccgccgagtacgtttacgaaccggaggagaacaaaacggacattgacccgctttacctgcaatctaacaaacgggccgcattggccagcagtcgactggcggaggaggagaccacactgcttgacaagattagcaataacctagaaatggtgcacgataccgccaacagcgttcaacttgcactcaatgaattttttgtcctgtacaagcagaagctgtacgaggacaagcgacatcacttggcaattgaacagttaatggctgagaaaatagaactgaaaaagaaactattggaaatcgagcaaaaaaagctgtcgctcaaataacgggatatgcacaaaattaagtaatatcttggtagtcttaataacctaatctttaaataatctaagttattcaatattttgattaattttatcacatttcttttagcttggcccaagcccacttaatatacaaatttaatttaatttttttggttttattttataaatatttagataatatggcgttgttcatcatagacttgctttagaatctctttaaattccaggggataagatgcgtcgtccataacagcatcgtaaacatactctaaattctgtgggaaagatggttgaataaaaaaacaaagcaaagtattaggcacatcacttactgatttggattcatctgaggaggaagtcttgccctcttcgggatcactcaacccatttaagtctccacaggctataaaaggaactagacgacggtttacttccgaccctgttttctgtgccagtagccgtatatcatcgcgagcagggttaatcacttgaggaatgtagccctcgggaaggcaaaaatcggagcaaaccacaaaagcttcaatgctcgaaggacgcgaactcggtggcttgtagatgtcgaattttttgaaaaatatctgcatctgggagctcaatagcgatgtggcatttcccttaaaaatcttggccacaaaagttccgccagtttccagcacacaggtggcaatgctgagagcagccacaagtaactggtgctgcatgtactcgtccatttcatggaccccggtgacatcgggggctccatcgcagaccaccagctgggctttttcatttccaccaaagtgaccgatgattgcttcggcggtcgactgctttgtgatatctccctggagctggagtattccacggatcggggccatggcctgcagatcaacggctatgatcttaacagcggacttttcatcgtccgtttcgcaggtatcgtagagtttccgagagagcacctgggaccagctgccaggagcagcacacagatcgactgcccgctgaacacctatatatggaaaagtgtgttatattttgttcctaagtagtttcaatgatctaaccatttagaattccgtaggcttcgtccacgtggagcaacttgaaggcactcctggccctccagccttcgtctttggcttgtcggtaatagatatctcgtttgtcctttgatgttttccccattgtaaataaatatatgaaatatcagggatgctctacaatataactgttctttttgagatacgtgaacagtaaaaagaatggttaaaatatggtgtcatgtgcagaaactagccaaagagtaagagattgtagttgttatttatgttttgtaagttagacgattggccagcctatcgatatatcgacaaagaagggatgcgagcgagtggttcgtcagttccaactggttccttttcagcatagtggctccgcggcgaacggaggctttacgaagaaaacataagcacaaagcaataatgctgggagcccaaggttcggttgggctctatgttcaattgtttcaaaataagaaaataaaatggattcattatataaaaatttatttaaaaattttaatttgaatttttccatcgataggataaattgctggtaataaaggtgtaaaaaatgagtgcataataaaagtaacatattttggttatctcgaaatgtacagaataaagatattcagttgatttggaccaaagacaccggaatattctacttattatttattattattatattttatctattatataatattttataagccgataactaaattggattgcttacttctggtaacactaaaatattatatcaaatagttgtcgatttttgtggcggcgcaatgcggtcacattcttaccgcgagatcttcaaaacacgctttgatgaggttttttcaaaattaagtggtaattatgcaccgaataccattgtatatggggtcggagcctcgccccgaggcctctgaatatatcacgatgtccgaggccatgtgtccacgtaacctgatgtgagtaacaggcccacttgtcctgagatcccgcaggttttgcaatattgcgaaatcctagttgtcctgcgataggatcctgcaatgctcatagatagataattatagaataataataatttacaatttcagagaatgcgagctgttcttgaagattctgcgcaaaacaaccgacaaagtttttctcgatttttctgaagttgctgaaggttgccttaacatttccaagaagtgtatgaatatgaaaagtcctacagtgttgaagatggtatatccacattattga

SEQ ID NO: 10859 - DNA, 1135 bp, DROSOPHILA
atctcttactctttggctagtttctgcacatgacaccatattttaaccattctttttactgttcacgtatctcaaaaagaacagttatattgtagagcatccctgatatttcatatatttatttacaatggggaaaacatcaaaggacaaacgagatatctattaccgacaagccaaagacgaaggctggagggccaggagtgccttcaagttgctccacgtggacgaagcctacggaattctaaatggtgttcagcgggcagtcgatctgtgtgctgctcctggcagctggtcccaggtgctctctcggaaactctacgatacctgcgaaacggacgatgaaaagtccgctgttaagatcatagccgttgatctgcaggccatggccccgatccgtggaatactccagctccagggagatatcacaaagcagtcgaccgccgaagcaatcatcggtcactttggtggaaatgaaaaagcccagctggtggtctgcgatggagcccccgatgtcaccggggtccatgaaatggacgagtacatgcagcaccagttacttgtggctgctctcagcattgccacctgtgtgctggaaactggcggaacttttgtggccaagatttttaagggaaatgccacatcgctattgagctcccagatgcagatatttttcaaaaaattcgacatctacaagccaccgagttcgcgtccttcgagcattgaagcttttgtggtttgctccgatttttgccttcccgagggctacattcctcaagtgattaaccctgctcgcgatgatatacggctactggcacagaaaacagggtcggaagtaaaccgtcgtctagttccttttatagcctgtggagacttaaatgggttgagtgatcccgaagagggcaagacttcctcctcagatgaatccaaatcaaatttagagtatgtttacgatgctgttatggacgacgcatcttatcccctggaatttaaagagattctaaagcaagtctatgatgaacaacgccatattatctaaatatttataaaataaaaccaaaaaaattaaattaaatttgtatattaagtgggcttgggccaagctaaaagaaatgtgataaaattaatcaaaatattg

SEQ ID NO: 10860 - protein, 302 aa, DROSOPHILA
MGKTSKDKRDIYYRQAKDEGWRARSAFKLLHVDEAYGILNGVQRAVDLCAAPGSWSQVLSRKLYDTCETDDEKSAVKIIAVDLQAMAPIRGILQLQGDITKQSTAEAIIGHFGGNEKAQLVVCDGAPDVTGVHEMDEYMQHQLLVAALSIATCVLETGGTFVAKIFKGNATSLLSSQMQIFFKKFDIYKPPSSRPSSIEAFVVCSDFCLPEGYIPQVINPARDDIRLLAQKTGSEVNRRLVPFIACGDLNGLSDPEEGKTSSSDESKSNLEYVYDAVMDDASYPLEFKEILKQVYDEQRHII

SEQ ID NO: 10861 - DNA, 4303 bp, DROSOPHILA
gaaactattcgaaaatttttaaagcggcgcattttactgtaatctttttaatagctaaaacgatgaaatctctcaaatagtcagcacttgtcagcgtcagctgttaattgtcgcatacgcagacaagagagctgaacattcgaacacgcgcaaagatcagatggctacgtgacgtcacggatgtgataatctcatttgccttgcgatttgcgtgaatttcgaaatactcctgttacatcattcgctctccagaacgagttacggatcatactgcattcaccgttatgtcacacagtgacatcaaaaagtgaccccaaattgacgttaaactcatggccaaggtcaagattagccgacttccccgccgcacacgcaatgtacattcgtaaatgtgtgtagatatgtgcgtatctagctggctgctgagccaaaagtttccatgtgacgtcacggcggcaaaactttcgctgtccggaaattggcaaaactcacccacaagcatgaagggcgattcctttgctttcctggataatttgttggcctgagcggcatcctcctcgctgtcgaaaagggacttggaactcattttcacgaatattatattatgtacgcgggcggttcggatcggtttaatcgcttggcaacgttcgcgaaactttctgcaatggacagcagttcgagcaatgtgtgaccagagcaaaaacttatcgctcacagaaaggtttcccagagtaagctatatttaaatagtctataaagttctaaagttctgctaatctgtaaaaatattaagaccacttaactactcaggttattgctaaacattagattgcatttattttgattatacacaattaaaacttatcaagggcatcgatagtttggctgctgttctggccgcacttcaagataaaaataccgaaagccgctatcagctgtttgcaagctttgcgcgcttttccgccaggtgacgcttttgccgtttctgtcatgacataagaaattggtatttttttaaagggaaaggggcggactgcagaaatcgacgttgctttgccttggccgctaactctgttttaaattcgagtgctttgacataaattgaaagtagaacaaccgtcgaacagaatttcgcggaccagagtcgcagcaatgacgggaataatttcgatcgtaacgagacggctgccccaaactttgggaatgcgagccctgcggagtaatgaggtaaaaattgtggacgggctggggattgccgggtggagggggcccgtcaggtgtgtgatatatgctccggcgatatatatgtacatatcaatttttatcccatattcactgcccgcctggcgctcgccgattatgtaattgtatgggtgtgtgtgcgtgcgccgctgaaaaatgggaaaaacttttgtttgggacgcccgctgcacgtgacccgtcagccgacgttgcctcctggttgtgcaatcactaatatttgcttctttccgccaggtaaagcgctgcatccgccaatattctcggttagttgcctgcgccgcccagcagcagcaactgcttcgccaggatggctcgaatcgctgccaggaggccaccaggtaagtccttcactatccacaagagtcccttcatccagagttgtttattcctaggcttctcacctggcagggaatccacaccacgtcgagcttgtggtcggagcagaccgtcaatgtgccaccctttgcggactccattgccgagggtgacatcaagtaagaccacggcacagggctggtttcaagcaacaggttcatgctcatctattaacgatcaattcctgcaacaggtttacttgcaaggtgggtgactcattcgccgctgacgaggctgtcatggaaatcgagaccgacaagacgacggtggctgtgccagctcccttctccggaactctaaccgacattctggtgaaggatggcgacaccgtcaagcccggccaggctctgttcaagatcaagcccggtgcagcgcccgccaaggcagctgctccagcggctgctcctgcgcctgctgccccaaaagcagcaccagctccagctgctgcacccaagccggcacctccaccacctgcggccggcgcaccaaagccaccaccaccgccaccaccaaaggcagcccctcgaccaccgccacctgctccagtggctgcactcaaaccggccgtcgcccaggtgaaggtgccaccagcggacggatcgcggcagatcctaggcactaggtccgagcagcgtgtcaagatgaaccgcatgcgtctaaagattgccgcccgcttgaaggatgcccagaacacatgtgccatgctcaccactttcaacgaggttgatatgaggtgagtgcttgaacgaactgagtgacgaaactacagcatgaaattgagctataaaacgcataatcgtttcttttttagctatgccatggacttccgaaagcagaatctggatgcgttcactaagaagtatggtattaagtttggattcatgtcgatcttcgccaaggctagtgcctatgcgctgcaggatcagcccgtagtgaacgccgtcatcgatggcacggtaaacaagcctccgccccgccctccgcttatcatattcttatcgcccgtgacgtagtttggattgccacgcttttttaaatggccttatcaggcgaacatttagcttatatggtcgcatttgtttatgcaatttcccgtggcgatatgatgaatgtggaattttctgtgttgccaagcgctcataattgccttcattttgcaggacatcgtgtatcgcgactacgttgacatctctgtggccgtggctacgccccgtggattggtggtacccgtcatccgcaacgtggagggcatgaactatgcggacatcgagatcgcactggccggtctggccgataaggccaggcgtgatgccatcaccgtggaggacatggacggtggcaccttcaccatcagcaatggcggagtgttcggatccctgatgggcacgcccatcatcaatccgccacagagtgccattctcggcatgcacggcatctttgagcggccaattgctgtcaagggagaggtgaggactcctcaacattcgcttaacaacctgctgtattttaatcattgcattgtccaaccaggtcaagatacgtcctatgatgtacatcgccctgacctacgatcaccgaatcattgatggacgtgaggcggtcctgttcctgcgaaaaataaaggctgccgtagagaacccagcaataattgttgccggattgtaatgtgaattgtcttaagacacgtccacggccttaatttgatattagccttcttaatttgaaactgtctttggttatttattatttcattttgcgagcgtcacaaaaattagaaaatcaaccgaattcgaactactcttagcaacggatgtagtataataaatcaaacgtggatcttttcttaaacataacctgtgcactgaatgttattgttaacctaagacgctgcgatggaatgtcgtaataaatcgatgatgaatattgaccaacctcaatgcattcgattgtcaaatgaagtggttttttttttggactaacgacctattaatggcagcttgtagcgaaactaaaaattgatcatattgaatgtcttggtaatcttatctgaagcaatatttatatatatcttaatacaaactataaacattcttatcaaataatttgtcatgtgagtatggctttaattgagttttaagtggattgcgtctagcgaaggtgattattaattatctctgatggctttttgcacgggaatagttttgtatttttcgattattattattaatttggtcccatccggtctgttccgactaatatactgtactaaagaaaaacactttaaacccgggagatgcaatatgcatagaaacggaagagatcacatggctatatcgactcggctgttgattctaatcacgaatttatatggtggtaaatgtatccattgctgcgttgcaaacttatcactgaaagcaattcactctctggcagggattcatttaaattggctctctcagataattttaaagactataggaagatattgaaataagagatttaaagggagataagaggggaaataagagttttaataatgtctgacgaatatatacatatattaattttttcttaccatttgaagaagtggtgaccattattacagatttcgtaaatatcccttggaagattcacactttcatttggaatcccttttccaaatatc

SEQ ID NO: 10862 - DNA, 1559 bp, DROSOPHILA
aaattggtatttttttaaagggaaaggggcggactgcagaaatcgacgttgctttgccttggccgctaactctgttttaaattcgagtgctttgacataaattgaaagtagaacaaccgtcgaacagaatttcgcggaccagagtcgcagcaatgacgggaataatttcgatcgtaacgagacggctgccccaaactttgggaatgcgagccctgcggagtaatgaggtaaagcgctgcatccgccaatattctcggttagttgcctgcgccgcccagcagcagcaactgcttcgccaggatggctcgaatcgctgccaggaggccaccaggcttctcacctggcagggaatccacaccacgtcgagcttgtggtcggagcagaccgtcaatgtgccaccctttgcggactccattgccgagggtgacatcaagtttacttgcaaggtgggtgactcattcgccgctgacgaggctgtcatggaaatcgagaccgacaagacgacggtggctgtgccagctcccttctccggaactctaaccgacattctggtgaaggatggcgacaccgtcaagcccggccaggctctgttcaagatcaagcccggtgcagcgcccgccaaggcagctgctccagcggctgctcctgcgcctgctgccccaaaagcagcaccagctccagctgctgcacccaagccggcacctccaccacctgcggccggcgcaccaaagccaccaccaccgccaccaccaaaggcagcccctcgaccaccgccacctgctccagtggctgcactcaaaccggccgtcgcccaggtgaaggtgccaccagcggacggatcgcggcagatcctaggcactaggtccgagcagcgtgtcaagatgaaccgcatgcgtctaaagattgccgcccgcttgaaggatgcccagaacacatgtgccatgctcaccactttcaacgaggttgatatgagctatgccatggacttccgaaagcagaatctggatgcgttcactaagaagtatggtattaagtttggattcatgtcgatcttcgccaaggctagtgcctatgcgctgcaggatcagcccgtagtgaacgccgtcatcgatggcacggacatcgtgtatcgcgactacgttgacatctctgtggccgtggctacgccccgtggattggtggtacccgtcatccgcaacgtggagggcatgaactatgcggacatcgagatcgcactggccggtctggccgataaggccaggcgtgatgccatcaccgtggaggacatggacggtggcaccttcaccatcagcaatggcggagtgttcggatccctgatgggcacgcccatcatcaatccgccacagagtgccattctcggcatgcacggcatctttgagcggccaattgctgtcaagggagaggtcaagatacgtcctatgatgtacatcgccctgacctacgatcaccgaatcattgatggacgtgaggcggtcctgttcctgcgaaaaataaaggctgccgtagagaacccagcaataattgttgccggattgtaa

SEQ ID NO: 10863 - protein, 468 aa, DROSOPHILA
MTGIISIVTRRLPQTLGMRALRSNEVKRCIRQYSRLVACAAQQQQLLRQDGSNRCQEATRLLTWQGIHTTSSLWSEQTVNVPPFADSIAEGDIKFTCKVGDSFAADEAVMEIETDKTTVAVPAPFSGTLTDILVKDGDTVKPGQALFKIKPGAAPAKAAAPAAAPAPAAPKAAPAPAAAPKPAPPPPAAGAPKPPPPPPPKAAPRPPPPAPVAALKPAVAQVKVPPADGSRQILGTRSEQRVKMNRMRLKIAARLKDAQNTCAMLTTFNEVDMSYAMDFRKQNLDAFTKKYGIKFGFMSIFAKASAYALQDQPVVNAVIDGTDIVYRDYVDISVAVATPRGLVVPVIRNVEGMNYADIEIALAGLADKARRDAITVEDMDGGTFTISNGGVFGSLMGTPIINPPQSAILGMHGIFERPIAVKGEVKIRPMMYIALTYDHRIIDGREAVLFLRKIKAAVENPAIIVAGL

SEQ ID NO: 10864 - DNA, 7793 bp, DROSOPHILA
ggccctgtggcagatgcactcacttcaattcattttgcgttcaaactcggtgcactggggcgcattttaaacgatttcccgttgcgtttctctggcgatttagccgaaaaccgagtaaatattgtttacggaccgccgaggtacggacgagttgtgcagtgtgaccgttggcgacaatatcgtcgtgttaaacgcgataccgaattaaaatactagaaaagaagtagtgacttggatatcatgtcgattttttatagccttgttgcgtacattttcaaaaccaaaaacgtttgctggcattttgatgccatcggattttagccgcataccaaattaattatatgctcattagtttttatatgggtaataagccacaatttttaaggatcaaaataatttattttaatacattcgaatacgatacattttaaatcctttgaactattattagagtactgtttaaagctgaatgttaggtaattgaataaatgaagaatacgctcaaaaattagaaactactaaaactattattagagtactgtttaaagctgaatgttaggtaattacagaattgaagaaaatgctcaaaaatgttattatttttttatatttaaacgctatttgctcatatacttaaatcatatatatattcaaacgaaggagtagtactttgtaacggtcaaacaatcgatagttccactttgataccgaactacatgccccaccaccaacgtgatggtatttttgttagttttcggtatctttgaaatgctaaacttcagcacaacgggcaaaataattctgtagagcgagttaaatacatatcgtacaaatagcggtcttaataaaatagaccataccaattttaatattaaacaaattccgttaaataagcaacatatatagtgtaatggtatattttccaaaaacttccaaaaataaaaagtggtatttgtttcaagtcgggctcaacatagtatgattatccgattacgctgcggtcacactagtaccggcccatagagacggaagaaaaattttatttaaccgatttcaggtaattgccatttgcattaactgttttttaaccatgcacaactagggctaaaatgccgttggaaaagagatcgccacgtgtgctcactcgcatgtgggccagacacgcgaaaagtgcgtccaaagctgcggggtaaaaatcgatagagaaaagcagatgaaaaacggatgggaaagtggtggggggagctcctttctcaacatgacgtgactaagaccactttgcttttacagctataaacaggctattactcggaaagcacatataaattcccgaataaatccgcattcgaagtcccataaatattgacagtcagtcggataggacagctaatgtaagtagagcacttggtggggatgggggcaggtccaaaatgcaaatgcaaatgccaatggtaaactagtaaaccgcagacagattgtcaaacaaattcgattttcgtaattgcagcgcaccgcgacaatggccaacaacaactacgccgggtttaactacggcggcacccagtacaatacgggccaagtctcgtacccggcggtaaccaatgccacctacgcgaatgcggccgcctatcagaatgccgctgtggccgccggacagggtggttatggcggagcagcaggagcgggcgctggcgccacctctggccctggggcggggggttatggtggctacggcgactatcgaagtgccatgcaatacgacgccaccaagacattctatcagcagtcgccggccagctacaacgcctccggttcgacagcctcggtcagcaagacgcactactcggctccgccagtcaagaatcaggtcaagggcaagatggacaagtcgaacggtggtcccaagccccctagttcggctcctccggcgggcaacaattacagtggctatgatacagcactctacaatgcggcaagcatgtatgtggcccaacagcatcagggcaatccaaaccaaaaaccaaatggcggcgccaataactggtatcagcgtaagatgggagccaccataccaggagcaacggccataaggggtatgcgtccgaaggcacctccacgtccccagcagctgcactactgcgaagtgtgcaaaatctcgtgcgccgggccgcagacttatcgcgagcatctggagggtcagaagcataagaaacgcgaggcttcgctgaagatgtccgctagtgccaacagtgctacacaaaatcgtggtaacaactaccactgcgagctgtgcgatgtaacatgcactggtacggacgcatatgccgcccatgtacgcggagccaagcatcagaaggtggtcaagttgcaccagaaactgggcaaacccattccctcggaggagcccaaaaagatgggcaagatcaactttgtgcccgctgctgctggcggagctggtgttgccaagaccgaaggtggcgcgaacgagagcgatgcagctggagatctcgatgataatctggacgattcgctgggcgaaaacacggacaacattaagccagtaggcggcgagtatattgaagaggtcaaggacgaagagggcaagattttgagctttaattgcaagctgtgcgattgtaagttcaacgacccgaatgccaaagagatgcatatgaagggccgtcgccatcgcttgcagtacaagcgaaaggtgcagccagatctagttgtcgacttcaagcccactcctcgccagcgccgcctggctgaggcccgtgccaaccgggccatgatgtcctcgcatcgcggcggtgatgatcacgacggcggctactgggaggagcagcgcaaccgacaatacaacgaagagtatgactacaacaactggatgtcgcgcagtttcggaggtgagtttctatatacgttatactccttggggtgaaacagtgcactcgtttaaaccaacccctgtgggttaactttattggcaaggaaatttataaaaagtttatagagggcaactaaatcaataaagcacatttcattacataattatgttgccacaatttaaaagctataagacaaataacatttgtatatacaaatagcatgaaatttgttaaaagttggttgtctgtaacgtaaagaatttaataatcaatataaactgcaacatattttaaatattcaagcggaataacattaaattggaacacggctaattattgcatgcacaaatatatttatatttcaaattaccattgcaggtgcccagcgctttgggcgcatgggcaatggaccgccgccgcactttggcatgatgcccggcggaaatgttcgtcgtccggaaagcaccgatgatcgccacgccattgcccgtcacgccgagatctatccgaaggaggaggagctgcagaccatccagcgcatcgtctcgcacaccgagagggccctaaaattggtctccgatgccctggccgagcagcccagcgatgccggagcggccaataagaaggacaaggctgaaaagccgtcggagaaagacggacgcgacaatcagatcttctcgttccaaaaagacgccgacaatggtggcaatgtcgtgcgcatcctgaagggagtgatgcgagtgggctacctggccaaggggctgctgctccacggcgacaacgccgtcgagctggtcgtcctttgcgcggagaagccgacttcgggtcttttgcagcgtgtggccaatgtgctgcccgacaaactcaaggaggtggcaggtaagtgaggagatgtggcagctgccatcgtagaaattgcataccactattcttgaatgacattttggttgtcctaatgagaggaacagaatagaactttttccagagaaatggcttgagtgataaatgcggctgaaaagcatcactgaatcatgatcaaaacaaaaagtacattaacacgttcttagcttggccaatttcacactgacctgcgcaggtgaatttggccaaattggaagcggctcaaactaatcaactaaaactaatgaacgaaaataaatcgattttcggagcgctaaatatgcaagatgaacgaacgcaactcacgatacgttcgcattcgctattcattacgtacgttcacgttcgacgggcaatttgtgtggaaaaagtcagcaaaataaatcaaatttaactatttaaaattattgtacatagaaactaggacaactagagttgagccctgttgttgcggtggatatagattgccacgcccgccaaaccgcgcccaacgccccagccaacatagcaactaattgcgaataaaaacgtatttgccgttttcagcttctctctctgcaggataagtttcgagcctcgagccttgagccttagcctagaagctctgtgagcctagagtcttgagtgtgtcgttcagttagccatctgtagcggtagctcagccctcccaggttgctcctcttcccgcacgactgccgctgcactgctccgctccactccaatcaaatcaccaacagcggatcgtcacggtaacaagcgcggactcggtgccacaagtccagcctcctgcagtctgatgtggtgtggtgtccttgatgaaacagtcaaaaccaaactctttaaccaactgaaattcgaaccaaaggaatatatttatacaaagtttgcgcgccctcgtttcgattccggatgaaactttgtgtaaataaagtcctttgatggcctggccaagaagttgaacaacacaacaacacgccaagaagcaatgcgattgatccacacacgagacgcaattgccatatgcaaatgcgagtgcttgggccaaaattgcagcgccgatgtgcgtgctgcctgcctcatctttcactcgataccaagcaaatatatctatactcagtaatctcgtatacatatatatatgtccaagcggccgaattgtgtgtatcaagcttgattgtccaatatagaaaatctatatacatatatttaaaaatgcaaacaaaaattgcgaccgaaatttgcgttgcgcaccgcgaatggagagtactgaagacgagagacgtctggtcgatcaacgtttcccgcagccataaatttcgttcaatattttaatgcaaactaaccaacaaaagaaatcaagttatttcaagtcgaaattcagtaaaatacagtgaagtgcgcgctctaagtggaattgcaacgggtggatgacgccgagtccgagtctcgagcttgcaattccgtttacgagtccccaaacggagataccgatcccagcacgcaagtcgaacgaatctcctgtttgctgggagccgagcgaatacgaggatcgtgggaagaaacaaacattattcgtgcttttcataccgtgcatcaagtccccatttgaacaatatcaatatatatctatattcaattgttgctaatcactatattacgatgtatacatacgtgtattttgcgggcccacactggaattttgtttcacccacaatgtttgtctctttttccaagtcgaatctagtatttcgatgtattgagcttcctgcgaaaacgtctttgtcacattttctccattgctctcttgatttcaggcgacactcaggtcaattaccgcgtggaggtcaacgccgaggaagccgccctaattgtgctggatgagtctgtctccgttaagattaccctcacctcgcctttgctgcgcgatgccaatcccggggaagctgccaccactgatgaaggtgagggcgattccgaattcctgcctcgtgagccctgcctacgtgtaagtttcgccaaaaagcaactagaaaaatcacaaactaattatgaatgaatatgaatttattaggctttggctgatttgcgtcacgccaaatggttccaggctcgagcgacaggcctccagtcgtgcgtcatggtcatacgcatcctcagggatctgtgccagcgcgtctcttcctggcaatcgctgccccaatggtctttggagctcctcgtagagaaggtcatctcgtcggctggctttcccatttcgcccggtgactgcatgcgtcgcatcatggaggccttatcgtcaggctttctaatcaacggaccgggcctgctggatccttgcgagaaggaccccacagacgctctactcgagttgaccaaacaggagcgcgaggatctcactgtgtccgcacagctcttcctgcgctacattgcctttcgacagatttacaaagtgcttggcatggagccattgccggcgatgaagtttccaatgcgtccatggcgtgtcaaccgcaagcgacgtaggtcatcgggcaaggcaggtggtgcacccggcacggagaccgagtccaatgacatcgatgagaccggctccgatgagaaggtggccaagaaggagggtgtcggaggcactcctgccagcacctaagcggcgagaataggttatatacacgtagtcggctactaatattacaatttctctcaagataaaagcgcgaccaggcgtcacttaactataaccaactctaatctatacacgagtattcaaaccgattggggcacaaggagctaagcatgtccaacatgttgcccaatcggcgattagtgaatcccaaattaccccaactttaactaacaatatttagtggatcataaaacttgtatttttctagcattagtgcaaggcaaggcaatgtattcagtttgaatgtgaacattatggccctcacactcatatacacaaatactagaacgaagcggattttaataaaacgtattgaacaattataattaaattatttttttaataaagataagcttaattcattcacgtaactggaaatcttaattggagataatctagcactgataatattcttcgctttataaataagttctaattgaaattaattcaaatatatatttatatatatgatatataatttttaaggaattacaagaagtcgttccacttagagcaaattttcttagtaactgttggcatattttcagcggaacgtttagaggatcgtggccctgtgttcctggttttcttaaagttcatagagatttcgtcggaaagttcatcggttttcgtaggttttgctgcaggcttttgagtagtttcaatggtattatccacatagtttgcccatttatttgttttcttctgaggtgtggtgttttcctctttttcttggcagtctttctcctcttcgagctgttgctttgccgtgaggaataagcccgtgttcagacattcctcctgcattccgcgctctaagttgagatgctgcaccttaacccggcattccgctgccgatcctcgaaagaattccttgagcaaactttgcttttggcggcaaattttacactgccatgtgcttgcctttttcacgaagtccaccttgtttaaattaggtatatatatataagtagttattgagttctaagatatatttcagtttgtttgcactcacctggtacattttgcattgaatgcattgtaccacgcgaatttgctgggacattattcaaatttgcgaaaaaccaaataaagagaccagggatggaaaccaacagcactgcaacaagtggagtgaaaaaaatgtggttgcacaaatgttaaagcgtgatgactacagtttaacaagtagtaaaacatttaccaaaatttgtaattaactaattttggtacctatggttaatgatttagccgggtgctgattccggttcataagtgaaccaaatcgttccccatccctggtccaaatataaacaaacttg

SEQ ID NO: 10865 - DNA, 3183 bp, DROSOPHILA
gtcacactagtaccggcccatagagacggaagaaaaattttatttaaccgatttcagctataaacaggctattactcggaaagcacatataaattcccgaataaatccgcattcgaagtcccataaatattgacagtcagtcggataggacagctaatcgcaccgcgacaatggccaacaacaactacgccgggtttaactacggcggcacccagtacaatacgggccaagtctcgtacccggcggtaaccaatgccacctacgcgaatgcggccgcctatcagaatgccgctgtggccgccggacagggtggttatggcggagcagcaggagcgggcgctggcgccacctctggccctggggcggggggttatggtggctacggcgactatcgaagtgccatgcaatacgacgccaccaagacattctatcagcagtcgccggccagctacaacgcctccggttcgacagcctcggtcagcaagacgcactactcggctccgccagtcaagaatcaggtcaagggcaagatggacaagtcgaacggtggtcccaagccccctagttcggctcctccggcgggcaacaattacagtggctatgatacagcactctacaatgcggcaagcatgtatgtggcccaacagcatcagggcaatccaaaccaaaaaccaaatggcggcgccaataactggtatcagcgtaagatgggagccaccataccaggagcaacggccataaggggtatgcgtccgaaggcacctccacgtccccagcagctgcactactgcgaagtgtgcaaaatctcgtgcgccgggccgcagacttatcgcgagcatctggagggtcagaagcataagaaacgcgaggcttcgctgaagatgtccgctagtgccaacagtgctacacaaaatcgtggtaacaactaccactgcgagctgtgcgatgtaacatgcactggtacggacgcatatgccgcccatgtacgcggagccaagcatcagaaggtggtcaagttgcaccagaaactgggcaaacccattccctcggaggagcccaaaaagatgggcaagatcaactttgtgcccgctgctgctggcggagctggtgttgccaagaccgaaggtggcgcgaacgagagcgatgcagctggagatctcgatgataatctggacgattcgctgggcgaaaacacggacaacattaagccagtaggcggcgagtatattgaagaggtcaaggacgaagagggcaagattttgagctttaattgcaagctgtgcgattgtaagttcaacgacccgaatgccaaagagatgcatatgaagggccgtcgccatcgcttgcagtacaagcgaaaggtgcagccagatctagttgtcgacttcaagcccactcctcgccagcgccgcctggctgaggcccgtgccaaccgggccatgatgtcctcgcatcgcggcggtgatgatcacgacggcggctactgggaggagcagcgcaaccgacaatacaacgaagagtatgactacaacaactggatgtcgcgcagtttcggaggtgcccagcgctttgggcgcatgggcaatggaccgccgccgcactttggcatgatgcccggcggaaatgttcgtcgtccggaaagcaccgatgatcgccacgccattgcccgtcacgccgagatctatccgaaggaggaggagctgcagaccatccagcgcatcgtctcgcacaccgagagggccctaaaattggtctccgatgccctggccgagcagcccagcgatgccggagcggccaataagaaggacaaggctgaaaagccgtcggagaaagacggacgcgacaatcagatcttctcgttccaaaaagacgccgacaatggtggcaatgtcgtgcgcatcctgaagggagtgatgcgagtgggctacctggccaaggggctgctgctccacggcgacaacgccgtcgagctggtcgtcctttgcgcggagaagccgacttcgggtcttttgcagcgtgtggccaatgtgctgcccgacaaactcaaggaggtggcaggcgacactcaggtcaattaccgcgtggaggtcaacgccgaggaagccgccctaattgtgctggatgagtctgtctccgttaagattaccctcacctcgcctttgctgcgcgatgccaatcccggggaagctgccaccactgatgaaggtgagggcgattccgaattcctgcctcgtgagccctgcctacgtgctttggctgatttgcgtcacgccaaatggttccaggctcgagcgacaggcctccagtcgtgcgtcatggtcatacgcatcctcagggatctgtgccagcgcgtctcttcctggcaatcgctgccccaatggtctttggagctcctcgtagagaaggtcatctcgtcggctggctttcccatttcgcccggtgactgcatgcgtcgcatcatggaggccttatcgtcaggctttctaatcaacggaccgggcctgctggatccttgcgagaaggaccccacagacgctctactcgagttgaccaaacaggagcgcgaggatctcactgtgtccgcacagctcttcctgcgctacattgcctttcgacagatttacaaagtgcttggcatggagccattgccggcgatgaagtttccaatgcgtccatggcgtgtcaaccgcaagcgacgtaggtcatcgggcaaggcaggtggtgcacccggcacggagaccgagtccaatgacatcgatgagaccggctccgatgagaaggtggccaagaaggagggtgtcggaggcactcctgccagcacctaagcggcgagaataggttatatacacgtagtcggctactaatattacaatttctctcaagataaaagcgcgaccaggcgtcacttaactataaccaactctaatctatacacgagtattcaaaccgattggggcacaaggagctaagcatgtccaacatgttgcccaatcggcgattagtgaatcccaaattaccccaactttaactaacaatatttagtggatcataaaacttgtatttttctagcattagtgcaaggcaaggcaatgtattcagtttgaatgtgaacattatggccctcacactcatatacacaaatactagaacgaagcggattttaataaaacgtattgaacaatt

SEQ ID NO: 10866 - protein, 884 aa, DROSOPHILA
MANNNYAGFNYGGTQYNTGQVSYPAVTNATYANAAAYQNAAVAAGQGGYGGAAGAGAGATSGPGAGGYGGYGDYRSAMQYDATKTFYQQSPASYNASGSTASVSKTHYSAPPVKNQVKGKMDKSNGGPKPPSSAPPAGNNYSGYDTALYNAASMYVAQQHQGNPNQKPNGGANNWYQRKMGATIPGATAIRGMRPKAPPRPQQLHYCEVCKISCAGPQTYREHLEGQKHKKREASLKMSASANSATQNRGNNYHCELCDVTCTGTDAYAAHVRGAKHQKVVKLHQKLGKPIPSEEPKKMGKINFVPAAAGGAGVAKTEGGANESDAAGDLDDNLDDSLGENTDNIKPVGGEYIEEVKDEEGKILSFNCKLCDCKFNDPNAKEMHMKGRRHRLQYKRKVQPDLVVDFKPTPRQRRLAEARANRAMMSSHRGGDDHDGGYWEEQRNRQYNEEYDYNNWMSRSFGGAQRFGRMGNGPPPHFGMMPGGNVRRPESTDDRHAIARHAEIYPKEEELQTIQRIVSHTERALKLVSDALAEQPSDAGAANKKDKAEKPSEKDGRDNQIFSFQKDADNGGNVVRILKGVMRVGYLAKGLLLHGDNAVELVVLCAEKPTSGLLQRVANVLPDKLKEVAGDTQVNYRVEVNAEEAALIVLDESVSVKITLTSPLLRDANPGEAATTDEGEGDSEFLPREPCLRALADLRHAKWFQARATGLQSCVMVIRILRDLCQRVSSWQSLPQWSLELLVEKVISSAGFPISPGDCMRRIMEALSSGFLINGPGLLDPCEKDPTDALLELTKQEREDLTVSAQLFLRYIAFRQIYKVLGMEPLPAMKFPMRPWRVNRKRRRSSGKAGGAPGTETESNDIDETGSDEKVAKKEGVGGTPAST

SEQ ID NO: 10867 - DNA, 5993 bp, DROSOPHILA
ctgaaaatttccgaccttattgcacagcttaagtgcaaggttaatccgggcagagccagatcccacaagaccaacaaatcaccgtttttatagtgcgcggattttagttttttcaaagcaaaacgaaagttatcaccgatagaacacacacacacacttttatacgtgtacactactgcgtatgcatatataatatatatatatatatatatagatatatagatattgaagtattttgttagccctggaaatcgaaacccaaacgttgcctagaatggatcaaccatccatgatacaattgtataactaactcaagtctcacagcgcgttattttataccgattaaattgtaaaccgtagaccttaggcgtacgctcatgttatatcagtcagagttctatatcaacaattgtataaagatgattgaattgatgacagtgactttttttaaatcacgcatatttttataaaaataagagtaataacaatgcatgcaacacatgtattcacatgaatatatggggagattgcatagcatgggcttgtacagtgtacataaaataagccgtcgccgattatataggacccaagaatatcatattttatatagaagcaagcgcaagcaaataacccaggcagcatgccctcaactttcagtcgtaaacggagcgattggaagtcgctcctagtctgtaagatccacgattaactagccgctctctccttcggttaacttcgttccggtgtcacacatctctgcaaggagggcattattggtgtaaggcaaacttttgaagaaggcaaccttaatgataaaatatgtatttagatatccctaaggtaccagctaatgtcaagatactttaataaaaccgaattcaaaattgcaagtattgaaatatcgccgactaacttttatatgtgttggttttctttgggtttatatgtgctctacagtcaaaactcattttcatttctgttttttttttttttagattggtttatattctggatattaatacacttttaagacatatagactaaattcttactgctatgtttacactgcgtttggtggctatatatttatgctaggtttcgaataaacatttcaaacacgcacaccaaatttccaactcttatgaatattttgaaatccatgcgctgttacattttgatgtgggtgcgagtgtataaatgttaaaaaatagttgccataaccgatagaaatataaaatggtaaggagataacacaaaaaagtagaaaaagaatcatgtacaatacaaattaggggcgagtgcttatatacagagtgtttgtgtctagtttttaactaaaactaacgtatttttccgtttgcatttgcatagttttgaatatgttacgcttagaactagatttaaagttgaggcgctgcttctctttgaatacaaagaaatcctgctttctaaaggattttcaactttccgcttatctctttagtttgtctaaaaaggcctcaataacaacttaatataataaaatactaacatttacagcgtttcgttttgaaaaagagagataataaataaactaagagtttttcaaaaatatcaaaacgggattgggcataaggggttggtggtaaagcaacgagggtcagatctctaaagcctcgaattgagtaaactagtggatccggtttcatttcttgaaaacttcgtgataccgggaattgaagtgttctcatattctaaataaataacaagtaaacggtttaccgtttccgattccagtacctttccggggaatgaaattggtaacatggccctcggctacgatttcgcagcttctctgtttacaagttggcttgaattgcatttaaaataaatactacactactagcaggggctaagattacgtttacactgctgctaactgtcctggaggcggactctcctcagatctttctatttgggtctgctgcttattttcctcacttggtcgccgcttctttagtgggggaatttccgtttcaatagcgggcgttggctgctgttctataatgcaggcggttcttttctggccgggactgctgttgggcagcggttcgttggatccattcactatatcggtgactatgtgagcctccagtgaaggcggtagcaatggtgacaatggaacggcgttcagatcacatgcatcctcatcatcatccttataattgtgccccacattgccaaagagatcactgtgtctattgtgtgatctttcctcttcttcgtcatcatcatcgctgtaatcgttgtcccagaatacctgggctcctggaaacacatacgaatagttgttggtgtgcgaatagaatgttccaggctgcagacgctcggctgctgtctgtcgctttcccctctgttgtggaatgggcgtcaggctgggcgccactgtcttggtctcctgaacaagattgctgggtcgcacgtagctaggcgtggcttcgttgtcgcactgctcgatgccgctatccttggaggaatcaatggaaagatggcgatagctctccaccgttgtctgagggccttccaggcccagacgatcgcaacttagggctgtggtctcgttcagctcaaccagtatgtctgttttaatacgttcgatggctgccgcttcggcggcagtggaacgctttccacagctaaaagtagatgactcaaatccactatccgagcaggtgccagctgatcctagtatgtagtccgccgaactatttgatttaatagactgcgtatccgtgtccagttgcgactgtcgctcgctctctgaactgcagtggcggtggtgaagtagatgatgatggaggtggtgattagagtgctccggaggcattagctccttgctttcggtaagcactgactcatcgcagcacagctgccgccagcaatcatcgttgtccgacaaccggtggcaaatctggttgatgatcacatcggagtcgcccagcagctccacatcgaacttaaggtgatgcagctgctcgcgattgataagaatctgcggcaccgtggccggtatgctgctgggaatgtgggccacaggtcggaccttcagcgaggagccgatcacgatcagtagatcgcacacgtccttgtcggtggccatgaccgtgtggtactcatccggcagtcctgttggcaatatgaaaagcaaacacaatatgatatatggtaaatagcgttactttgtattttcaatagtttatctcttaaataaacacttcttttgatcgtcgaatttgaaattcttgcatttattttaccaaggctattgataatatataataaatctgtataaaaatggcacctaccctcgccgaaaaagacgatatccggcttcatgatgccgttctcgaccagttggcgcagctcctcctcagtaacggccaccgaggcatccacgctctgctccttattgggctggcactgcgggcacaccggaattcgctgggcaaatatgtccgcccgcagggcgtcagcgttgcacttgaaacgacacttggtgcacgaggccgttgaaaaggagccgtgacactcgattactcgctgaatgcctgccacccgctcgagggtgtcgatgttctgtgtgtagttgcgcaacagtttgcccttggtctccagcattttgatgaaacgatggcagggtgagggctgaaactcgccgggatatatctcgcgggcaaacttgtagaacggtcgtggatccctcttgaagtagttgatatcaaacatggcctgcggatcgggcagatcgggaaaatcatgggccaatcgcgcatatatgccattggtggaccggaagtccggaatgccgcaggagacggatactccggctcccgttagcacaatgatcttctgtgatttcttgaccaaactgatgacatcgtcgaaggtgttcactgaggccagcttgttgcgccgcttcggctcgttcaacaggtgggccaaatagtcccacagcacggagtcgtcggtgtcgcccgccaggccggtggcgaaatgcggcataatgctggcaataacctggcgcggcacacgacctgtgtaaaattctcgttgcaaccagcgcagcttccagtcgggttccacggatgaggagcaatttgagctggagtcctcatcctcgttgctcgttccggtgattccctcctcgtcgtcctcctcctcctcctcatcgtcctcttcctcctcctcctcgtcatcttcatcctcgcccattgactttgtgggatttttggttttatgctccaaattggcgccaatctcttgttcttccctggcagccaatgtttttgttttgatttcaccatttgctttgccagcaagttcgcttgttgctggttctgtggttgttgctgttgcttctgcctctgcctctgcctctgttgacgttgaggccagaatttccgcgccaaaatcaaacttagttggcggatagaattgcgtagtgtctggcacctggttgcccagatctttagacctaatgtggcccaggcgaatttcctcgtaattttccatcattttttccgaacccaagcgcgcgcacacgcgcacacacacagactcacggagagaaaactctcgtagttggtgctgttgctggctcttcttcttcttgcgcgagtgtttcctcggtctctccgctttgcgctctcgcctcgtccgttttctccgctctttcgttggtacacacaaaaatttttacgtcgtcagcttcgcacccatttggcttgattgaaaaaattctccagcgatcgtttggccgcgattttttcaaccaacccgactttatttcacgtatatgcacgaaacttaaattttaaaaaaatttcgacaccatttggttgcgattttttcgtaattttcgagcgtagtttctggaaaattttccgatgaaaaaagcaagatggcacacgtagctgcgcctgtgtgtgtatgtgggctggcagacgtgattcgggtgggaccctgacacgtcgtgtggaaagtgctaacgcgtttctgcatggaaagtgccgccagcatgactcatcacggtatgtttttagtattttttgggatttttgagggtgattacgtgttgctacagtggccactgccttatgtcatatctaatttaatccatttctttaaaaactgtttaaaatatatcaataatttgtcaaaaagttagtaaaattaattttaaattatgcttcgaactttaattttagcactcttttacttatcaaatttactcgatatttaaacaattaagtaaaaataatttttttgtccaatatttacacatttcatagtagtattataaattgatgtattgataatatgcagttcatatgtccaaaaacttccatcaagctgttaaatacaaaaatgtgtaaacagatttccagaacgttccagcaagtgtctactgttccccaaaaaagctgcgattttaagtatttatttggtactttccccaaaattataggtttttggtagaacttgggcatacttgttagccaatatgacttgaaaatattgtcataaatacattgttaaataatttaataagtcgtacacttacaatgtacaaaatattttagtttgtagggggactggggatgcaataggaaatggacaacctaaatttatacgacgttcttaaagtggctccggatgcaactgatgaggaaataaaaaaggtatgtaacagttccaattcgatatgttggtaaatagtttgtattcaccttttcaccaatagaactaccgaaaattggcaaaagagttccatccagacaagaatcccgatgcgggcgacaagtttaaagaaatatccttcgcctacgaagtgctgtccgatcccgagaagcggcgcatctacgaccgatatggattgaagggcctgcaagagggcgccgagggattctctgatgcctccgaattcttcgcccagtggttccccttcgatcgag

SEQ ID NO: 10868 - DNA, 3814 bp, DROSOPHILA
ccgaatcacgtctgccagcccacatacacacacaggcgcagctacgtgtgccatcttgcttttttcatcggaaaattttccagaaactacgctcgaaaattacgaaaaaatcgcaaccaaatggtgtcgaaatttttttaaaatttaagtttcgtgcatatacgtgaaataaagtcgggttggttgaaaaaatcgcggccaaacgatcgctggagaattttttcaatcaagccaaatgggtgcgaagctgacgacgtaaaaatttttgtgtgtaccaacgaaagagcggagaaaacggacgaggcgagagcgcaaagcggagagaccgaggaaacactcgcgcaagaagaagaagagccagcaacagcaccaactacgagagttttctctccgtgagtctgtgtgtgtgcgcgtgtgcgcgcgcttgggttcggaaaaaatgatggaaaattacgaggaaattcgcctgggccacattaggtctaaagatctgggcaaccaggtgccagacactacgcaattctatccgccaactaagtttgattttggcgcggaaattctggcctcaacgtcaacagaggcagaggcagaggcagaagcaacagcaacaaccacagaaccagcaacaagcgaacttgctggcaaagcaaatggtgaaatcaaaacaaaaacattggctgccagggaagaacaagagattggcgccaatttggagcataaaaccaaaaatcccacaaagtcaatgggcgaggatgaagatgacgaggaggaggaggaagaggacgatgaggaggaggaggaggacgacgaggagggaatcaccggaacgagcaacgaggatgaggactccagctcaaattgctcctcatccgtggaacccgactggaagctgcgctggttgcaacgagaattttacacaggtcgtgtgccgcgccaggttattgccagcattatgccgcatttcgccaccggcctggcgggcgacaccgacgactccgtgctgtgggactatttggcccacctgttgaacgagccgaagcggcgcaacaagctggcctcagtgaacaccttcgacgatgtcatcagtttggtcaagaaatcacagaagatcattgtgctaacgggagccggagtatccgtctcctgcggcattccggacttccggtccaccaatggcatatatgcgcgattggcccatgattttcccgatctgcccgatccgcaggccatgtttgatatcaactacttcaagagggatccacgaccgttctacaagtttgcccgcgagatatatcccggcgagtttcagccctcaccctgccatcgtttcatcaaaatgctggagaccaagggcaaactgttgcgcaactacacacagaacatcgacaccctcgagcgggtggcaggcattcagcgagtaatcgagtgtcacggctccttttcaacggcctcgtgcaccaagtgtcgtttcaagtgcaacgctgacgccctgcgggcggacatatttgcccagcgaattccggtgtgcccgcagtgccagcccaataaggagcagagcgtggatgcctcggtggccgttactgaggaggagctgcgccaactggtcgagaacggcatcatgaagccggatatcgtctttttcggcgagggactgccggatgagtaccacacggtcatggccaccgacaaggacgtgtgcgatctactgatcgtgatcggctcctcgctgaaggtccgacctgtggcccacattcccagcagcataccggccacggtgccgcagattcttatcaatcgcgagcagctgcatcaccttaagttcgatgtggagctgctgggcgactccgatgtgatcatcaaccagatttgccaccggttgtcggacaacgatgattgctggcggcagctgtgctgcgatgagtcagtgcttaccgaaagcaaggagctaatgcctccggagcactctaatcaccacctccatcatcatctacttcaccaccgccactgcagttcagagagcgagcgacagtcgcaactggacacggatacgcagtctattaaatcaaatagttcggcggactacatactaggatcagctggcacctgctcggatagtggatttgagtcatctacttttagctgtggaaagcgttccactgccgccgaagcggcagccatcgaacgtattaaaacagacatactggttgagctgaacgagaccacagccctaagttgcgatcgtctgggcctggaaggccctcagacaacggtggagagctatcgccatctttccattgattcctccaaggatagcggcatcgagcagtgcgacaacgaagccacgcctagctacgtgcgacccagcaatcttgttcaggagaccaagacagtggcgcccagcctgacgcccattccacaacagaggggaaagcgacagacagcagccgagcgtctgcagcctggaacattctattcgcacaccaacaactattcgtatgtgtttccaggagcccaggtattctgggacaacgattacagcgatgatgatgacgaagaagaggaaagatcacacaatagacacagtgatctctttggcaatgtggggcacaattataaggatgatgatgaggatgcatgtgatctgaacgccgttccattgtcaccattgctaccgccttcactggaggctcacatagtcaccgatatagtgaatggatccaacgaaccgctgcccaacagcagtcccggccagaaaagaaccgcctgcattatagaacagcagccaacgcccgctattgaaacggaaattcccccactaaagaagcggcgaccaagtgaggaaaataagcagcagacccaaatagaaagatctgaggagagtccgcctccaggacagttagcagcagtgtaaacgtaatcttagcccctgctagtagtgtagtatttattttaaatgcaattcaagccaacttgtaaacagagaagctgcgaaatcgtagccgagggccatgttaccaatttcattccccggaaaggtactggaatcggaaacggtaaaccgtttacttgttatttatttagaatatgagaacacttcaattcccggtatcacgaagttttcaagaaatgaaaccggatccactagtttactcaattcgaggctttagagatctgaccctcgttgctttaccaccaaccccttatgcccaatcccgttttgatatttttgaaaaactcttagtttatttattatctctctttttcaaaacgaaacgctgtaaatgttagtattttattatattaagttgttattgaggcctttttagacaaactaaagagataagcggaaagttgaaaatcctttagaaagcaggatttctttgtattcaaagagaagcagcgcctcaactttaaatctagttctaagcgtaacatattcaaaactatgcaaatgcaaacggaaaaatacgttagttttagttaaaaactagacacaaacactctgtatataagcactcgcccctaatttgtattgtacatgattctttttctacttttttgtgttatctccttaccattttatatttctatcggttatggcaactattttttaacatttatacactcgcacccacatcaaaatgtaacagcgcatggatttcaaaatattcataagagttggaaatttggtgtgcgtgtttgaaatgtttattcgaaacctagcataaatatatagccaccaaacgcagtgtaaacatagcagtaagaatttagtctatatgtcttaaaagtgtattaatatccagaatataaa

SEQ ID NO: 10869 - protein, 823 aa, DROSOPHILA
MMENYEEIRLGHIRSKDLGNQVPDTTQFYPPTKFDFGAEILASTSTEAEAEAEATATTTEPATSELAGKANGEIKTKTLAAREEQEIGANLEHKTKNPTKSMGEDEDDEEEEEEDDEEEEEDDEEGITGTSNEDEDSSSNCSSSVEPDWKLRWLQREFYTGRVPRQVIASIMPHFATGLAGDTDDSVLWDYLAHLLNEPKRRNKLASVNTFDDVISLVKKSQKIIVLTGAGVSVSCGIPDFRSTNGIYARLAHDFPDLPDPQAMFDINYFKRDPRPFYKFAREIYPGEFQPSPCHRFIKMLETKGKLLRNYTQNIDTLERVAGIQRVIECHGSFSTASCTKCRFKCNADALRADIFAQRIPVCPQCQPNKEQSVDASVAVTEEELRQLVENGIMKPDIVFFGEGLPDEYHTVMATDKDVCDLLIVIGSSLKVRPVAHIPSSIPATVPQILINREQLHHLKFDVELLGDSDVIINQICHRLSDNDDCWRQLCCDESVLTESKELMPPEHSNHHLHHHLLHHRHCSSESERQSQLDTDTQSIKSNSSADYILGSAGTCSDSGFESSTFSCGKRSTAAEAAAIERIKTDILVELNETTALSCDRLGLEGPQTTVESYRHLSIDSSKDSGIEQCDNEATPSYVRPSNLVQETKTVAPSLTPIPQQRGKRQTAAERLQPGTFYSHTNNYSYVFPGAQVFWDNDYSDDDDEEEERSHNRHSDLFGNVGHNYKDDDEDACDLNAVPLSPLLPPSLEAHIVTDIVNGSNEPLPNSSPGQKRTACIIEQQPTPAIETEIPPLKKRRPSEENKQQTQIERSEESPPPGQLAAV

SEQ ID NO: 10870 - DNA, 4131 bp, DROSOPHILA
aacgtattgaacaattataattaaattatttttttaataaagataagcttaattcattcacgtaactggaaatcttaattggagataatctagcactgataatattcttcgctttataaataagttctaattgaaattaattcaaatatatatttatatatatgatatataatttttaaggaattacaagaagtcgttccacttagagcaaattttcttagtaactgttggcatattttcagcggaacgtttagaggatcgtggccctgtgttcctggttttcttaaagttcatagagatttcgtcggaaagttcatcggttttcgtaggttttgctgcaggcttttgagtagtttcaatggtattatccacatagtttgcccatttatttgttttcttctgaggtgtggtgttttcctctttttcttggcagtctttctcctcttcgagctgttgctttgccgtgaggaataagcccgtgttcagacattcctcctgcattccgcgctctaagttgagatgctgcaccttaacccggcattccgctgccgatcctcgaaagaattccttgagcaaactttgcttttggcggcaaattttacactgccatgtgcttgcctttttcacgaagtccaccttgtttaaattaggtatatatatataagtagttattgagttctaagatatatttcagtttgtttgcactcacctggtacattttgcattgaatgcattgtaccacgcgaatttgctgggacattattcaaatttgcgaaaaaccaaataaagagaccagggatggaaaccaacagcactgcaacaagtggagtgaaaaaaatgtggttgcacaaatgttaaagcgtgatgactacagtttaacaagtagtaaaacatttaccaaaatttgtaattaactaattttggtacctatggttaatgatttagccgggtgctgattccggttcataagtgaaccaaatcgttccccatccctggtccaaatataaacaaacttgcatcgtctaatcggcactgtcggtttaataaaatgcgattggtaagtcatcctgagaagtaaataacaacttaattagcggaagtgactatccactttgcagtattgtctcagcggggacctggccaagccatgttatatcattaccttcaagggcctgcggattatgctggactgcggtctcacggagcagacagtcctgaatttccttccgctgcccttcgttcagtcactgaagtggtccaatctgcccaacttcgtgcccagtcgggatcatgatccccaaatggatggcgagttgaaggactgctgtggccgggttttcgtggactcgacgcccgagtttaatctacccatggacaaaatgctggatttcagcgaagtggatgtgatacttatctcgaattatcttaatatgctggccttgccgtatatcacggaaaacacggggttcaagggcaaagtctatgccacggagccaacgctgcagatcggccgatttttcctggaggagctggtggactatatcgaagtgtcgcccaaggcgtgcaccgcgcgcttgtggaaggagaagcttcatctgctgcccagtcccttgagcgaagcctttcgcgccaagaagtggcgcactatctttagtcttaaggatgtccaaggcagtctgtccaaggtgaccatcatgggctacgacgagaagctggacatcctcggagcttttatcgccactcctgtcagctcgggctactgcctgggctcgagcaactgggtactgagcacggcgcatgaaaagatttgctatgtcagtggttcctccacgttgaccacacatccgcggcccatcaatcagtcggcgctgaagcacgccgatgtactcattatgaccggactgacgcaggcgccgacggtaaatccggacacgaagctgggcgagctctgcatgaatgtggccttgacgatccgcaacaatgggtctgccttgattccctgttatccttcgggcgttgtctatgacctctttgagtgcctcacccagaatttggaaaacgctggcctaaacaatgttcccatgttctttatttcccctgtggcagacagctccttggcgtattctaatatcctggccgagtggcttagttccgccaagcagaacaaagtgtatcttccagacgatcctttcccacatgccttttaccttcgcaacaacaagctgaagcactataaccatgtgttctccgagggctttagcaaggacttccggcaggtttgtctaacataattgtgaaaacttcatactacaaattctctgtcttccttacagccctgcgtggtcttttgtggccatcctagcttgcgtttcggcgacgctgttcactttatcgagatgtggggcaataaccctaacaactccatcatattcacggagccggactttccgtatctgcaagtactggcgcccttccaaccactggccatgaaggctttttactgtcccatcgacacctctttgaattatcagcaggcaaataagctgatcaaggagttgaaaccaaatgtgcttgtcatcccagaggcatacacaaaaccacatccctcggccccaaatttgttcattgaacagccggataagaagataataacgttcaagtgcggcgagatcatacgtctgccattaaaacggaagctggatcgaatttacattacctcggaactggcccaaaagatatcgccaaaggaggtggcggccggcgtgaccttctccacattgacaggagttttgcaagttaaggacaaggtccactgcatccagccatgtgcggatagcgttaaagacgagaccatctcgagcaacagcgctccgacaaaggaggatgtgctgaagaacgtcaaatacgagtatggcagcattgatgtagatgcagtgatgaagaagctggcacaggatggcttctccaacatcaagctagaccgcactggcggcgctctgactctgaaccttgtcaatgaggacacagtcattaagttcgaggacaacgagacgcatattatctgcggcggaaagccaacaacccggctcaagctgcgagacaccatcatgaaatgcttacagagtttttaaaaacataaatgtattccttacacctaaataacaacacatcattacgcttagttctttgcctccataacgtcagagcaacgttgacacgttttctgctcatcctccagaccatagcgacgacaacgtgggcacagtgatatctgaagtttacttaaagcaatatccaagtcgctattatgggactgtaagagcgtaactgaccccacttgcaatatctcgcataattcagaattgctcacagactctccaagagggctgtgaagttctcgcagcaaatccagctggcttctttcctttcctttgatggtcacggccaagtgccaggtgttaacatctccagcctgttggttaataagtcgtttaacatcgaacgctgcattaatcacttcagtggctttggtgtcctgccattcaggattagtctgaacaatttgctcgtggaatgcaccacctgtggtgtcatagtagctccagctttcctccaccaggaagggaacaatgggccataagctcttgcagagttgttgatagcagtgggtaagagtttgacgaatggccagtagctcgtgatcatcaccacaataaagacgatccttgatgagatgcacatagacggcggacacctgatttgcaatgaagttttggacacaggcgacaacacgattgtactcataagcttggtatagcttctccaccttaaaagcgattgacatgattagttgaaaaactaagattaacaaaatttcctacctcagattcaaattcaaccagctggcttaacaaataacgattaagatagctcttatccgaagttcgtataagcttctcccccgattgtttctctccaattacgccttttaaatatcgcatagttccgcggatcttgcatagattttctgccgcttgctgcagtagcttatcgctcactgtaatggacatgtgctgcgttccatgggaggcaacccaccaacgcagtgcatccgtaccatatttcttggtt

SEQ ID NO: 10871 - DNA, 1950 bp, DROSOPHILA
aatataaacaaacttgcatcgtctaatcggcactgtcggtttaataaaatgcgattgatgctggactgcggtctcacggagcagacagtcctgaatttccttccgctgcccttcgttcagtcactgaagtggtccaatctgcccaacttcgtgcccagtcgggatcatgatccccaaatggatggcgagttgaaggactgctgtggccgggttttcgtggactcgacgcccgagtttaatctacccatggacaaaatgctggatttcagcgaagtggatgtgatacttatctcgaattatcttaatatgctggccttgccgtatatcacggaaaacacggggttcaagggcaaagtctatgccacggagccaacgctgcagatcggccgatttttcctggaggagctggtggactatatcgaagtgtcgcccaaggcgtgcaccgcgcgcttgtggaaggagaagcttcatctgctgcccagtcccttgagcgaagcctttcgcgccaagaagtggcgcactatctttagtcttaaggatgtccaaggcagtctgtccaaggtgaccatcatgggctacgacgagaagctggacatcctcggagcttttatcgccactcctgtcagctcgggctactgcctgggctcgagcaactgggtactgagcacggcgcatgaaaagatttgctatgtcagtggttcctccacgttgaccacacatccgcggcccatcaatcagtcggcgctgaagcacgccgatgtactcattatgaccggactgacgcaggcgccgacggtaaatccggacacgaagctgggcgagctctgcatgaatgtggccttgacgatccgcaacaatgggtctgccttgattccctgttatccttcgggcgttgtctatgacctctttgagtgcctcacccagaatttggaaaacgctggcctaaacaatgttcccatgttctttatttcccctgtggcagacagctccttggcgtattctaatatcctggccgagtggcttagttccgccaagcagaacaaagtgtatcttccagacgatcctttcccacatgccttttaccttcgcaacaacaagctgaagcactataaccatgtgttctccgagggctttagcaaggacttccggcagccctgcgtggtcttttgtggccatcctagcttgcgtttcggcgacgctgttcactttatcgagatgtggggcaataaccctaacaactccatcatattcacggagccggactttccgtatctgcaagtactggcgcccttccaaccactggccatgaaggctttttactgtcccatcgacacctctttgaattatcagcaggcaaataagctgatcaaggagttgaaaccaaatgtgcttgtcatcccagaggcatacacaaaaccacatccctcggccccaaatttgttcattgaacagccggataagaagataataacgttcaagtgcggcgagatcatacgtctgccattaaaacggaagctggatcgaatttacattacctcggaactggcccaaaagatatcgccaaaggaggtggcggccggcgtgaccttctccacattgacaggagttttgcaagttaaggacaaggtccactgcatccagccatgtgcggatagcgttaaagacgagaccatctcgagcaacagcgctccgacaaaggaggatgtgctgaagaacgtcaaatacgagtatggcagcattgatgtagatgcagtgatgaagaagctggcacaggatggcttctccaacatcaagctagaccgcactggcggcgctctgactctgaaccttgtcaatgaggacacagtcattaagttcgaggacaacgagacgcatattatctgcggcggaaagccaacaacccggctcaagctgcgagacaccatcatgaaatgcttacagagtttttaa

SEQ ID NO: 10872 - protein, 630 aa, DROSOPHILA
MLDCGLTEQTVLNFLPLPFVQSLKWSNLPNFVPSRDHDPQMDGELKDCCGRVFVDSTPEFNLPMDKMLDFSEVDVILISNYLNMLALPYITENTGFKGKVYATEPTLQIGRFFLEELVDYIEVSPKACTARLWKEKLHLLPSPLSEAFRAKKWRTIFSLKDVQGSLSKVTIMGYDEKLDILGAFIATPVSSGYCLGSSNWVLSTAHEKICYVSGSSTLTTHPRPINQSALKHADVLIMTGLTQAPTVNPDTKLGELCMNVALTIRNNGSALIPCYPSGVVYDLFECLTQNLENAGLNNVPMFFISPVADSSLAYSNILAEWLSSAKQNKVYLPDDPFPHAFYLRNNKLKHYNHVFSEGFSKDFRQPCVVFCGHPSLRFGDAVHFIEMWGNNPNNSIIFTEPDFPYLQVLAPFQPLAMKAFYCPIDTSLNYQQANKLIKELKPNVLVIPEAYTKPHPSAPNLFIEQPDKKIITFKCGEIIRLPLKRKLDRIYITSELAQKISPKEVAAGVTFSTLTGVLQVKDKVHCIQPCADSVKDETISSNSAPTKEDVLKNVKYEYGSIDVDAVMKKLAQDGFSNIKLDRTGGALTLNLVNEDTVIKFEDNETHIICGGKPTTRLKLRDTIMKCLQSF

SEQ ID NO: 10873 - DNA, 3190 bp, DROSOPHILA
gaacatgttggccgaaaggttttttaaatatttattggtaaactgggaatatattaactgtgaaggagcaaatgttgccataagatggggaagattaggcatagaatagggaaggattatgaaagtagcctattcataatggattagcctcaattgtgacatataatctcaatatgtcaagcttgtagcacaaccttttctagctaccatttgtgtaatcttcgagtacacagaataaatgactttccattcaaagttggagaacaagtttaaatagacttaaactgaaagaaaatccatgtcacacttccgagttatttccgttcaagtggcccaagtcaatgccaatggcaatagcaaaccaaaagccaaaagcaaagtcaagaggctgccgcaacaagccaaagccaaaagaagctttaacaactataaatgcgatcacttacagcttgtaatcaataacaagaaccgccgccaaacaccgacaagtcaaacaaacaacaacaacaatggccaggaaccgaacggactcaggaaaaactttctggcttaaatttctcacacacacagtccatgggcgagttcaggttactccggttgccttcgccatcgcggcttttcccattttccccataaaaaagttttgccattacttttcgaccagctgcacataactgtcgctctggcagtcgctgtccttgtctccggttctattcctgtctcaccttccaataaagaccccccacccaccaacggtatcacatctcctattattgtttgctgttccggccttgattcatcgtcctggctgctgtctaatgaaactcatgtttttattactcgcagtattgattgattgtttgagatggatttatggcatcaaaagttcttaaatcgcaaatgcttgttttatgtgctaaattaaagcttacgatttttaaaccagaactcaagcgaaataaataaagtccattatgatttcgaataaaaaccgtttatattacttctgctgtcgctcagccaaaagtcccttaaccagtcccaccaacatatccagaccttcctgattgtttttctggtagtatggaagggcctgaatgcgcttgacccactgtaccaggcgtggaaactgatccggctcgattggcgcaaaagcctcggccgtggacaccgatgcgatgcagctgagatcggcgatggtcagcttgtcgcccaccaagtaatcaccttcagccagacagtgctccaagccatcataggccttctgaaggtaggccactcgatcgctgggcacctcgccagctccgaaatagatcaccggctcgacaatgaaacggattcgcgggaatagatgaccgcaatcgtagtacaaacgggcatccaccaggcgccgcttctccggatcctttggatacagggaatcatcgccctccggtgcgtacttatctgccagatagctgcagataatgtgcgaatcgctcacgatggtgccgttatcatcgagcacggggatcgtgtgctgcgcattcaacttgagaaactcggcggatttgtgctctccggcctttacgttgaccagtctggaaagagatgacaaaagagaaagtgagcaagataaaagaggaacgagagtgtacaggtgccgaaagagcagagagtcgttcagcaattagtttgtcaaaacaacagctaatgccttgcccatttcatgatcagctttcaaatttactaagctattcgttctatttattaaatcatatctaatgaaaatgttacttaacattagttgacagtataatcttaccatctgctatcctagctaagtagcttaatgttgcattattaactaataaatggccagcatattaaacgcggggctatcaagaccccactgctcagtggagggttaatgaagagagtggtcgcgggggagaccggtttatcagctagtgctatggatggggggaacaacttaccgcaagtccaactccaaaccgagggcggcggccgtcagcagaacagcacgacaggggggactacggggagcgtaatagaggatgggtttggccgacatagtacaagcagctaaaataaattggttaattacttatttgtgtgaccaacaaactaatacaaaacgcaaatattttgccacttcatttactttctcgttgaactaaaatgcaaccggcttagctgagggtaaaaaagcaactgaaatattaaagagagacaaacaagttgattgttgacgttgtcgaagctctcataaagctcatcgagttgttcaacgctctcaaaagagtggtgctcattgaatgatcttgtcatcgaagcttttcacaagcaaaagctcagatactttaaaagagagtgtattttacattaaagtatcctaaatattgctgttaatttactattactaacgtagagatcataggaaccataaaggaactattaggtatgtagattccaaaaacagattccatttcccaatttcgatcgatatgctagaaaaatgttaaaatttcttattcgtacttccactatttgggtatcttgatcagaacaagaatacatcaaaacagataccaaacatattaaaaattgattatacattttatttgcaagaaagccgatcgaactgcgatcgaatgagcatcttctttggcccaattgaaaaggtgactaactaagcggatttggcgcacccactgacagccctttcccaaggtgaacaaaattaaatttttaagcggatttcggaattagttaatggttcaggccagagggttccccattcagagattcactttgctcggctgcaggagctttttgtacataaagtgaatataattggatttctgatgctcggcatcaggtagatagagacattaatgtggaatgcagggggacaaaaacgtcgataatggttcgttttggcctttggcccatcgaactcgaactccgaactgaaagtgccgctcacgttgaatgcctttaaatatttggtcacgggcgagggatgccacagcgaaatgagaaaaatgtttgcccaggtatgcgggcaggtggcgtcccccattttccgcccgtctatgccccagcgccagaacacgccccctcgttttccagcttttcccgttcgaagacaaatttgtgaaagcaatttgcagttattaaagctttt

SEQ ID NO: 10874 - DNA, 715 bp, DROSOPHILA
cggttgcattttagttcaacgagaaactgcttgtactatgtcggccaaacccatcctctattacgctccccgtagtcccccctgtcgtgctgttctgctgacggccgccgccctcggtttggagttggacttgcgactggtcaacgtaaaggccggagagcacaaatccgccgagtttctcaagttgaatgcgcagcacacgatccccgtgctcgatgataacggcaccatcgtgagcgattcgcacattatctgcagctatctggcagataagtacgcaccggagggcgatgattccctgtatccaaaggatccggagaagcggcgcctggtggatgcccgtttgtactacgattgcggtcatctattcccgcgaatccgtttcattgtcgagccggtgatctatttcggagctggcgaggtgcccagcgatcgagtggcctaccttcagaaggcctatgatggcttggagcactgtctggctgaaggtgattacttggtgggcgacaagctgaccatcgccgatctcagctgcatcgcatcggtgtccacggccgaggcttttgcgccaatcgagccggatcagtttccacgcctggtacagtgggtcaagcgcattcaggcccttccatactaccagaaaaacaatcaggaaggtctggatatgttggtgggactggttaagggacttttggctgagcgacagcagaagtaa

SEQ ID NO: 10875 - protein, 225 aa, DROSOPHILA
MSAKPILYYAPRSPPCRAVLLTAAALGLELDLRLVNVKAGEHKSAEFLKLNAQHTIPVLDDNGTIVSDSHIICSYLADKYAPEGDDSLYPKDPEKRRLVDARLYYDCGHLFPRIRFIVEPVIYFGAGEVPSDRVAYLQKAYDGLEHCLAEGDYLVGDKLTIADLSCIASVSTAEAFAPIEPDQFPRLVQWVKRIQALPYYQKNNQEGLDMLVGLVKGLLAERQQK

SEQ ID NO: 10876 - DNA, 3645 bp, DROSOPHILA
gcataaatttaaccgaagattggtccagatacacacgcatggaattcgatgaggctcaagaaaaatgatttattccattttgtcgatgtgctaatactattattaaattgattaccacaattagggcttaaatgtttggttattatttaagaattaaaatgtatattatggcacaagttttattaactttctttagttatttatttggttccatgtcggcattgattgttccatttcagcccccattgttttatttacggggcaataaaataagaataccgcaaaaatgggacgatctgacttatcttcttcattatcgttatcatacaaattgcttttaaatagtgaaatttaatatgacgttcaaaattcttcaagactttaaggcattggatcaacgtgacgcacgcatgctttaaaaagtcgtacaaaactaatttatggacaaagaaatttattaatgaatttaatcaacctaatacctgaaaacatttgaacttattaatttcatatctgccaaaagttaaatacatatattacaaacaattttacttgcctagctgataagattcaacaatttaccattgtattttgataaatgatttgagttggcaatttcattcgattgtcattgaattaatagcttatttcaatatgatttcacttttttcatatctttgtccattgttattttatagaaaatctaacaaagccgcagacatttccaagaacaacggaactattttgacagctaacaataacgcagtttattgtttatacatttaaattttttgctatacgaattctgcgagatgatcttattaatacggaaatctacagaggttcactgcttttgtttattattaaacatttaaattttattaactgtatcaaaatctctaaatgaaacccaaaaagtagtatttttaaattgttagaaaacccataaaagactcatattttaatgttatttttttattttctcgtggtgttggcttatttatatattatactgttcataggcgtaaatgtgaaagggatttcgaggagttccaattgacaggataatcggacctttgttggttcgctcctcaattgcatctccatccataggtgcgttatcctccatcatattcactgggtccatctggtcctccatcatatggtcctcttccatcgcatcatctccttctggtaccatatagcttgaatcctcatcatcgatttcttcagcgccactcggagattcgggattctccactgtgttatctgcatattcaaggccgtagtccgcatcctcgggttccgtctccaagtcattgggctcattggacatttcctcctcgccctccatgaaattattttcgttatcattttcatcaattatgttttcgacaatctccacattttcatctagcaagtccagatcatcccgtggagtttgctcgccactaccctctggcttagtgggttttggttgatgatgatgggggtgctggtggtgtgaagtttggctgtgtcctccatttccgtgtgtaccagtgtgggggtgtgtattatgtgggtcctgccctccgtgattgtgtgagggatgatggtggccatgtcctccgtgattgtgagggggatgattatggttgtgctctccattgtgaggtggatgatggttgttgtgtcccccgtgattgtgccctccgtgattgtggggtggataatggtgataacccttgtctccgccatcatgtggatggtgaggtggatatggtggcggataggggcctggataattgtggcctggatggtgatggcctccatggccaccgtggggtggatacggatagtagcctcccttatcgtgtcctggtggataatagtgatggtggtgtccgcccttgtctcccttatgacctcctttgtgacctttatcccccttatgtccctttgagggccagggcactggcactggcagaggaatccatggtcccggataaggaccaggtggtggatacgggtacggtgggtatgggtacgatggtggtggaggtgccggtggtggtggtggtggtgggggttgtggatacgtagtgcctggaggtcctggaggacccggtggtcccgttcctgcaagagattaaatactcagtaaaattttggaaaatgacttataatatatcctttcaatattttcactgttagagcgttgtgatatatatgagtaacgattttctcttacctggtgggcctggaggtccgggtggacctttggatcccttgtggtgatgatggtgaccatgttcacctttctgcggtggcaatggtatgggaactataattggtggcgtcacgatcggcgggtggggatgatgtgaatgcgggtgtgagtgtggtggtggtggtggtggaggcggcggaggcggaggtggaggtggtggcggtggcgctggatgatgatggtggtgatcatgatgatcatggtgaccatgtcccgacttgtgaccgggtgggcctggtagtcccggtggaccaataggtcccggttcacctggttggcctggtagtccgtagtgaccgcgttctcccttctctcctcgctcgcccttggacccagtgtgtcccttgggaccttgcggaccaggcgttcctggtaagcccggcggtccaggaggccccggtggacctggcgggcaattgcagtgctgtggcggaggcggaggcggcggcggtggtggcggatagtagtgctgtggtggcagcttgtagatcacactttgtgctggcgccggagccggagcagcttgtagagatgctatcagtctgcccgtctcggcactcgggttcttggaattcgctaggccaaaggcccagcctggaaaggaaatgaatcccaattagaaatcagatccatcctatttgaatcatattccttacctatccaaaaaatcactgcgaacagcctcatggcgaaatggtatctgctgcctttctccggcggacggatcacttttataccgcattatgaactcttaatcttgtatgcacactttgtttaaatcactttcattaatctagattcactagaaccgttatatcatgtccattcagaaatctgcttgccaaatctctcggaaaatatgcaaacctgttcgcgatgatgctatcatcctgggttctctctaaacttatatatgtaaatttatgtccaatccaaaagtgaaccgcctctgaagtattaatatgttaacttccatttgaaaacagaagacatatgcaaaaaagaacacattctctgttgccgattgtttcgctttacgattcgaatgaaccatgacttaaaaatggcagaaaaaagagttttgtctcttaattggccgtttctatcaacttgttcacacctcggtcgcgcgtctccatatgattaaccccgatgaatcggagctatcccaaagtcaacgaaagtgtaaaggttttcgggacccgggcatttctttatccgggcctattgcataagaaggggtcgggtctggatggcattgggatttgccccttgacttcttttcatttccgtgaaatcttacaaacattatccaggtccactgaaagtaaagctgattgtttaaatggtaagggctttatttctgtacatca

SEQ ID NO: 10877 - DNA, 1785 bp, DROSOPHILA
atgaggctgttcgcagtgattttttggataggctgggcctttggcctagcgaattccaagaacccgagtgccgagacgggcagactgatagcatctctacaagctgctccggctccggcgccagcacaaagtgtgatctacaagctgccaccacagcactactatccgccaccaccgccgccgcctccgcctccgccacagcactgcaattgcccgccaggtccaccggggcctcctggaccgccgggcttaccaggaacgcctggtccgcaaggtcccaagggacacactgggtccaagggcgagcgaggagagaagggagaacgcggtcactacggactaccaggccaaccaggtgaaccgggacctattggtccaccgggactaccaggcccacccggtcacaagtcgggacatggtcaccatgatcatcatgatcaccaccatcatcatccagcgccaccgccaccacctccacctccgcctccgccgcctccaccaccaccaccaccacactcacacccgcattcacatcatccccacccgccgatcgtgacgccaccaattatagttcccataccattgccaccgcagaaaggtgaacatggtcaccatcatcaccacaagggatccaaaggtccacccggacctccaggcccaccaggaacgggaccaccgggtcctccaggacctccaggcactacgtatccacaacccccaccaccaccaccaccaccggcacctccaccaccatcgtacccatacccaccgtacccgtatccaccacctggtccttatccgggaccatggattcctctgccagtgccagtgccctggccctcaaagggacataagggggataaaggtcacaaaggaggtcataagggagacaagggcggacaccaccatcactattatccaccaggacacgataagggaggctactatccgtatccaccccacggtggccatggaggccatcaccatccaggccacaattatccaggcccctatccgccaccatatccacctcaccatccacatgatggcggagacaagggttatcaccattatccaccccacaatcacggagggcacaatcacgggggacacaacaaccatcatccacctcacaatggagagcacaaccataatcatccccctcacaatcacggaggacatggccaccatcatccctcacacaatcacggagggcaggacccacataatacacacccccacactggtacacacggaaatggaggacacagccaaacttcacaccaccagcacccccatcatcatcaaccaaaacccactaagccagagggtagtggcgagcaaactccacgggatgatctggacttgctagatgaaaatgtggagattgtcgaaaacataattgatgaaaatgataacgaaaataatttcatggagggcgaggaggaaatgtccaatgagcccaatgacttggagacggaacccgaggatgcggactacggccttgaatatgcagataacacagtggagaatcccgaatctccgagtggcgctgaagaaatcgatgatgaggattcaagctatatggtaccagaaggagatgatgcgatggaagaggaccatatgatggaggaccagatggacccagtgaatatgatggaggataacgcacctatggatggagatgcaattgaggagcgaaccaacaaaggtccgattatcctgtcaattggaactcctcgaaatccctttcacatttacgcctatgaacagtataatatataa

SEQ ID NO: 10878 - protein, 594 aa, DROSOPHILA
MRLFAVIFWIGWAFGLANSKNPSAETGRLIASLQAAPAPAPAQSVIYKLPPQHYYPPPPPPPPPPPQHCNCPPGPPGPPGPPGLPGTPGPQGPKGHTGSKGERGEKGERGHYGLPGQPGEPGPIGPPGLPGPPGHKSGHGHHDHHDHHHHHPAPPPPPPPPPPPPPPPPPPHSHPHSHHPHPPIVTPPIIVPIPLPPQKGEHGHHHHHKGSKGPPGPPGPPGTGPPGPPGPPGTTYPQPPPPPPPPAPPPPSYPYPPYPYPPPGPYPGPWIPLPVPVPWPSKGHKGDKGHKGGHKGDKGGHHHHYYPPGHDKGGYYPYPPHGGHGGHHHPGHNYPGPYPPPYPPHHPHDGGDKGYHHYPPHNHGGHNHGGHNNHHPPHNGEHNHNHPPHNHGGHGHHHPSHNHGGQDPHNTHPHTGTHGNGGHSQTSHHQHPHHHQPKPTKPEGSGEQTPRDDLDLLDENVEIVENIIDENDNENNFMEGEEEMSNEPNDLETEPEDADYGLEYADNTVENPESPSGAEEIDDEDSSYMVPEGDDAMEEDHMMEDQMDPVNMMEDNAPMDGDAIEERTNKGPIILSIGTPRNPFHIYAYEQYNI

SEQ ID NO: 10879 - DNA, 11800 bp, DROSOPHILA
ctttttgagtgtttttttttttttctttaacggggaataagattgagtggacgactttggggctgtggatgaagagtcttaacatctaaacattgaggatattatttagaatatcacacattccatgtatcattctctaatcagtatagtaagtataggtatttgtttaactcaactagaactcgaagtgttaatattgtgtctcaacgttcttaatcagtttaaagtaattgtaaatcgtgtaactcctcttagattacatacatagattaattgtaggtctgatgagttctacttgaggtcaaaacaaaacggcagatctctactaaaactaaatgttgagtttaactctttggaaatgcgctggctaagtcgactataagcgtttgccgtcgaagagctttctccgggggaggggggaattgtgggggaattgttggggatattggggatgggagaaaaggagtgcggctgtgggagtcggaaatacttttagttttgtgtgttcgagtgtctaagggtaaagctttaagcattccaactaaatgctacataatcgaatttaaaccatttgcaacccgttttagataatacctatcctcctgcggcacattgtactcgtacacagtttgttaaatttagttttagtttgggcttagttcagtttgtgttaaaatacgatttaacaattttagttacgcactcgaatgcaattcttcggctgtttattctggtaattacttagtttagatttaaattaagttaaaatacttatagtaaatatttataaatgtttgcgctcagctcggcacgcacccatcttaccgctcgtcttagttaaattggtttttgtttttcacttgccattttgtatcggttcacacctggacctgtatctggacttgtacctggccttctatctctacctgtatctgtatctttatccatatcttatgctttcgtttccatagctgcgcctgggagtggggctgtggcttttctagacatcgtacgcctccttcttatagttgttctttctgcttgttggcacatttagcacgttcgatgtcttggttgttgttgtcggacgcatcatcatcatccgcatggtcatgggcttgtcctcctcgtcgtcgtcggagaaatcgctctgggtcttgacatgaccacccagcgccggaccgctaaaatcgttctcgtcatcctcgtcgtcctgtttggaaagaggttgggatgaaggatgaagagtgtcttcaacatgtcagacataaaatgggcggacagagtcctctaggaaatcaagaacttcttacgaaattatagtacataaatcaaatgagctgacaccacgctgcgtatacttgatattctacacaagctcaagcgaaagctctctacacggccagcgactggccacaaaagctgaatttgtaaattaaaactacttgaagttcagagaaacttaagtacactgtaactatactgtagatgtaaagtttatttacattacatgtgttcatgtattcagtggcggattttcattcaagccaatcatataatgtgtaagaattatttattcttataaaacatataaccatttgtaaaatccgccacttacttatgtgttgcattaagggtttaaccatactaaaagtatttaaacaattaacaaacaaacgaacgaaccaacaaacaaaatgtaaatggtcagattttgattgtctccctgttactttacctgcatattagccacgatcagccgccaattgggtttatatatgtccatgaactgcctaaatctatgtacactcatttccctactcctgttgagccttcaagcgattttgctagtcttttccctaaacttaggttttgtaaataattgttctggccttatccggttttcgtttaaaagagctgtttgctattgtttgctagctacgattaattgctgtgcgttgattagttctttgtggtattgagtacgggtaattgcttggtaaccgaggatgagcaattggtttctacttgagtcgagccatgtccttagtttttttttcggtttttctgggtgttcagtgttcggtgttttgtgtttctgggccatgcgaagggcgttagtgaactattttttagagctatcctagttttaactggttgctgatttctttggggttctctaagacatggcgctgcacttaggttcgtatccatggcttcggttttgagttcaggttcggttcgttctaattctaacattgaatgaaaatggacacgggagcacagggaaagaagagcagagaatcgtgtgattagctttagtgtttttcagagatgtgcaggtgacgggatcggggttttggagtgggtatagcctttctatccaggacgaggcacaacttacttcaaagtctccaattgtgaagcgtgtcgccgctagtgaatcttgcggtggcatatccggactcatattctttacgacaatgagcgtgagtttggtaatgtattcggttattggatgtaagcattgtcagataggaaaaacaagcgcaagagtgaggaattttcgttaggtgagagaaagacacaattagtcacacgtatagatcaaaagagagatgggcgtaaacttagcctaataacacaacaaatggtacaaagaaagctcaaatcgagattgaatcgaaagtgttatcaattgatctgagcgcggatctgcacttacatcgtcatcattgtcaatcatctccttggtggaggcggttgtttcattgcgacgaatcgatccttggtggatgtccaggtccaccttcaggcactggaagctgcgcatgaggaacacgatgggcatgggcaggacgccagccaggatcatggatagtgcgatgcccatcacccaattggggtagctcttctgctcaatcataccctgtagaaatatgcaaatacatttagtcaagatctaataagggatctaaatatttgaatgctaagctacataccaaatcggcattccaagcaccgtaagttggatttctaatgaccatgaagaccactgaagacaccaagatgcagaccataatgacgggaccaatgtaccgccaggtccactgccagtaacgaccaggtcggtagccagtcatctggaaaatgtcctcggtgaagctgcggaaaaatatcgttagtatatggctcatatatttaaggaaaatgccagcacaaactcaccgctcgtgtccgtagataaagatcacggctatcatctccatcagcgccaccaccacgagaccaatggtgccggcaaaagagtcgaacatcttgagccagtactccccggcacctgtgcagaagatgaaaccgacaatgaagcagaagagacacaccacgccagtgacatgctgtttcttaacccgcttgataatgtcaatgtcgaagagggtgcacagcatgccctccaggatgccgatctgtgatcccagtcccagcgacagcagcatggtgaagaaaaggacggcccagaatggagcaccgggcagctccacgatggcctgggtgaatacgatgaaggccaaaccggtgccctcggcagcctgcatagataggagtacacaatgagaacctccagaccatagaaatccccatccagacagtactcacattgtccagttcgtgggccaagctgcattcgctcaattgcaggcggagcaactcagtgccattcagtagactcatggcttgctcgtagccctgtgtgtcattcaggcccagcagtttgtttttcaccaggatttccgtgttactgaaggaagggcaaaaaagaaaggaagaataaataaacaaactatgaatgaaccagttgaaatcggttagaacccgatggcaaagccgttcaagagcaattgtgcataactcaacgtgggtccgttaattgatgcaaattgacagacacgaccgcgattccatatatcgattcgaatatatcaatggatggacgcagatacacccaccgagccggcgtttcattgatacgcaaatagaaagaaaaacagttgccctccgccggttacaactggtcagcatattgatgacccacctaatggacgtggacccactgatgcgtgctacccactgccgctccccattgactcacctggctacacaacggtccacattgacggtggccttgaagcccagaatggcgaagatgaccacgctggcgtagatagccgtaactgcattgcacacggacaccaggagcacatcccgcacgcagttgttcttcggcgtgttgtagctcccgaaggcgatcagggatccaaaggccaggccaaaggagtaaaagacctgtgtggctgcatccagccaaacggtgggctccagtaatttttccacctttggcgtatacatgtgcatcagtccagcgcccgctcctctcaacgtgatgccgcgaatgaagaagatggtcagcacaatgtagggaaagagcgaggtgaagtagacaaccttgccggagctctggatgcccttcattacgatgaagaagacaatggtccaggacagcatcaggcagagcacgatccaccacttgaggccaccaggctcatccatggacggtgccgcatccaaggtggtgcggtaccagaagtacgtcgtctccgaggatttggcgcactcctccaactcaaatcctgtgccgttcaatggacaagatgaccagggcagcggatactaaagaagtcaacaattaattatagatcctgattgctttcaataaaaatcacttacccgaaaactgttgaaaaggtagaagaaaacccacgtgatgatcacgttgtaatagagagccacaaatagcgtcactatgcacgacgagattccgatgccacccagccagggatggatggtgttccacacacccaaggcacccaatcgcattctctgcccgattcccaactcgattaggaacagcggtatgccctccagtatcagcataaccataaagggtatcaggaatgcacctgcaacggaaaaattgaaggcttagattcacttaaagaaatactaagaatatctataaattcattttatataaggttgtaaaattagctcatgaactttctttatataaaatcttaatgaaatgccttaaatcgaataaacatatttgcacttcatagtgtaattttttcgcagtgcatggttaaattactggggatgtgacacaaaatcaattcaaagccagccggaaatttgcatttctggccaggtcgggaaatatctggttggacaactagctgaaaagagtatgccaacttcgatgcctggtcaagctgtcaattgtaattgaattaaaagccgggtggggttaaatcgccattagaaatgtgcgtacacttgctataacgtcccctttccacccacacaagtcaccccgcccactcaacgcccactggcccacccaaggccatcaattgggcccttccgccgtcgaatgccaggcaattagtgcacattaaatcccataatgttattgtcaaagctgtgcacctgattaactgcagttcgttggccaactgatattggatatgacacatgtcgccggacgatgggggcgtggaggggcgtggcaggggtctatccaatttagcgttatcactcaggtgacccgtgcagtcaaacagacattgatttgaaaatactgctccagtttgcgctttttgccgcagtaatccgaggcttagcgttgaatgccaggcaaaagtgcatagacctaaacaatcataactcgtaatcgatgaggtattttttgcataccaaacatataaagtaataagttacatagaactgtagttatatcttatatctattatttatatctttaaacacaagaaatgctgtttgaaatatttatacacattcaattcattcattacattcttattgatcgaactaaaaccaacatctttcctttttaaatagttttaaatacttaccgcctccattctgttggcaaaggtagggaaaccgccagatattgccgaggcccaccgagtatccgatgatgctgaggaagaactgcatcttgccgctccaggcggcgcgttccggctcattgcccggaatgtccaccgattgcacggagttgcgctggggggcggtaaggacgatggtcaccccgtgggttccatcgccccgtgcccgtgtgttcagcggcgccatctcgtggccgttgcgcggcgcatctatgattttggtggcagccatcaacgtgcggatattcctggcgaagtgtccgtggttaccgtctgcggaaaagtggagcagccgattatgagaagtgccaggactggacccagacccactgtttgatcgatactccccgagtaacagagtgtgtgctattttgtgtgtgtggacttgtttgcccatttgtgtagcggttcgtccttgagaccgcttctagtggctgctaactcaatttgtgtcctaattgtttgccattaggcggattctcccctggttaatggaaacttttcgctgtttttttccgtctttccgcccctgttagctttcgtaattttattaatatgcaaattttgtatagtgccttgggaccacatatgtatatgtaagcatgtttattagttcattcgtaattaagtgtggtatgccgacttcctatcaagcttaaataccaatatatatcataaactgaacccacttttaatatgccgaaataagtcttaataaactcgagaacacataactttttttaagtatactcttttttgtgtacgagttaaggcacgtatgtggggggtcagaggttaattagatccttagtttttgcagtaaacaaacccagaagctccaaggactgtttacgagtcactaaaccacccccaacccctctggaatcgtgacttcctgaaccttgttgctctgtgtaggggaaggccaaaaattttagccaacaccgcagaaggtcgttttaaattgaaagagcaaccaaaaacggaaaaaagaccaacaaggggggcgagtttattgaaaggggggttgacacaacccacagttctatgtgggtgccatttacttggaggctcgtcctctgttgctgacgtagtaaattagggctagagagcacacggaaaagagcggaagagccatgggtgtgttgtttggggcagcagctgtgtggcaagaagcagcaattcaccaccgagcgagagaggcagagagagcgccgaaagctgctcggagcttttggcgtcctgccgcttcattgatggccacttcggggggatagatttcccgcaggggggagcacacctccacgctatatattctcggtctattctgctatattttgcgtatacgtaatgcgctatgacgtcttttgatggctgcctcattttccccaattgcgtttcccaaaacgttacacaccgaccatctattcgtgtaaatatttatccagttacacccacagaatgtatctcatggatgcagaaaacaaaaactacttctaggggtacccagctgcaaagtctccgattaaattgcagggaaacgagctgtaatcaaaggacgccaacgtgcacttttccgcatttccacccgctgagctgtctcggggaaaactctcgtcctccgattgcacaatccgattgctgttacgtaaaccagtgtgtgaaaatattaaagtcctgtgagattgctttgctgttgctttctgcgacgcagttaaatgggtggatggtcggatgggtggctctttttcgctcaatcaccggcgtttctaaataaagctcttggccaggatgtggccgtggccctgtcattggaatgggttaaatcacttggacccatcgcaaagtggactgaaacacaatggtttaaccattgccgtaggaaattactcaatgaggggtcaagattaccactgattggctgtgacaggatctaattgaagaattgcttttcgggcttgcataactctgggctggagaacaggattcccatctggataaaatttaaatgaatggaaatttaccaagccaaacgacgctaccccaatctctcacacaggtagaaaagcttgggtcctgggagcaaaaaaaaaaaaatgacaaacccaattgcgtcgtggcaaaactgtaatcccataaaacacaaaggttcatcccctttcaactcgcgggttagaagaatcgtatttaaagctcattgccagttaaggtgaactacaaatagctcaaaaaaaaagcagaagtactgggtagtagttagtagtgaaaataaaacaagtaggcgaatctgctgacatggcgtgctgcatgctaaatcgataagaacggctttgcgggtaaggtggaatccagggggagggccagctgtcttttcctatttctgcataaatcatgcaatttgattgccaatgaaatatactctgtttacgcaatcgattttgcacattttattggccttttgtttacgctacgccacaataaattcactgcgaatcgttcaaaaatgttgcctcttgaaaattcgaaatgccaactaatatagccatatttgtggctattttcggaatcacattcactcaaaataaaaacagagaggtgttgcgcaacttgttcgctggctgctgccaatatgcactttttgccctttgctcttgataattgatttggacatcgtttggcgccaaggcgcgaattacgccgaaactctgcgaggacaattggcccccaaaatccaaccgaaaaccacccgaaaacacattgaaaacacatccacacttccgtttccgcttgaccttgatgcacgccactgtggattttctgaaactttgcgagcacttttaacagacaatggatatcccgctgaaaggtgttgaattactttcccaagccccaatttcgattgcttacgattgctaaaccttggtcagctgctattcgaataaaatagggcgtttgttttgctaaaacattatgtaaataaacgcagccgacggtcttatgcagaactgtggaaagtttccagagattattattacatttaaagcacacttctagatataggaaaacctataagtctttaaactttttctattcttgaaactaaaatatacacaatacatttctagttataaattaagcaaacaaagaacgtatacgttgtatttaaaaataaagtaaaaatatgtttcattttaattggataatacttgatttaaaaaaaaatttatattaaataataacgtgtaatcgcaataaactaatcaaattatttcaaagctcaatgaatttgttaaatatttccagggcgtggtgaagaagaagaacacagcccccttcggcgtcttaataatcctttgtgcgtcttaaccttttgccccgagtaaacaatcgataacaaacaaatgtttcactcccagcccaagcacaacattaatttttcatcaaacaaagtcagtttggccgcatccggcggactcgtgcacttgtctggccgagaagattgccaaaagagcggtgtaccagtgtatcttatatagaccatgtacatataagcccattgtacatatctaactttcgctctcaccctagagcgagagagatggctacagagtgtgcgagagagacacatagagaagggaagaagcgaagtgcaatcagacggggcacaaagttcaattccttgtgcttcccactatttttttggcacagcatcaactgttggcctgttgaggtcgttggggtgggttggagcttttttggcccaaaacatcccctcggccaatgccattgccagccccaatgcattttatcagaatctccaagagaaagagaatgtcaaaacggaattgatgatttaagatgatgtatctttgtatcttcttatggctatctgaattaaggtgtgaatattaagtcaaatattattcaagtgaaattgtttgaagtacttattcccatgttttaattattaaattaataaataattcataaactaatattttaaagagttatttgaaaatgctgtatacttttcgattgaataccattagtgaaagcaacccaaacaagccaactcaaatcgcttaaagaatcaaattaaaatttttgtttacgctggcttttcagtcaagtgattaaacggtgaatgtgtacccatgccaaaatctgattttgtttcccatgttcttacaatgtactatatatagtagtttatgtcaacgtgcaaagttgaatgtatggcaaagttttgcactttgttgatttttggaatgcgaattcgctgtaaatgcacaaaaatgctgatttcgattggcgctaagggcacgaaacaaatgaaattaacataaagctaagttcactgttttcacggaagtccacgtgcatccccaaccccgagttttactgacacagctcctaagataaagagagcgccagagagtctgtcctgagagagagatagagagagcgagagagaaggacaggaagggagtccttttggtatgtgtgtgtgtgtgttagtgggcaggacacgtcaggcagaaagtttcgcctcgctttcttgttccgtaccgaagtttgtcttggctgtgggatttaaaattccagactgctttaaagcggatttttcacacacacactctcgcgctttggaaaatcactgattatccctgatttccgctttaatccagacaaacgctcgatatcaattgcgttcgacgaatttttgcgtttttctcacggagctttgctcgattttcacgaccgttgatttgtgctttccgttgtaaactgaatccaaatcgcttggcgccgcactgcgaagctcgcgaattggcatggtgtgtttgaatcggtggtgaactaaccaccaccagcgcaggaacatccactacacacacaaacacacacgaacacatgtcaagcgttgacgcaggactctgcatggaaatttttgggctggcagcgggcttaaattgggcaaagcttcactttcattgattgccgcacgcggaaaggaggccaaaagctgcaggagcacgtggctttcgggggttgaaagttcaaatgccgccgctatctcctgttgtggtggtggttgtttagaaggagagaaatacgttgggagagaaaaccaattgattattaaaaaggactcgcttgtatcttaatccgaaaataaaattaattaattccttataaatttatatagtataagaattatagtttcattgaaagtacatatctgaataataacaagaaatctccttttaaatagcccgccagattaaatcaaattcaattgcagccttttaggcgcattcacctaccgcccgacagatggcgattgtaacgcgtgtgaccatttttttaattttatatcgataggcagtcatcgataactgtattttaccgcgcgcagtttaaacaaacacaaatatagatttatgttacatatattgtactacaaaatatttttcagcaatcgtatgcgtcattttaatttctccagcccattgaaaatataatattaccacattaaattatatattttacagatcttccagaattatacaactatattgtttgtagaaaatcattgcaatattgaaaactttcaaccaatactaattccattttattatgttaaaagtgaggaaagtgagtcccaatcagcccgaccaaactgttaaatacttcaggctagccccgaaaaggttaaacattgttgcccatgtacacgaggttgtaatattgtttcttggacagaa

SEQ ID NO: 10880 - DNA, 2475 bp, DROSOPHILA
tcaacggtcgtgaaaatcgagcaaagctccgtgagaaaaacgcaaaaattcgtcgaacgcaattgatatcgagcgtttgtctggattaaagcggaaatcagggataatcagtgattttccaaagcgcgagagtgtgtgtgtgaaaaatccgctttaaagcagtctggaattttaaatcccacagccaagacaaacttcgacggtaaccacggacacttcgccaggaatatccgcacgttgatggctgccaccaaaatcatagatgcgccgcgcaacggccacgagatggcgccgctgaacacacgggcacggggcgatggaacccacggggtgaccatcgtccttaccgccccccagcgcaactccgtgcaatcggtggacattccgggcaatgagccggaacgcgccgcctggagcggcaagatgcagttcttcctcagcatcatcggatactcggtgggcctcggcaatatctggcggtttccctacctttgccaacagaatggaggcggtgcattcctgataccctttatggttatgctgatactggagggcataccgctgttcctaatcgagttgggaatcgggcagagaatgcgattgggtgccttgggtgtgtggaacaccatccatccctggctgggtggcatcggaatctcgtcgtgcatagtgacgctatttgtggctctctattacaacgtgatcatcacgtgggttttcttctaccttttcaacagttttcggtatccgctgccctggtcatcttgtccattgaacggcacaggatttgagttggaggagtgcgccaaatcctcggagacgacgtacttctggtaccgcaccaccttggatgcggcaccgtccatggatgagcctggtggcctcaagtggtggatcgtgctctgcctgatgctgtcctggaccattgtcttcttcatcgtaatgaagggcatccagagctccggcaaggttgtctacttcacctcgctctttccctacattgtgctgaccatcttcttcattcgcggcatcacgttgagaggagcgggcgctggactgatgcacatgtatacgccaaaggtggaaaaattactggagcccaccgtttggctggatgcagccacacaggtcttttactcctttggcctggcctttggatccctgatcgccttcgggagctacaacacgccgaagaacaactgcgtgcgggatgtgctcctggtgtccgtgtgcaatgcagttacggctatctacgccagcgtggtcatcttcgccattctgggcttcaaggccaccgtcaatgtggaccgttgtgtagccagtaacacggaaatcctggtgaaaaacaaactgctgggcctgaatgacacacagggctacgagcaagccatgagtctactgaatggcactgagttgctccgcctgcaattgagcgaatgcagcttggcccacgaactggacaatgctgccgagggcaccggtttggccttcatcgtattcacccaggccatcgtggagctgcccggtgctccattctgggccgtccttttcttcaccatgctgctgtcgctgggactgggatcacagatcggcatcctggagggcatgctgtgcaccctcttcgacattgacattatcaagcgggttaagaaacagcatgtcactggcgtggtgtgtctcttctgcttcattgtcggtttcatcttctgcacaggtgccggggagtactggctcaagatgttcgactcttttgccggcaccattggtctcgtggtggtggcgctgatggagatgatagccgtgatctttatctacggacacgagcgcttcaccgaggacattttccagatgactggctaccgacctggtcgttactggcagtggacctggcggtacattggtcccgtcattatggtctgcatcttggtgtcttcagtggtcttcatggtcattagaaatccaacttacggtgcttggaatgccgatttgggtatgattgagcagaagagctaccccaattgggtgatgggcatcgcactatccatgatcctggctggcgtcctgcccatgcccatcgtgttcctcatgcgcagcttccagtgcctgaaggtggacctggacatccaccaaggatcgattcgtcgcaatgaaacaaccgcctccaccaaggagatgattgacaatgatgacgataatatgagtccggatatgccaccgcaagattcactagcggcgacacgcttcacaattggagactttgaagacgacgaggatgacgagaacgattttagcggtccggcgctgggtggtcatgtcaagacccagagcgatttctccgacgacgacgaggaggacaagcccatgaccatgcggatgatgatgatgcgtccgacaacaacaaccaagacatcgaacgtgctaaatgtgccaacaagcagaaagaacaactataagaaggaggcgtacgatgtctag

SEQ ID NO: 10881 - protein, 744 aa, DROSOPHILA
MAATKIIDAPRNGHEMAPLNTRARGDGTHGVTIVLTAPQRNSVQSVDIPGNEPERAAWSGKMQFFLSIIGYSVGLGNIWRFPYLCQQNGGGAFLIPFMVMLILEGIPLFLIELGIGQRMRLGALGVWNTIHPWLGGIGISSCIVTLFVALYYNVIITWVFFYLFNSFRYPLPWSSCPLNGTGFELEECAKSSETTYFWYRTTLDAAPSMDEPGGLKWWIVLCLMLSWTIVFFIVMKGIQSSGKVVYFTSLFPYIVLTIFFIRGITLRGAGAGLMHMYTPKVEKLLEPTVWLDAATQVFYSFGLAFGSLIAFGSYNTPKNNCVRDVLLVSVCNAVTAIYASVVIFAILGFKATVNVDRCVASNTEILVKNKLLGLNDTQGYEQAMSLLNGTELLRLQLSECSLAHELDNAAEGTGLAFIVFTQAIVELPGAPFWAVLFFTMLLSLGLGSQIGILEGMLCTLFDIDIIKRVKKQHVTGVVCLFCFIVGFIFCTGAGEYWLKMFDSFAGTIGLVVVALMEMIAVIFIYGHERFTEDIFQMTGYRPGRYWQWTWRYIGPVIMVCILVSSVVFMVIRNPTYGAWNADLGMIEQKSYPNWVMGIALSMILAGVLPMPIVFLMRSFQCLKVDLDIHQGSIRRNETTASTKEMIDNDDDNMSPDMPPQDSLAATRFTIGDFEDDEDDENDFSGPALGGHVKTQSDFSDDDEEDKPMTMRMMMMRPTTTTKTSNVLNVPTSRKNNYKKEAYDV

SEQ ID NO: 10882 - DNA, 5943 bp, DROSOPHILA
tttagcactgggtaaaaatgaaaatgaaacagaagttaggaaacaaaaagggcaaccattagttttatgttatgttgttgtttgcgtgctagatggtaaatatgatcagtcaagtcggtaactttgttatagcttaaatatataaagaaatatatattatatatatgtataatgagtacatcgcatatgaattgcatatgtcttacgtatagtgcaaatttataagcgcgctgcctcaccaaaacggagcattgaagttcgtaaattgcccaaaaactcaattaagtagctaaagaaagtcaaaaacagaaaaccatcgtacagattcgaactaaacaaacaagtttataccacaagtagtagctgtagaaaaagacagagaattcccgacaccgaaacgaaagagatgcctattaagatattttgagattagccaaagaactcagcacaaattaatattaaagttattactacgaatatatagccaaattccccattcaatgcgacctaccccccccccccccacacacacacacacacaacaacgttcaaaaaaagcgagcgtaataaaaatcgttgaaattgcagaacgttttaaaaaaaaccactctcttggctgctcaatgaatgaatgggtctctgggtctcgggggaacgtgcgcccttcggattagacgaattgaactgaccgtaatctgcagcttatgcaaacccgtgcccgccttacggagcaggtgcgtgcgtgccagggggcgagcagtgcatccgttccggctgccggaacgatcgagctttcggtcgctgtccggaattcaaattcttgcacagactagggacctgatgccgcccccgcaaccacggcttaaatatgccctttggttggctgggaagctcagtaccgagggtgtcgctcgggtgtacacagcatactgaactgctcagcaaggacatatattccaaggacagacagttcagtttcaggcagcaccacgttgacaagatgcaactgttcgttatctgcctgctggtggccagcacggccgcgttcacgatgtttggcccccacatccgcatcgtgcccggccagaaacccaatgagatagtcctgcactttcgcaatccgtgcaacaacaaaaccagcacaaccaccctgaagccgccaccgcctccttgcccttctcatcccaccacgcccgcttgtgagcaccgcattaccagtccggctccgacgaagccgcattgtccacatgccaccgctactccgcataattgtggtcacgacactacgagctccagcagggcaaccacaccaaagcccacactggaaacaacaatagggacaacttttaaaacaactcagatcacaacacgaggaccaaccactcagaaaccaactgagggaactagtgcccagccaacaactctaaaacctaccgagggaactacggcgaagcctacaactctgaagccaactgagggaactacgggcgaagccaacaactctgaaaccaactgagggaacgagtgccaagccaacaactttgaaaccaacggaagggaacgacggccaagcctacaactctgaaaccaactgagggaacgagtgccaagccaacaactttgaaaccaactgagggaacgagtgccaagccaacaactttgaaaccaacggaaggaactacggcgaagcctacaactctgaaaccaactgagggaactacggccaagcctacaactctgaagccaactgagggaacgagtgccaagccaacaactttgaaaccaacggaaggaacgacggccaagcctacaactctgaaaccaactgagggaacgagtgccaagccaacaactttgaaaccaacggaaggaacgacggccaagcctacaactctgaaaccaactgagggaacgagtgccaagccaacaactttgaaaccaactgagggaacgagtgccaagccaacaactttgaaaccaactgagggaacgagtgccaagcctacaactttgaaaccaactgagggaacgagtgccaagccaacaactttgaaaccaactgagggaacgagtgccaagcctacaactttgaaaccaactgagggaactacggcgaagcctacaactctgaagccaactgagggaacgagtgccaagccaacaactttgaaaccaactgagggaactacggcgaagcctacaactctgaagccaactgagggaactacggccaagcctacaactttgaacccaactgagggaactagtgccaagcctacaactttgaagccaactgagggaactacggccaagcctacaactttgaacccaactgagggaacaagtgccaagcctacaactttgaagccaactgagggaactacggccaagcctacaactttgaaaccaactgagggaacgagtgccaagccaacaactttgaagccaactgagggaactacggcgaagcctacaactctgaaaccaactgagggaacgagtgccaagccaacaactttgaaaccaactgatggaactacggcgaagcctacaactttgaaaccaactgagggaacgagtgccaagccaacaactttgaaaccaactgagggaactacggcgaagcctacaactctgaagccaacagagggaacgagtgccaagccaacaactttgaagccaactgagggaactacggcgaagcctacaactttgaaaccaactgagggaactacggcgaagcctacaactttgaaaccaacggaaggaactacggcgaagcctacaactctgaagccaactgagggaacgagtgccaagccaacaactttgaaaccaacggaaggaactacggcgaagcctacaactctgaagccaactgagggaactacggcgaagcctacaactttgaaaccaactaagggaacaagtgccaagccaacaactttgaaaccaactgagggaactacggcgaagcctacaacttctgaagccaactgatggaactacggcgaagcctacaactttgaaaccaactgagggaacgagtgccaagccaacaactttgaaaccaactgagggaactacggcgaagcctacaactctgaagccaacagagggaacgagtgccaagccaacaactttgaagccaactgagggaactacggcgaagcctacaactttgaaaccaactgagggaactacggcgaagcctacaactttgaaaccaactaagggaactacggcgaagcctacaactctgaagccaactgagggaacgagtgccaagccaacaactttgaaaccaacggaaggaacgacggccaagcctacaactctgaagccaactgagggaacgagtgccaagccaacaactctgaagccaactgagggaactacggcgaagcctacaactctgaagccaactgagggaacaagtgcccagccaacaactctgaagccaactgagggaacaagtgcccagtcaacaactttgaagccaactgagggaactacggcgaagcctacaactttgaagccaactgagggaacaagtgcccagccaacaactctgaagccaactgagggaactacggcgaagcctacaactttgaaaccaactgagggaacgagtgccaagccaacaactttgaagccaactgagggaactacggccaagcctacaactctgaagccaactgatggaactacggcgaagcctacaactttgaacccaactgagggaacgagtgccaagccaacaactttgaaaccaacggaaggaacgacggccaagcctacaactctgaaaccaactgagggaacgagtgccaagccaacaactttgaagccaactgagggaactacggcgaagcctacaactttgaaaccaactgagggaacgagtgcctagccaacaactttgaaaccaactgagggaactacggccaagcctacaactctgaagccaactgatggaactacggcgaagcctacaactttgaaaccaactgagggaacgagtgccaaggccaacaactttgaaaccaacggaaggaacgacggccaagcctacaactctgaaaccaactgagggaacgagtgccaagccaacaactttgaaaccaacggaaggaacgacggccaagcctacaactctgaaaccaactgagggaacgagtgcccagccaacaactctgaagccaactgagagaacaagtgcccagccaacaactctgaagccaactgagggaactacggcgaagcctacaactctgaagccaactgagggaacaagtgcccagccaacaactctgaagccaactgagggaactacggcgaagcctacaactctgaagccaactgagggaacgagtgccaagccaacaactttgaagccaactgagggaactacggcgaagcctacaactttgaaaccaactgagggaacgagtgccaagccaacaactctgaagccaactgagggaactacggccaagcctacaactctgaagccaactgatggaactacggcgaagcctacaactttgaaaccaactgagggaacgagtgccaagccaacaactttgaaaccaacggaaggaacgacggccaagcctacaactctgaaaccaactgagggaacgagtgccaagccaacaactttgaaaccaacggaaggaacgacggccaagcctacaactctgaaaccaactgagggaccgagtgccaagccaacaactttgaagccaactgagagaacaagtgcccagccaacaactctgaagccaactgagagaacaagtgcccagccaacaactctgaagccaactgagggaactacggcgaagcctacaactctgaaaccaactaagggaacgagtggccaagccaacaactttgaaaccaaacggaaggaacgacggccaagcctacaactctgaagcccaactgagggaactacggcgaaacctacaactttgaaaccaactgagggaacgagtgccaagccaacaactttgaaaccaactgagggaactacggccaagcctacaactctgaagccaactgatggaactacggcgaagcctacaactttgaaaccaactgagggaacgagtgccaagccaacaactttgaaaccaacggaaggaacgaccggccaagcctacaactctgaaaccaactgagggaaccgagtgccaagccaacaactttgaagccaactgagggaactacggcgaagcctacaactttgaaaccaactgagggaacgagtgccaagccaacaactttgaaaccaactgagggaactacggccaagcctacaactctgaagccaactgatggaactacggcgaagcctacaactttgaaaccaactgagggaacgagtgccaagccaacaactttgaaaccaacggaaggaacgacgggcaagcctacaactctgaagccaactgagggaactacggcgaagcctacaactctgaaaccaactgagggaacgagtgccaagccaacaactttgaaaccaacggaaggaacgacggccaagcctacaactctgaagccaactgagggaacgagtgccaagccaacaactttgaaaccaacggaaggaactacggcgaagcctacaactctgaagccaactgagggaacgagtgccaagccaacaactttgaaaccaacggaaggaacgacggccaagcctacaactctgaagccaactgacggaacaacgccagaacggacttctcagaagacgacaaccttgaagccaacatcggagaagacgacaaccgaatctcttcctccgtttaatatctttgatgtgataactggaacaccattaccaagcacgctcaatatttcataaagcaccatcaaacagaactacagtagtgataaaccattgaatccgtaattaatgtaaatttt

SEQ ID NO: 10883 - DNA, 3150 bp, DROSOPHILA
atgcaactgttcgttatctgcctgctggtggccagcacggccgcgttcacgatgtttggcccccacatccgcatcgtgcccggccagaaacccaatgagataggaacgacggccaagcctacaactctgaaaccaactgagggaacgagtgccaagccaacaactttgaaaccaactgagggaacgagtgccaagccaacaactttgaaaccaacggaaggaactacggcgaagcctacaactctgaaaccaactgagggaactacggccaagcctacaactctgaagccaactgagggaacgagtgccaagccaacaactttgaaaccaacggaaggaacgacggccaagcctacaactctgaaaccaactgagggaacgagtgccaagccaacaactttgaaaccaacggaaggaacgacggccaagcctacaactctgaaaccaactgagggaacgagtgccaagccaacaactttgaaaccaactgagggaacgagtgccaagccaacaactttgaaaccaactgagggaacgagtgccaagcctacaactttgaaaccaactgagggaacgagtgccaagccaacaactttgaaaccaactgagggaacgagtgccaagcctacaactttgaaaccaactgagggaactacggcgaagcctacaactctgaagccaactgagggaacgagtgccaagccaacaactttgaaaccaactgagggaactacggcgaagcctacaactctgaagccaactgagggaactacggccaagcctacaactttgaacccaactgagggaactagtgccaagcctacaactttgaagccaactgagggaactacggccaagcctacaactttgaacccaactgagggaacaagtgccaagcctacaactttgaagccaactgagggaactacggccaagcctacaactttgaaaccaactgagggaacgagtgccaagccaacaactttgaagccaactgagggaactacggcgaagcctacaactctgaaaccaactgagggaacgagtgccaagccaacaactttgaaaccaactgatggaactacggcgaagcctacaactttgaaaccaactgagggaacgagtgccaagccaacaactttgaaaccaactgagggaactacggcgaagcctacaactctgaagccaacagagggaacgagtgccaagccaacaactttgaagccaactgagggaactacggcgaagcctacaactttgaaaccaactgagggaactacggcgaagcctacaactttgaaaccaacggaaggaactacggcgaagcctacaactctgaagccaactgagggaacgagtgccaagccaacaactttgaaaccaacggaaggaactacggcgaagcctacaactctgaagccaactgagggaactacggcgaagcctacaactttgaaaccaactaagggaacaaagggaacgagtgccaagccaacaactttgaagccaactgagggaactacggcgaagcctacaactttgaaaccaactgagggaactacggcgaagcctacaactttgaaaccaactaagggaactacggcgaagcctacaactctgaagccaactgagggaacgagtgccaagccaacaactttgaaaccaacggaaggaacgacggccaagcctacaactctgaagccaactgagggaacgagtgccaagccaacaactctgaagccaactgagggaactacggcgaagcctacaactctgaagccaactgagggaacaagtgcccagccaacaactctgaagccaactgagggaacaagtgcccagtcaacaactttgaagccaactgagggaactacggcgaagcctacaactttgaagccaactgagggaacaagtgcccagccaacaactctgaagccaactgagggaactacggcgaagcctacaactttgaaaccaactgagggaacgagtgccaagccaacaactttgaagccaactgagggaactacggccaagcctacaactctgaagccaactgatggaactacggcgaagcctacaactttgaacccaactgagggaacgagtgccaagccaacaactttgaaaccaacggaaggaacgacggccaagcctacaactctgaaaccaactgagggaacgagtgccaagccaacaactttgaagccaactgagggaactacggcgaagcctacaactttgaaaccaactgagggaacgagaacgacggccaagcctacaactctgaaaccaactgagggaacgagtgccaagccaacaactttgaaaccaacggaaggaacgacggccaagcctacaactctgaaaccaactgagggaacgagtgcccagccaacaactctgaagccaactgagagaacaagtgcccagccaacaactctgaagccaactgagggaactacggcgaagcctacaactctgaagccaactgagggaacaagtgcccagccaacaactctgaagccaactgagggaactacggcgaagcctacaactctgaagccaactgagggaacgagtgccaagccaacaactttgaagccaactgagggaactacggcgaagcctacaactttgaaaccaactgagggaacgagtgccaagccaacaactctgaagccaactgagggaactacggccaagcctacaactctgaagccaactgatggaactacggcgaagcctacaactttgaaaccaactgagggaacgagtgccaagccaacaactttgaaaccaacggaaggaacgacggccaagcctacaactctgaaaccaactgagggaacgagtgccaagccaacaactttgaaaccaacggaaggaacgacggccaagcctacaactctgaaaccaactgagggaccgagtgccaagccaacaactttgaagccaactgagagaacaagtgcccagccaacaactctgaagccaactgagagaacaagtgcccagccaacaactctgaagccaactgagggaactacggcgaagcctacaactctgaaaccaactaagggaacgagtggccaagccaacaactttgaaaccaaacggaaggaacgacggccaagcctacaactctga

SEQ ID NO: 10884 - protein, 1049 aa, DROSOPHILA
MQLFVICLLVASTAAFTMFGPHIRIVPGQKPNEIGTTAKPTTLKPTEGTSAKPTTLKPTEGTSAKPTTLKPTEGTTAKPTTLKPTEGTTAKPTTLKPTEGTSAKPTTLKPTEGTTAKPTTLKPTEGTSAKPTTLKPTEGTTAKPTTLKPTEGTSAKPTTLKPTEGTSAKPTTLKPTEGTSAKPTTLKPTEGTSAKPTTLKPTEGTSAKPTTLKPTEGTTAKPTTLKPTEGTSAKPTTLKPTEGTTAKPTTLKPTEGTTAKPTTLNPTEGTSAKPTTLKPTEGTTAKPTTLNPTEGTSAKPTTLKPTEGTTAKPTTLKPTEGTSAKPTTLKPTEGTTAKPTTLKPTEGTSAKPTTLKPTDGTTAKPTTLKPTEGTSAKPTTLKPTEGTTAKPTTLKPTEGTSAKPTTLKPTEGTTAKPTTLKPTEGTTAKPTTLKPTEGTTAKPTTLKPTEGTSAKPTTLKPTEGTTAKPTTLKPTEGTTAKPTTLKPTKGTKGTSAKPTTLKPTEGTTAKPTTLKPTEGTTAKPTTLKPTKGTTAKPTTLKPTEGTSAKPTTLKPTEGTTAKPTTLKPTEGTSAKPTTLKPTEGTTAKPTTLKPTEGTSAQPTTLKPTEGTSAQSTTLKPTEGTTAKPTTLKPTEGTSAQPTTLKPTEGTTAKPTTLKPTEGTSAKPTTLKPTEGTTAKPTTLKPTDGTTAKPTTLNPTEGTSAKPTTLKPTEGTTAKPTTLKPTEGTSAKPTTLKPTEGTTAKPTTLKPTEGTRTTAKPTTLKPTEGTSAKPTTLKPTEGTTAKPTTLKPTEGTSAQPTTLKPTERTSAQPTTLKPTEGTTAKPTTLKPTEGTSAQPTTLKPTEGTTAKPTTLKPTEGTSAKPTTLKPTEGTTAKPTTLKPTEGTSAKPTTLKPTEGTTAKPTTLKPTDGTTAKPTTLKPTEGTSAKPTTLKPTEGTTAKPTTLKPTEGTSAKPTTLKPTEGTTAKPTTLKPTEGPSAKPTTLKPTERTSAQPTTLKPTERTSAQPTTLKPTEGTTAKPTTLKPTKGTSGQANNFETKRKERRPSLQL

SEQ ID NO: 10885 - DNA, 3916 bp, DROSOPHILA
cggatgccgtgtatttcgtggaggagcattggattcactgcaactacaacagtcccgactaccacaatgatattgccttgattcggctaaacgatacgatcaagttcaatgagtacactcaaccggctgagctgcccacagctccggtggcaaatgggacgcagttgctcctcacgggctggggctcaacggaactttggggcgatacgcccgatatactgcaaaaggcttatctcacgcatgtcgtgtactcgacttgccaggagataatgaacaacgatccgtcgaacggtccatgtcatatctgcacactgacgactggtggacaaggagcctgccatggcgattccggcggtccgctgacgcacaacggagtactctacggtctggtcaattggggttatccctgtgcacttggagttcccgatagtcacgccaacgtgtactattatctggaatggatcagaagcatgatctcgggaccatgtagcaactgtcactgctatgccagtaactatcccagcctgtgatccaaggggacgacgatatgctgagcaagatatacaattttgattaggtaagaatgtacggtgactaacttgtggaaataaaatcaatggcagattaacaataagaaaatcgtgttagtattccttctcagatagtcaggcaatatagatttctatatctacttttgagtgtttacccatattttatggtttattattaatttctatttcataactataatttcatatatgtaagtaaatttgacctttaatttatgagtctatattttcttgttaattgtgttttcaaattaagcctggataagcgaaggcgttcaaaaaaaaagtggagttatttttagatatggtttttttaattccacttgataataaaccacatttcaaaaggccacttttataatagtcttaatttttctttattttcctctgaaatctttctaacaatttactaattcaatttggtaagtaaattagtagtagcatttgttgttgccactgagcttgctgcgaatccagtcgaggtagtagtacacattggcctgcacatcgggcagtccgacaccgcatggtcgtccccaattgaccacacccaccaattggccattgctcaccagcggaccaccggaatcgccgtgacaggcgccctcaccctcgcgcgaaaaggtgcagatgtgacccacacccatgctgctggttcggttgaaggtctcatagcactcatccagaggaacaaggcccacggtcagcttgtgcaggtcctccatggaactcccgtaggccacatcggagccccagcccgtgaggacgatctcttcgccgagttgaaccggtctagttggcaaagcgatcggctgtgtcagctcattgaaggtgatgttctcggtaagcttcaccagggcgatgtcgttatgcatgtaaggctggtcgtacatacagtgtttgtggatctcggcggtgtagtagatcgctccgggctctgcccacttattggtgcccgtgatcacattgaccagggcgggaatgaaattttccacgcagtgtccagcagttatgatccagttttcgtttaggatggcaccaccgcaattatgggagcccactatgggttgcagggacacctggtatggagcaaatccgatctcagcctcctcgccaccctttatcctgccagattgacccgcaggaaaggggccaactatgcgctttgattcacagggatttgggggcttcaccgctaggagaattaaaaggcttagacggagcagcttcatctcgaaggtttgaccaagtactgaacactaaacgttaacttcttcgctatcaaaactttattaactggcccctgcttatcgaggcaattttatcgttgccttataaattagtattttttatggtgcactatgatagtcacagtaaacggaacctttaggattggttggagctgaacccagtgcactttgaattcccactcatgacattgcgtatccaatcacgatagaaataaacactggcatgaacgtcctgaaaacagaaaaaaaattctgattcggttcttagaatctttatgttttccaagaggcatggaaaagtattcttatgaaattcacctacaaaattctgctgttcattgccttaacaaaaacgatttccgatcacttaccggaactcctgttgcgcagggccatccccagttgaccagtcccaccaggtaaccattgctgaccagaggtccaccggaatctccatggcaggcaccttctcccagccgcgaaaaagtgcaaatgtgacccacatcacaatcttcatcgttgctcagcagggctttgcactcgcgatggggaacgtactgaaggtatagaacctgcaaatcgatgggactggtgccccagaggaccgtggatccccaaccagtgaggattacttcatcacccggctgcatgggcaccaagggcaacgggatcggctgagtgcgctcgtcccaagcaattggctcaactaattccaacagggcaatatcattgtgcatctccggattatcgtagttacaatggatatgaatggcttttaggaaatacctgcctcctggttggttatacttattagtgcccgtgacgacaaccagccatggaataaaggcattttcgacacagtgagcggctgtcaggacgaaggtctcgtttattatggcaccaccacaggagtgggcaccggagattccctgcaaggatatctgatagggagcgaagccatcctcagctgcctgaccaccgatgatccgttgatccttgtaaaaccgaccatccgttgagtttcccttgattcgtatggctgttatggatacgagtcccgaaagacccaacaaaataagtaaaaccactgccgacatcttgttactggccctggtcagctaatgaagttttcagtcgtacttgctgccttcttgaccatttatcggaatcagataaaaaatcagtttatggcgcgattgttggaacctttggtcaggccattttgactttcgtatagttcaatcaaaatcgcgaagggtaaaaccagactagctcagtccgcgattgcatttcagccatgtcgcttgcacgtttcctattttatattctcgtgttcagttcactctactgtgacttattggcattggagcacttcattgtgggtggccagaatgcagctgaaggagatgccccctaccaggtgtcgctccaaactcttttgggtagtcacctatgcggtggtgccatcatatcggaccgatggataattacggctggtcactgtgtcaaaggatacccgactagcagacttcaagtggccactggtacaattcgctatgcggaaccaggagctgtttattacccagacgccatctacctgcactgcaactatgacagtcccaagtaccagaatgatattggcctgctccacctgaacgagagcattacctttaacgcactaactcaggcggttgaactacccacatccccttttccaagaggagcttcggagctggttttcaccggatggggatctcagtcagcggcggggtcgttgccatcgcagttgcagcgtgtccagcagcaacacctcaactccccggcttgcgagtccatgatgtctgcctacgaggatctggaactgggaccttgccatatttgtgcttatcgtcaggcaaatattggagcctgccacggagattctggaggtcctctagttcaccagggcaccctggtgggcatactcaacttctttgtaccctgcgcccagggtgtgcctgatatattcatgaatataatgtactaccgcgactggatgcgacaaacgatgagtggcaatggcaaatgtgcacaggtcaaccagcagacaatagatgg

SEQ ID NO: 10886 - DNA, 1542 bp, DROSOPHILA
atgtcggcagtggttttacttattttgttgggtctttcgggactcgtatccataacagccatacgaatcaagggaaactcaacggatggtcggttttacaaggatcaacggatcatcggtggtcaggcagctgaggatggcttcgctccctatcagatatccttgcagggaatctccggtgcccactcctgtggtggtgccataataaacgagaccttcgtcctgacagccgctcactgtgtcgaaaatgcctttattccatggctggttgtcgtcacgggcactaataagtataaccaaccaggaggcaggtatttcctaaaagccattcatatccattgtaactacgataatccggagatgcacaatgatattgccctgttggaattagttgagccaattgcttgggacgagcgcactcagccgatcccgttgcccttggtgcccatgcagccgggtgatgaagtaatcctcactggttggggatccacggtcctctggggcaccagtcccatcgatttgcaggttctataccttcagtacgttccccatcgcgagtgcaaagccctgctgagcaacgatgaagattgtgatgtgggtcacatttgcactttttcgcggctgggagaaggtgcctgccatggagattccggtggacctctggtcagcaatggttacctggtgggactggtcaactggggatggccctgcgcaacaggagttccggacgttcatgccagtgtttatttctatcgtgattggatacgcaatgtcatgacggtgaagcccccaaatccctgtgaatcaaagcgcatagttggcccctttcctgcgggtcaatctggcaggataaagggtggcgaggaggctgagatcggatttgctccataccaggtgtccctgcaacccatagtgggctcccataattgcggtggtgccatcctaaacgaaaactggatcataactgctggacactgcgtggaaaatttcattcccgccctggtcaatgtgatcacgggcaccaataagtgggcagagcccggagcgatctactacaccgccgagatccacaaacactgtatgtacgaccagccttacatgcataacgacatcgccctggtgaagcttaccgagaacatcaccttcaatgagctgacacagccgatcgctttgccaactagaccggttcaactcggcgaagagatcgtcctcacgggctggggctccgatgtggcctacgggagttccatggaggacctgcacaagctgaccgtgggccttgttcctctggatgagtgctatgagaccttcaaccgaaccagcagcatgggtgtgggtcacatctgcaccttttcgcgcgagggtgagggcgcctgtcacggcgattccggtggtccgctggtgagcaatggccaattggtgggtgtggtcaattggggacgaccatgcggtgtcggactgcccgatgtgcaggccaatgtgtactactacctcgactggattcgcagcaagctcagtggcaacaacaaatgctactactaa

SEQ ID NO: 10887 - protein, 513 aa, DROSOPHILA
MSAVVLLILLGLSGLVSITAIRIKGNSTDGRFYKDQRIIGGQAAEDGFAPYQISLQGISGAHSCGGAIINETFVLTAAHCVENAFIPWLVVVTGTNKYNQPGGRYFLKAIHIHCNYDNPEMHNDIALLELVEPIAWDERTQPIPLPLVPMQPGDEVILTGWGSTVLWGTSPIDLQVLYLQYVPHRECKALLSNDEDCDVGHICTFSRLGEGACHGDSGGPLVSNGYLVGLVNWGWPCATGVPDVHASVYFYRDWIRNVMTVKPPNPCESKRIVGPFPAGQSGRIKGGEEAEIGFAPYQVSLQPIVGSHNCGGAILNENWIITAGHCVENFIPALVNVITGTNKWAEPGAIYYTAEIHKHCMYDQPYMHNDIALVKLTENITFNELTQPIALPTRPVQLGEEIVLTGWGSDVAYGSSMEDLHKLTVGLVPLDECYETFNRTSSMGVGHICTFSREGEGACHGDSGGPLVSNGQLVGVVNWGRPCGVGLPDVQANVYYYLDWIRSKLSGNNKCYY

SEQ ID NO: 10888 - DNA, 3483 bp, DROSOPHILA
agcatttccgcccccttgtgccagatttttttgtgttatcaggggattcgcccttatccgggaagcttcagcagcctattcaaattaaatgccaaccgaaagttggcaagcatttgcttagaatttggataaaggagacttctgtgctgggcttagtgtcattttttggaaaccgaatatggcaaatccagtgaagtaaggatttcaaatagttatagatagataatatcactttttagaggaaagtaaagaagtaaagaagaactgtgacaagatatttatccaaaacagacaatgcataactgcaatattaagtatttttccatcatatttatctaaaattaagccacacttcaagtttttaaacagacatttgttctgttgttctgtgaaaggggggaaatcccagtgggttttatggtgggctacctttttcatgaccgtttggtaggcggttatgtagctgttgccctccgcggcggcctccctgctgcccttcagcggaaacttctccatcctgcgatcaggcgatcctacgtggacaatttctttggatagctatccaatattttggattccctttttgcgttgcagtccagcaaagcggcgcagcagcagcgcagttgcagcgcagcgagcgcacgtcactaagtacaaacacacacacgcacaaacaactgttcgtggggcgaatcggcaatgcaatcactttctttccatttcactcgaatcgcggatgtgaactcgatctcatatgcattgggatgacggtcgaacaagtatttgatcgattatatagtacacattacttttgtgaagtgcttacttttgtgtgcgaataatttatttgcgaaccgtcagtgtgaccagaccgggcgagctaatgaaatacagaacgtagtgtatcgaacaagaatcgattgcaaaagtagtcgatatcattcgcgataggtacgatatcccgacgcgatcactttgttcaatgaaaaaaatgcagacgcgcgaattacttgcaaactcaacaccaaacaagtttcaatttcgcctaaaagagaatcatattgttcacatacgctaaagtacaaggctaacgccatgtccgttcaagacgtactatggatcgtactcacggtgcagttgagttttggtcttgcgtattttgaaaacaatcaaaggacgcaggactatgatgtcgataaaaatggttctgtacaccacaaaaactgggtgcgtaacgaaatgatggacagcttgggcttgtactggctcaaatggtggataaacgccaacgaaaatagcatttactttgaagtaactgttcacacacgaggctttgccggcctgggtttctccaaggatggccggctggccagagcggatatggttttgatgtgggtggatgacgccacaggacatccgaacgtcttggactgccatggggcgctgcatccttcaagcggaccgccgctgcaggacgatactcaaaactacgatgtcctagatggcaaacaaaatgggacgcacacaatcctgaagtttaaacgcaaaattgagacctgtgacccattcgatattccactctccgtaagttttcttcgcaatcaattaaatatgaaaataatataaatttacattgcaggctgatacgtttaaggtactgtggtccattggggaaaatgatcctattcatggaaacttggattggcaaggtcagagcagaggcgtgaaagctttgcaattgttttcgccaatgtttacgaaaaatagtcactcgatcgaaggcatccaaaaatgggacataactgtgaacaacgtaacaattgatcggtcaatggatacactatactggtgtaaaatagtgcgactaccagagttaactggcaaacagcatataattggttatgagccgctgctgtctggtaaatacgagaggaatgttgttcaccacatgaccctgtttgagtgtcagtccaagatatactctggatccgatccttcgtcctgggacctttgggttaggagtgccggcacagtgtgcaacagcaacctactgacgccacgcgactgggattcgtgctctacgccagttgcagtttggtccttgggatctgatggacagtttctacctccccacgcagggatcccaatgggcggagcatctggagttagctattatatgctggaaatacactacgataatcccgatggaaaggaatcggtggatcactccggttttcgaatacactacacacccaatctgcgaacctacgattccggaattctaataagtggtgtttccatttcggaaacgcaactcattccgcctggtcaaaagaagtatcgatccgtcggcatttgtgggccgtcttgttcaagcgtcatgttcccaaaggatggtattaaaataatatccggaacgttgcactcacatcaagctggtcgcacaattagtcttcgacatgttcgatctggtaaggagttgaatccgatcattgttgacgaaaactacgattacaggcaccaaaaagtccatcagcttgccaatgaaacggtcgtattgccaggggattacctaattacagactgttcctatgagacaaagtacagaaaacgacccacattcgggggctattccacgaaggaggaaatgtgtctcacctttattacttattacccaaagattgagatgtccggatgttatagtatgacaccagtgcgtgagtttttcgagatgttccgtgtgtaccaattctattccttaaatatgaccgatgtcgagaacatgtttctctacaacagtgactacaccgactacagtaaacaggcgaagaatgcgacaaacaaaccaaattccggaaaaacgtccaaagaagacgtcatctaccaggagtctttgttaaacaagcttgttatatccgacccagccgaatttcacgatcgcacatttctatcgcatttaaatcagttgccttggcatgatcctctctttacgaaacgtgttgaacaagcatttataaccggaacacatatgacgttttgtcgcgtatccaaggattcattatcaattccttcggaaataattcgctatcccgagtttacagcgtacgtgaagccaccggcagcttgtttgaattatttgttcactgataatgaagaacttcgttcgggaagttcacaattttttacagactttacgttaagtcttttattactcattcagctcgggttgcaaacgacattattgtaaaataaaagtgcgtttgaaagtattatttaagccatccaaaacgttttcagtgaaaatgctagcttaccaaatgaacgattatcaaatattcaaaattattctcgtaatatgaaacatgaaaatatatcaaatcgatataaactaggtactaacataaagtaatatacattttatagagatttaaggtgcttttaagaactttttaatttaattttaatttaagaacttttaaattg

SEQ ID NO: 10889 - DNA, 1172 bp, DROSOPHILA
cgcgaattacttgcaaactcaacaccaaacaagtttcaatttcgcctaaaagagaatcatattgttcacatacgctaaagtacaaggctaacgccatgtccgttcaagacgtactatggatcgtactcacggtgcagttgagttttggtcttgcgtattttgaaaacaatcaaaggacgcaggactatgatgtcgataaaaatggttctgtacaccacaaaaactgggtgcgtaacgaaatgatggacagcttgggcttgtactggctcaaatggtggataaacgccaacgaaaatagcatttactttgaagtaactgttcacacacgaggctttgccggcctgggtttctccaaggatggccggctggccagagcggatatggttttgatgtgggtggatgacgccacaggacatccgaacgtcttggactgccatggggcgctgcatccttcaagcggaccgccgctgcaggacgatactcaaaactacgatgtcctagatggcaaacaaaatgggacgcacacaatcctgaagtttaaacgcaaaattgagacctgtgacccattcgatattccactctccgctgatacgtttaaggtactgtggtccattggggaaaatgatcctattcatggaaacttggattggcaagagttaactggcaaacagcatataattggttatgagccgctgctgtctggtaaatacgagaggaatgttgttcaccacatgaccctgtttgagtgtcagtccaagatatactctggatccgatccttcgtcctgggacctttgggttaggagtgccggcacagtgtgcaacagcaacctactgacgccacgcgactgggattcgtgctctacgccagttgcagtttggtccttgggatctgatggacagtttctacctccccacgcagggatcccaatgggcggagcatctggagttagctattatatgctggaaatacactacgataatcccgatggaaaggaatcggtggatcactccggttttcgaatacactacacacccaatctgcgaacctacgattccggaattctaataagtggtgtttccatttcggaaacgcaactcattccgcctggtcaaaagaagtatcgatccgtcggcattttcttcgacatgttcgatctggtaaggagttga

SEQ ID NO: 10890 - protein, 309 aa, DROSOPHILA
MDSLGLYWLKWWINANENSIYFEVTVHTRGFAGLGFSKDGRLARADMVLMWVDDATGHPNVLDCHGALHPSSGPPLQDDTQNYDVLDGKQNGTHTILKFKRKIETCDPFDIPLSADTFKVLWSIGENDPIHGNLDWQELTGKQHIIGYEPLLSGKYERNVVHHMTLFECQSKIYSGSDPSSWDLWVRSAGTVCNSNLLTPRDWDSCSTPVAVWSLGSDGQFLPPHAGIPMGGASGVSYYMLEIHYDNPDGKESVDHSGFRIHYTPNLRTYDSGILISGVSISETQLIPPGQKKYRSVGIFFDMFDLVRS

SEQ ID NO: 10891 - DNA, 3576 bp, DROSOPHILA
cttggcttgtggcattcccaaatatatttcccgcactcagcgtgggctttccaaaaatggatgcagatgtattggcggcagccggagctgctgcagcgaagggattactggactgctgaggggcagccgacacagtgccgccctccggcgtctcgtggatcttgatcatcatttccaggacctgcggcgacatctgaagcatggtcttcatcttgttgttagcctctaggacctcacggttaaactgttggctgaactgttcgaattggttttgtcgtttggcctcgtaacacatgaaccgcacctcctcgaaggattggtcctgaataaagttggggaaattcgctttgtccttaaagggtccgtaggcggacaaaggccacatcttgccattgaggctggattccatgtcggctttgagatattgcctaaaataattaagttattagttcatctgcatagttttaatatcaatgtactcacttaacatcgaaatgctcgttgttgcactttgcgccatagcggcaggagccttgttgaaagaaccggcagacaaccatatttaaatttgattttaatttttgcctatttcctatatttattatttcaaaactgcttcaacttttgtacttttgtttataattgtcttactttgcgtattgagtattctttgagtattttatggctcactgagaaaaatataccgtgcctatgcgcgcaatttcgtgaattcgtaacttaagttcgctgaatgattaagataattttgtaagcaaacatatttaagatgaaaactggtttttgaaaatatagttccttgtaaattatacattaagtgcgaatatatctgaaaaatattggtttcttgcacagatgctattcatttttcatatgttcaaagaaattcagaaacttgcttctgcataatcgaatcagataattttaaagtgaattccggagtcctttggtatatctcgtgccgccgaatacggtcccactgattgtgaaatccgtgataacgaattttaacaccagaatttctaggattccatcagaatgcaaaaagtgctgggacgcatccaggcgcaggtcctccgctcccgggcgacgaatgcattagccaatgtggttagacacgaggccacctcctccaggacagcggctaaaccagccgccacatccaaaggtaagcggatcctccaagatgcacagttaccgcttaccaaaatcgtattcgttcgtagaattccgggagagacaggtgcgattcaacataaagaacgaacagaccgagggtagaccactttacctggatgcccaggccaccactccaatggacccacgtgtattggacgctatgctcccctatctgaccaatttctacggaaatccccactcccgtacccacgcctacggttgggaaacagagtccgctgtagaaaaggcccgcgagcaggtggccaccctgattggcgccgatcccaaggagatcatcttcacatccggcgccaccgagtcgaataatatcgcagtaaagggtgttgcccgtttctacggcactaagaagcgacacgtgatcaccacccagacggagcacaagtgcgtgctggactcttgtcgtgctttagagaacgagggctttaaagtcacgtacctgccagtgctggccaacggactcatcgacctccagcaactggaggaaaccatcacatcggagacctcgctggtgtccattatgacggtgaataacgaaatcggcgtacggcaacccgtcgatgagattggcaaactgtgccggtctcgccgagtattctttcacacggatgccgctcaggcggtgggaaaggtcccgctggacgttaacgccatgaacattgacctgatgtctatatccggccacaaaatctacggcccaaagggtgtaggcgccctgtatgtccgacgaaggccgagggttcgcctcgagcccatccaaagtggcggcggccaggagcgtggcctaaggagcggaacggttccagccccgctcgccgtgggattgggagctgctgcggaactttctttgcgtgagatggactacgacaagaaatgggtggactttctatccaatcgcctgctggacaggatttcaagtgccttgccgcatgtcatcaggaatggtgatgccaaagccacatacaatggttgcctgaatttgtcgtttgcctatgtcgagggcgagtcactactgatggctcttaaggacgtggccctgagcagtgggtccgcctgcacctccgcctccctggagccctcctatgttctgcgtgccatcggcaccgacgaggatcttgcccacagctccatacgctttggcatcgggcgctttaccaccgtcgaggaggtggactacaccgccgataagtgcatcaagcatgtggagcgactgcgcgagatgtcgccgctgtgggagatggtccaagagggcatcgacctaaagaccatccaatggtcgcagcattaatgtactaatatttaagccgttactgttacaccacactttgaaagcgaagggaaaataaatttgttggaagagtatctaggtttatttgtacacaaaaccacttataactaagcttagtccgaacgaatgtgcttgtgtaagaggtgaggcaagagagaccccaaaaagcgaaaacggctcaaagtgcgacggccaatgatatgcaaatgatgcaataatttgcattcgccgctggtcaaggttcagttggccttcttctggggtgagccgctggatccaccgcccaggatcttacggcgctgggcgaacatgtgcaagtacaactgcgggaagatggggatgtagccgagcatgacgatccacaggaatccaaaatacgagaaggtggcgttccacttgttgggcatcaccacactccacacgctgttctcacgggcatagctctgggcccaccagaagcacagcagctccccagtcacgccgatgggatacaggacaatgaatgtggtgtagcgcaggaacaccacaaaatgcggcaccaccttgacgatgttcagagcgtaatatccatatcggatgatctcagtgatggcccaggccagcagggcgatgggcagaccgggtgaaacctttccagtaggcgtggccatcaccacgccgacgaccaccatcatgcggctgaacacctggaagccagtgaccaccgggttcgacttgaccaatccaaaagaagcattgagtatctccacgaacgcggcattctggaagatgatcacggccagccgagtatactcccacaacgtcacctgggcacggaactccggaccctgcaatatgtagtagttgaccagctgccacaggatgtagctccatccgaccacctggccggcgttgtacgcaaacaggtacaatttagtgaccgccgacggctccttggaagcgcctggtttgctggacttggacactgcctttgctgacatgttggagcggagatgtgtgaactttcaccttgccgatcgccgctggttaactaatcagtcgtcacagtcttatcgccctgtagcgcgataatt

SEQ ID NO: 10892 - DNA, 1518 bp, DROSOPHILA
attgtgaaatccgtgataacgaattttaacaccagaatttctaggattccatcagaatgcaaaaagtgctgggacgcatccaggcgcaggtcctccgctcccgggcgacgaatgcattagccaatgtggttagacacgaggccacctcctccaggacagcggctaaaccagccgccacatccaaagaattccgggagagacaggtgcgattcaacataaagaacgaacagaccgagggtagaccactttacctggatgcccaggccaccactccaatggacccacgtgtattggacgctatgctcccctatctgaccaatttctacggaaatccccactcccgtacccacgcctacggttgggaaacagagtccgctgtagaaaaggcccgcgagcaggtggccaccctgattggcgccgatcccaaggagatcatcttcacatccggcgccaccgagtcgaataatatcgcagtaaagggtgttgcccgtttctacggcactaagaagcgacacgtgatcaccacccagacggagcacaagtgcgtgctggactcttgtcgtgctttagagaacgagggctttaaagtcacgtacctgccagtgctggccaacggactcatcgacctccagcaactggaggaaaccatcacatcggagacctcgctggtgtccattatgacggtgaataacgaaatcggcgtacggcaacccgtcgatgagattggcaaactgtgccggtctcgccgagtattctttcacacggatgccgctcaggcggtgggaaaggtcccgctggacgttaacgccatgaacattgacctgatgtctatatccggccacaaaatctacggcccaaagggtgtaggcgccctgtatgtccgacgaaggccgagggttcgcctcgagcccatccaaagtggcggcggccaggagcgtggcctaaggagcggaacggttccagccccgctcgccgtgggattgggagctgctgcggaactttctttgcgtgagatggactacgacaagaaatgggtggactttctatccaatcgcctgctggacaggatttcaagtgccttgccgcatgtcatcaggaatggtgatgccaaagccacatacaatggttgcctgaatttgtcgtttgcctatgtcgagggcgagtcactactgatggctcttaaggacgtggccctgagcagtgggtccgcctgcacctccgcctccctggagccctcctatgttctgcgtgccatcggcaccgacgaggatcttgcccacagctccatacgctttggcatcgggcgctttaccaccgtcgaggaggtggactacaccgccgataagtgcatcaagcatgtggagcgactgcgcgagatgtcgccgctgtgggagatggtccaagagggcatcgacctaaagaccatccaatggtcgcagcattaatgtactaatatttaagccgttactgttacaccacactttgaaagcgaagggaaaataaatttgttggaagagt

SEQ ID NO: 10893 - protein, 462 aa, DROSOPHILA
MQKVLGRIQAQVLRSRATNALANVVRHEATSSRTAAKPAATSKEFRERQVRFNIKNEQTEGRPLYLDAQATTPMDPRVLDAMLPYLTNFYGNPHSRTHAYGWETESAVEKAREQVATLIGADPKEIIFTSGATESNNIAVKGVARFYGTKKRHVITTQTEHKCVLDSCRALENEGFKVTYLPVLANGLIDLQQLEETITSETSLVSIMTVNNEIGVRQPVDEIGKLCRSRRVFFHTDAAQAVGKVPLDVNAMNIDLMSISGHKIYGPKGVGALYVRRRPRVRLEPIQSGGGQERGLRSGTVPAPLAVGLGAAAELSLREMDYDKKWVDFLSNRLLDRISSALPHVIRNGDAKATYNGCLNLSFAYVEGESLLMALKDVALSSGSACTSASLEPSYVLRAIGTDEDLAHSSIRFGIGRFTTVEEVDYTADKCIKHVERLREMSPLWEMVQEGIDLKTIQWSQH

SEQ ID NO: 10894 - DNA, 4529 bp, DROSOPHILA
acacttcattttggctcaaatatcttgaaatatttgtttcaattaattgtaataattgtaatttgtagtgttgtgttgtgttcaacttccgtaagcggaatgcccactttttggcaccaaaatcgcttttatagcgctgtgcaaaatttccttatctctcgaagagtttcttttaaatattttttgcgataagcgtctcagttcgggggaagcttcgataatgacaatttccatagcccgtatatagtaacctgatagggggaattctatagccatttggactgagagtgatagacaactagcacacgaccgtaataatattactcatacgcaacgggggcggactttgtgctaactcgagttgtgctaggcagatcttcagacgtcgtcggttgatagggtcgtaatcggatggaagtttacttgaaattcacctggaataatagcgaaatgattgaaggcccattgaagatactgaagtcggcatacccttagggtaggcaagttaaaggaatagataggacaatcttcaacaaatattaaaggatttataaaaataaattagataacttcgatatggaaacctacttacttattacttattttgttttttatcaaacactaaaaaagtatatattgtatagacatagttctgtgtgtcatggtttggtagtgtattatattgtttctgaaaaaccagttcatttttatggcttcaatgaaattttgacgttttacttatcacccgcaattacaacaattggcagacgtctggacgagggattatcaagatttcaagttaatcaattgtttcacatactggattttggactttgacataatttaggagacaatgtatcttttggaacatccgtaataaactaggtaatataaaaatgttcgtctggcgatattgaaaatgcgtaccacaatttttacagtattttattgaataaagttatttttccaggataaaagtaattgatacgaatttttgcacttaggaaatagcacatccgttaatcgttgatataatccagctgtagtaaaagctaatgcgggcaaaaacatcgggaaatccatagccgcacggaacgccccagttaccaacgcccaccaagcgaccacgactgtcaacgatgggtcctccggtatctccatgacatgctccggctcccacctttcccacggcacaaaggtgacccacatccagatctggagtaccgccgtacgtggcattgcacttttccggcgcgacataggttacatccaactgctgcagctgccatgagaaatctcctccgatctccgtgctgccgtatccgtacatggttagcgtttcaccatcggtcaaatcctccaacggagcgattgtgatattctgagtgacatcatcgtaatcgaatagtgcatgcgtcttgatcagggcaatgtcattatggtacatggggctgtcgaagttgcagtgcatgacgatatcctccacggagtatatccagccctccgatccccagtgattataggtggtggtcaccacctgcacgttgttctttcgcaatccagccaggcaactagccgcggtgatgacccactgatcgtggataatggagccggcacaaaagtggttacttaaaagagttgcataattcactatttagacttcaaaataaaatgttacttaagacactaaaaaaatatattgcttaaaaaaatagtataatttctgtggtaatacgttagtaattgttaccaatagggaaactaggataacataaataaggataagttaattacccataggcgttttggagcgagactagatagggtgccgccaggacatcggattcttctcctccgacgattcgggagctaaatttattcgcggtttcggatttttctgaagtgaaggcccgacggcgtaaacttgcctccgaaaaggataacgccaacaggacgaggacgagtgtagaaaccgctccggtttggtaagacatcttggacgaacagctgaagttggactaattgcaaagcagtgcagctaaaaagaaactaagctccaataaacgatattcagtatacgatattagatatttggcgtgatattaatgagccgccataaaggtattgcaatctcaatcatggtcagcctgaacaaaacccacaaattctcccctcgtaaaaatcccatatctttttataaatcagcaaatcaacacaaatcatgttgccagtacatacacttgggtaaaaaatgaaaaatgttcagttacataaggtaacaaattgttagataaggttattttaattaaaatctatgataaaggctatatatgcttaattcagaacgttaaccaaaaaaaatatttttttaaacaccaaccctgaaacaaataattttaagcaagtagaactgagcttaaatatcccatacttaaaaatactttgcccagaaataactgagattcgaaaacgtattagtgataagaaaaaatatacattctttaatgattaaatcatatttaatagtgcttttaaaatatatttgtcatatttaaaatctctggccgcatgatgagccgcatttctctcagtgcacagatacgaggtacccatgactaggcgatcgtacatccattcatggtggtgcggatccaatcgtggtagaaggcagtacgcgcatacacatcctagtggataataataggtggcaataaatacatatattactcttcgatataggcggaatacttaccggatagccacgtccgcatggcacaccccaattaccgatgcctaccaagcgctgctgctcatcgataagcggtccgccagtgtcgccatggcaggcgccctggcccgcgtccatttggacacacacatgacccaggtccacatcatcttggttctgcaacttctcccggcatgcgtccaccggcagatatgtgccggatgcctcctgcagatagcgaccataggtgcccatggcctcggagctgccccaaccggcaaaggtcaacttatccccctcttccaattcatcgatatccgccaaggttatattctttgtcacatcgttgaactcgattttggacgacaactgcagcagggctatgtcattgtgatacagcggcttgtcgaagttgcagtgcacatggatctggctcacagtgtagtacggagcatacagatcccaccagtccacagttccagtcacaaccagcagatttaatggcctcaatcccgccacgcaactggccgctgtgagcacccaagtttcgtcgagtatgatggctccgcacaagtgatacgagtatgcattttggatacttgctatccagggccagttgccctcggcggcggtggtgccaccgatcacacgaccttggggcacagcttcggtggagcgatgcctctcgatattggccaaacccggaagtggttctcctcgcatcctcatggcttccgttggcccctgaagagccagcagagtcagacccagcagcaccgtaagattccacctatttgtcatggttggtatatgcgcggtacaatcgaaactaaaacccctcagccgggccaccttaaaattacacttcataggacggatcttatcgcccagtttggtcgaattttggataataggcagtttatgggtctggacacggcgataagtggcatatgcggcattgcggccgtggtcattatgagctgactcgctagttcgaccggtgcatttatagagtgccgagatttgccgtgtcacacaagtccatgggtttatgagcaaccaggtccaattggacgttccgcctttaccgattgggttttatccttgcagccgtaaagatacctgactgcgaatggccataaagattgctggccagtggtcagttggccgcgaaaaaacccaagtgagccaactcccgatgtgcgataaaataggtttatatggaatgcatataaaaacgctcagttgggtcatacaattttccattgctggtcattaattcgcgctgtccggcattgtccctcgtctcggaaatatttgttttggatgatggctgtccgtttgtctctgatttggctgcttctgctgggcacttccattgacgtcacgcgcggaaagcgtttggacaatcgtaaacttttggacaatcgcattgtgggtggccaggaggcggaggacggagtggcaccttatcaggtgtccattcagaccatctggaaaacccacatctgcagcggagtcattctcaacgaacagtggatcctcaccgcgggtcattgtgcactggactttagcatcgaggatctaaggattatagtgggcacgaatgatcgtctggagccaggacagaccttatttccggacgaggccctagtccattgcttgtacgacataccctatgtctacaataatgacatagcgttgatccatgtcaacgagtcgattatattcaatgatcgcacccagatcgttgagttgagccgagagcaacctccggcgggttccacggtcactctgacgg

SEQ ID NO: 10895 - DNA, 1629 bp, DROSOPHILA
atgacaaataggtggaatcttacggtgctgctgggtctgactctgctggctcttcaggggccaacggaagccatgaggatgcgaggagaaccacttccgggtttggccaatatcgagaggcatcgctccaccgaagctgtgccccaaggtcgtgtgatcggtggcaccaccgccgccgagggcaactggccctggatagcaagtatccaaaatgcatactcgtatcacttgtgcggagccatcatactcgacgaaacttgggtgctcacagcggccagttgcgtggcgggattgaggccattaaatctgctggttgtgactggaactgtggactggtgggatctgtatgctccgtactacactgtgagccagatccatgtgcactgcaacttcgacaagccgctgtatcacaatgacatagccctgctgcagttgtcgtccaaaatcgagttcaacgatgtgacaaagaatataaccttggcggatatcgatgaattggaagagggggataagttgacctttgccggttggggcagctccgaggccatgggcacctatggtcgctatctgcaggaggcatccggcacatatctgccggtggacgcatgccgggagaagttgcagaaccaagatgatgtggacctgggtcatgtgtgtgtccaaatggacgcgggccagggcgcctgccatggcgacactggcggaccgcttatcgatgagcagcagcgcttggtaggcatcggtaattggggtgtgccatgcggacgtggctatccgtccaacttcagctgttcgtccaagatgtcttaccaaaccggagcggtttctacactcgtcctcgtcctgttggcgttatccttttcggaggcaagtttacgccgtcgggccttcacttcagaaaaatccgaaaccgcgaataaatttagctcccgaatcgtcggaggagaagaatccgatgtcctggcggcaccctatctagtctcgctccaaaacgcctatggtaaccacttttgtgccggctccattatccacgatcagtgggtcatcaccgcggctagttgcctggctggattgcgaaagaacaacgtgcaggtggtgaccaccacctataatcactggggatcggagggctggatatactccgtggaggatatcgtcatgcactgcaacttcgacagccccatgtaccataatgacattgccctgatcaagacgcatgcactattcgattacgatgatgtcactcagaatatcacaatcgctccgttggaggatttgaccgatggtgaaacgctaaccatgtacggatacggcagcacggagatcggaggagatttctcatggcagctgcagcagttggatgtaacctatgtcgcgccggaaaagtgcaatgccacgtacggcggtactccagatctggatgtgggtcacctttgtgccgtgggaaaggtgggagccggagcatgtcatggagataccggaggacccatcgttgacagtcgtggtcgcttggtgggcgttggtaactggggcgttccgtgcggctatggatttcccgatgtttttgcccgcattagcttttactacagctggattatatcaacgattaacggatgtgctatttcctaa

SEQ ID NO: 10896 - protein, 542 aa, DROSOPHILA
MTNRWNLTVLLGLTLLALQGPTEAMRMRGEPLPGLANIERHRSTEAVPQGRVIGGTTAAEGNWPWIASIQNAYSYHLCGAIILDETWVLTAASCVAGLRPLNLLVVTGTVDWWDLYAPYYTVSQIHVHCNFDKPLYHNDIALLQLSSKIEFNDVTKNITLADIDELEEGDKLTFAGWGSSEAMGTYGRYLQEASGTYLPVDACREKLQNQDDVDLGHVCVQMDAGQGACHGDTGGPLIDEQQRLVGIGNWGVPCGRGYPSNFSCSSKMSYQTGAVSTLVLVLLALSFSEASLRRRAFTSEKSETANKFSSRIVGGEESDVLAAPYLVSLQNAYGNHFCAGSIIHDQWVITAASCLAGLRKNNVQVVTTTYNHWGSEGWIYSVEDIVMHCNFDSPMYHNDIALIKTHALFDYDDVTQNITIAPLEDLTDGETLTMYGYGSTEIGGDFSWQLQQLDVTYVAPEKCNATYGGTPDLDVGHLCAVGKVGAGACHGDTGGPIVDSRGRLVGVGNWGVPCGYGFPDVFARISFYYSWIISTINGCAIS

SEQ ID NO: 10897 - DNA, 4983 bp, DROSOPHILA
tatctccatcttcaccatataaataagcgaaatgctcgcaggcgagtcctcgccagaaatcccatgtgtatcaactgtctcccatgtctattgtacttcatcaggtgctctggtgtgtctcgtaacccggcacatgttgaagtacactcaatatgaggcgatttgcatacgaaagcgaccgatacaagtgttcaacaaattgcctaatttaaagatgagtaaaatataaaagtactctttttattaagtttttcttaaaaataaaattatggcttcttaaaactgtgttactttactttaattggaatcatatctttcacaaagggaacaacaaaaaatgattattgttataatcattatatttaatttaatgaaacgaaaaaacatctgttaatgtgactagaaaaaatttcaataatatattgtctgatttattcagtcgtccagttttgtatttttttccatgcgagctcctcaaatttccaaacaggttgtgggctttggtataaaaatagattgtttatgctccggaataaataataacaaaccgtccatcatctataatgacattttatttgcgtatataatttcagagaatattctacataagaaagtattaattgaatgaactacatatacatatttagatagacaaaaacattcttaaaatatgagctatttatatataagcattttcgtaattagtgaatagtgtgcatggtgcataacaaactatcgaatgtctacaagcacgagtaaagtgtgaccagacgcctcaccgcactcattcccatgcaccattttgtaaaaaagccaaatttccaattggaaaattaaaacatctttttaatatcgttgctttaaaaaaaatcaattgaatttaaaacggaaatgaaaataagaattcagcaaaagatttcgaggtaactaacaacaacttcataaattgctgggtcatatgaaaaaatatcacaaaggagaatctcctttcaaaacactgtgatacctctgtcaaacatttcgtgtacgttttttgaaaataaattcgctgaaccgctaaaaaaagtgatggtatgtttcggtatattgaataccgcttgcacattttttggcgttccgtctgcgttcacactgacctccgtaaggttatcggcataattttgtaaattttcgactttgccgtttttcgactcgattcgttagtcaaaattccgaaagacgcgccgccgttagatccacttcatcaacgcgcgttgccacaacaggacttggattaggattccccaggcagaccaacgataaaggacgaatatgctgcgctcccttgcaacaacacgaaacgaacttggggcccttcgctccgtgctcctgcgatcgaataacgccacctatgtccgccgatcgacgggaaatgtggttgtgcgcgccctcagcagccagctgatcaactcccggaaactccagagcatcaggtaaaaatctcccaatttccccaattctccccgctttcgttgaggttagaaatggttgtgtaatattgcaaaatgcgtatactgcagcgggattatgtgggacctgtggggggcgatgattgacagtcccgtgtccaactatttagcatatatgtcgtattccccaaaaacactctcacacatacccatgcgatttgcgtgtgttgtgcgtgctccactgctgatttggtttatggccaaggtcgaatacacgctctcctatatcgcatgatgcgtgatagtgtttcggctggctgataagctagaaaattccgtctaatgatttaatgggtcactctttttgggttccattgtttacatctgacgagtgggcgattgaacgcctaaatgtgtagatagtacaggagtgtgggtacgtaaacaacaacaaactaacagctgatcgagcgtccataaattaacccatccaaaatgctttcattaacatggtcattttgtaattataacaggtcatacaaaatgtacaccgttacgaatcagaaggaaaaatagtttccaaggattctgtatacccatattgcaagtaatacacctatactatttattcaatattatgttttctaatagtggatacaacccaatgcaaccaactttaataaactagttttgtttgaatatcgcgcaggtcgaaacttaacactagccagtcaccggtcacatggagctacaacttcgcccgtgcctatgccaaccttccggaacacatcagggtgccactgcccgcactttccccgactatggagcgcggatcgattgtcagctgggagaagaaggagggcgataagctcaacgaaggtacgtgtgatagttaccaaaatatccgagtttcaggatcaaatttatgacaccctgattgcaggtgacttgctgtgcgagattgagacggataaggccaccatgggctttgagacgcccgaggagggctttctggctaagattctcatccagggcggcaccaaggacgttcccgttggccagctgctgtgcattatcgtgccggaccaaggcagcgtagctgctttcgcgaacttcaaggacgacggtgccgccgcagcaccagctgctccggcagcagctccagctccagcaccggcagcagcagcagctccgccaccaccaccaccacccgccgcagctccagcagccgctgcgcctccaccagctcccgccgctgctccagctgcagcaggtacgggccgtgtatatgccagtcccatggccaagcgactagccgaggcacaacagctgcgtctacaaggttgtttaatcctaactaatgcctctcttacacacatcctgttccatttcgcaatgcatgcatcacctgactaacatccatcataatcattcgttacagataacaaaacctcccatatacactatccaaccgtacagcttttcatatagcgccctttgtccaattgttccgttactaatccgcggcttttgtgtgcaggcaagggcagtggagtccatggctcaattaaatctggtgatcttgcaggccagaaagcagcagccaagccagctgctgcggcacctgccaaggcccccagggcagctggagcgcgctacgaggacattccggtgaccaacatgcgcgcagtgattgccaaacgtctgctggagtccaagacacaactgcctcactactacgtcaccgtgcaatgccaagtggataaggtgggttatcacgaacagatatacttcttaattcaaatttaatttaaatgaaatttttacagctgctgaagttccgcgcgaaggtgaacaagaagtacgagaagcagggtgcccgcgtctctgtaaacgacttcattatcaaggccgtggccattgccagtcttaaggttcccgaagcgaactccgcctggatggacacagtaattcgcaagtacgacgacgtcgatgtttcggttgctgtctccacagacaagggtctgattaccccgattgttttcaatgccgaccgcaagggtgtcctggagatctctaaggatgtcaaggcgctggcagccaaggcgcgcgacaacaaacttcagccccacgaattccagggtggcaccatctcggtttctaatctgggcatgttcggtatgggaaatacagttatataaagcctggtccaaatttggtaattaatatgttatcctaccacaggtgtgaaccagtttgccgctgtcatcaaccctcctcaatcgtgcatccttgccattggcaccacaacgaaacagttggttgctgatcccgacagtctcaaggggtaagtttcaaataaggagaatagtacactaactaatataatctttttttctatgcagcttcaaggaggtcaacatgctgacggtcaccctgagtgctgatcatcgtgttgtggatggtgctgttgctgccaggtggctgcagcacttccgcgactacatggaggatccttccaatatggtattgtaagcggacagaaacgacccatcacatttagagactccaacgaaaacaaaaaaaggataacaaatttagcatcctctctttaagcgaggagtttcaatcgacatgcaatatgtggatatgtggtttctaatcggtgtcacatatgtaaagttttaaattggatttaactcatcggtcgcctatatatatatatatatagaaattaaattgtgtaattattgatgtagttattgatggtcaccgtcgttgccatgattgtagaagagtacacaaaatacttgaatgatattcgaattaacccactcaccgagctgtaaatttccgtttgatatgcaaaacgttttttatgctttgttcgcatatgttgatcatgatcgagtatgaaaatggaagtagttgaaagtccaaagacgcgttaaataaacccaaaacactcacatgaactagccaattcttaaataaaattgacttttattttaattatagtgtgtttcagcctaaattcaaaccacgatgcctccaaatttaaaacattatctgatgggtgttgcatatatcaacttttaagctttctagacagtagctagagtaacaaaactctattcagctcaaatttaatgctctcaacacccagtcgaaaaataatatacattgcttttccgtggtttatagtattatgtaactagtttattgccaaaatgttacgaactaagcaaacacatattgaaagtatttacaagcataaagttaagctaatgtcaatgtaggatgcgaatgtcagtgtagtattgaaatggggccaatcaccactgggcagggccaagctggctccactcctccacatactgggcctgctgctccagagcggggaaccactcgacgccaccgtagtcgatcgcgggcagagtacccttgtagttggcgggcaggacggaggggtcgaggaacttctgcaacgacttcatgtcactgccgtggaagtgcatctgttggaagaaaatta

SEQ ID NO: 10898 - DNA, 1850 bp, DROSOPHILA
tgatacctctgtcaaacatttcgtgtacgttttttgaaaataaattcgctgaaccgctaaaaaaagtgatggtatgtttcggtatattgaataccgcttgcacattttttggcgttccgtctgcgttcacactgacctccgtaaggttatcggcataattttgtaaattttcgactttgccgtttttcgactcgattcgttagtcaaaattccgaaagacgcgccgccgttagatccacttcatcaacgcgcgttgccacaacaggacttggattaggattccccaggcagaccaacgataaaggacgaatatgctgcgctcccttgcaacaacacgaaacgaacttggggcccttcgctccgtgctcctgcgatcgaataacgccacctatgtccgccgatcgacgggaaatgtggttgtgcgcgccctcagcagccagctgatcaactcccggaaactccagagcatcaggtcgaaacttaacactagccagtcaccggtcacatggagctacaacttcgcccgtgcctatgccaaccttccggaacacatcagggtgccactgcccgcactttccccgactatggagcgcggatcgattgtcagctgggagaagaaggagggcgataagctcaacgaaggtgacttgctgtgcgagattgagacggataaggccaccatgggctttgagacgcccgaggagggctttctggctaagattctcatccagggcggcaccaaggacgttcccgttggccagctgctgtgcattatcgtgccggaccaaggcagcgtagctgctttcgcgaacttcaaggacgacggtgccgccgcagcaccagctgctccggcagcagctccagctccagcaccggcagcagcagcagctccgccaccaccaccaccacccgccgcagctccagcagccgctgcgcctccaccagctcccgccgctgctccagctgcagcaggtacgggccgtgtatatgccagtcccatggccaagcgactagccgaggcacaacagctgcgtctacaaggcaagggcagtggagtccatggctcaattaaatctggtgatcttgcaggccagaaagcagcagccaagccagctgctgcggcacctgccaaggcccccagggcagctggagcgcgctacgaggacattccggtgaccaacatgcgcgcagtgattgccaaacgtctgctggagtccaagacacaactgcctcactactacgtcaccgtgcaatgccaagtggataagctgctgaagttccgcgcgaaggtgaacaagaagtacgagaagcagggtgcccgcgtctctgtaaacgacttcattatcaaggccgtggccattgccagtcttaaggttcccgaagcgaactccgcctggatggacacagtaattcgcaagtacgacgacgtcgatgtttcggttgctgtctccacagacaagggtctgattaccccgattgttttcaatgccgaccgcaagggtgtcctggagatctctaaggatgtcaaggcgctggcagccaaggcgcgcgacaacaaacttcagccccacgaattccagggtggcaccatctcggtttctaatctgggcatgttcggtgtgaaccagtttgccgctgtcatcaaccctcctcaatcgtgcatccttgccattggcaccacaacgaaacagttggttgctgatcccgacagtctcaagggcttcaaggaggtcaacatgctgacggtcaccctgagtgctgatcatcgtgttgtggatggtgctgttgctgccaggtggctgcagcacttccgcgactacatggaggatccttccaatatggtattgtaa

SEQ ID NO: 10899 - protein, 512 aa, DROSOPHILA
MLRSLATTRNELGALRSVLLRSNNATYVRRSTGNVVVRALSSQLINSRKLQSIRSKLNTSQSPVTWSYNFARAYANLPEHIRVPLPALSPTMERGSIVSWEKKEGDKLNEGDLLCEIETDKATMGFETPEEGFLAKILIQGGTKDVPVGQLLCIIVPDQGSVAAFANFKDDGAAAAPAAPAAAPAPAPAAAAAPPPPPPPAAAPAAAAPPPAPAAAPAAAGTGRVYASPMAKRLAEAQQLRLQGKGSGVHGSIKSGDLAGQKAAAKPAAAAPAKAPRAAGARYEDIPVTNMRAVIAKRLLESKTQLPHYYVTVQCQVDKLLKFRAKVNKKYEKQGARVSVNDFIIKAVAIASLKVPEANSAWMDTVIRKYDDVDVSVAVSTDKGLITPIVFNADRKGVLEISKDVKALAAKARDNKLQPHEFQGGTISVSNLGMFGVNQFAAVINPPQSCILAIGTTTKQLVADPDSLKGFKEVNMLTVTLSADHRVVDGAVAARWLQHFRDYMEDPSNMVL

SEQ ID NO: 10900 - DNA, 3319 bp, DROSOPHILA
tgcgacaaacaaaccaaattccggaaaaacgtccaaagaagacgtcatctaccaggagtctttgttaaacaagcttgttatatccgacccagccgaatttcacgatcgcacatttctatcgcatttaaatcagttgccttggcatgatcctctctttacgaaacgtgttgaacaagcatttataaccggaacacatatgacgttttgtcgcgtatccaaggattcattatcaattccttcggaaataattcgctatcccgagtttacagcgtacgtgaagccaccggcagcttgtttgaattatttgttcactgataatgaagaacttcgttcgggaagttcacaattttttacagactttacgttaagtcttttattactcattcagctcgggttgcaaacgacattattgtaaaataaaagtgcgtttgaaagtattatttaagccatccaaaacgttttcagtgaaaatgctagcttaccaaatgaacgattatcaaatattcaaaattattctcgtaatatgaaacatgaaaatatatcaaatcgatataaactaggtactaacataaagtaatatacattttatagagatttaaggtgcttttaagaactttttaatttaattttaatttaagaacttttaaattggatttaaaaattttgcactaaatgtagaaagtaaaaaatacacctccgacttgcaaaccaatcaaataattttctcttaaataagttaaattaccgacaataaaataaggattaacttatatttatgttaaggttttcatatttttgaagatttacagaatgtatgcatcttttcagggatactaatattagcctatattaaaaatgtatgcagttttcaaataaagttaatttttataaatatttaaatttttttgagtgtagttttggtatatttgtaaagtgacctgctgtcagcgaacattccccgtggtatatttcaactcggcccgcacggtcactctgatcaatttgtttacgccgtacagcgcacggattgcagttgggccaacaacaaggcgcgagcataaacagcaataccaacatggccggcttcgtcgcggtgcacacgggtacgtatcttggccatggcggttccgatccgccgggcagacagccagatgattgatgaccgccacttgctctcaggggctgggaactgcatcgacgagacgaagtaccagcgggtgattaaggaggcctgcctgcgcgccacggagatccttcgcaacggcggatccgccgtcgatgcctgcgaggcggccattgtgcggctggagaactgcggctacacaaacgccggctatggctccaatctctgcatggacggctctgtgcagtgcgatgcggctataatggatggctcaacgcttaactttggcgcctgcacgaacgttagtcgggtgaagaaccccatacagttggcgagacgcatctgcgatgcccagtccagtccgcagcttctggagcgcattccaccgatgatcctcgccggcactggagcggaacactatgccgacgaggtgggttgctccatggtggagcccggcgtactgatctcatctaaggccaagttccagtttaatcactacaaaagcaagtacgacctcgtggtcaacagcagattgggcaaggcaacgtccgaggaatccgtacaagtgccggaaccaggaaacgaggtggaacttgccgctgctttggacacagtgggagcggtatgtgttgatggggcagggaacacagcagctggatgtagctccggtggcatactgctcaaagttccgggcagagtggggcaggcggctacttatggtgccggctgttgggccaccgatacggacgaactggccatagccacctgcacaaccggaaacggcgagtacctgatgaaaacgctgctggcccgagagatctgccatggggcatttagcagtgattgtgcggtgaccagtcttcacaagacgttcaagcaaaagttcctggactccccgctgctgccccgacagcaggatctgtacgctggagctctgacgctactctattatccgggccagagcagcggcgaggtgatgtggagccacacgacgcagtcgttctgtgtcggctacatggcaaccaaccagagggtgccaaaggttcgtacacccatccatcattttctgatttcacatataactaattcggcgtatgtgtttatatttgcagtttgtgcattcgccgctgcccacgtacagcgtcccgggccgatcgtgcgtcgtcaatggccataatttccatttgcgcatttaaatgtgggctggccaactagccgcagcccccagcaccttcctgcagctcctagtcccgctgctctgcatctgcaattcatttgatttaatgtttaattgccgcgacaatcgctgccaatgacatatgggagcagaaggcgcctgaggagctgggacagcattatgtgtatatgcttcattctctcggcgaaatattaagataattaagcaaatatttttattgtaaaaatctcgtagatcgtaatgtttgcagtactagtagtagcaatgaaataggatttcgaatatattgtatccctcgtcgaaccgggtgcgctagataaatcagccggcggcatgcgagtctgttcggaatatcatattcgagggggcatatgtttgtatccgtttgtatatttagacttgcgctgccttgtgtgcgcatctgtgtgtttatgtccaagtgtttacggccatcaatgtacagaacttaacccattaatattagctaagcagaagccacagcatgcacacacaatatcaaggtctccactatcgcgagttgtcctcaacatgaaaattgtgaaaatgcttttactttttagcgtaaatcgatttgtacatatgtacatacacatacgcatatgacgcgagattttctaaacgaaacattcatacgtattcatttctccgtttatggggttccagctaataatcctatggtatttcatggcatatagaatgctagacatctcgaggctttttcaaactgcatgcgcaccagcaaaaagtgagttccattagatgatgattaatactgcctaagatcatgatcttcatgttagtcatgtttaaagccagttatatcccaagaacgatttaacaccaatgacgaatttcaaatgtatcgtatttattatttcggacctattaaatgcctatcaaagattgtttacaaatatatatcgctttattattttagaaggtttgtaaaaaccatattattgctttaattagaaaac

SEQ ID NO: 10901 - DNA, 1000 bp, DROSOPHILA
atttgtttacgccgtacagcgcacggattgcagttgggccaacaacaaggcgcgagcataaacagcaataccaacatggccggcttcgtcgcggtgcacacggatggacggctctgtgcagtgcgatgcggctataatggatggctcaacgcttaactttggcgcctgcacgaacgttagtcgggtgaagaaccccatacagttggcgagacgcatctgcgatgcccagtccagtccgcagcttctggagcgcattccaccgatgatcctcgccggcactggagcggaacactatgccgacgaggtgggttgctccatggtggagcccggcgtactgatctcatctaaggccaagttccagtttaatcactacaaaagcaagtacgacctcgtggtcaacagcagattgggcaaggcaacgtccgaggaatccgtacaagtgccggaaccaggaaacgaggtggaacttgccgctgctttggacacagtgggagcggtatgtgttgatggggcagggaacacagcagctggatgtagctccggtggcatactgctcaaagttccgggcagagtggggcaggcggctacttatggtgccggctgttgggccaccgatacggacgaactggccatagccacctgcacaaccggaaacggcgagtacctgatgaaaacgctgctggcccgagagatctgccatggggcatttagcagtgattgtgcggtgaccagtcttcacaagacgttcaagcaaaagttcctggactccccgctgctgccccgacagcaggatctgtacgctggagctctgacgctactctattatccgggccagagcagcggcgaggtgatgtggagccacacgacgcagtcgttctgtgtcggctacatggcaaccaaccagagggtgccaaagtttgtgcattcgccgctgcccacgtacagcgtcccgggccgatcgtgcgtcgtcaatggccataatttccatttgcgcatttaa

SEQ ID NO: 10902 - protein, 298 aa, DROSOPHILA
MDGSVQCDAAIMDGSTLNFGACTNVSRVKNPIQLARRICDAQSSPQLLERIPPMILAGTGAEHYADEVGCSMVEPGVLISSKAKFQFNHYKSKYDLVVNSRLGKATSEESVQVPEPGNEVELAAALDTVGAVCVDGAGNTAAGCSSGGILLKVPGRVGQAATYGAGCWATDTDELAIATCTTGNGEYLMKTLLAREICHGAFSSDCAVTSLHKTFKQKFLDSPLLPRQQDLYAGALTLLYYPGQSSGEVMWSHTTQSFCVGYMATNQRVPKFVHSPLPTYSVPGRSCVVNGHNFHLRI

SEQ ID NO: 10903 - DNA, 6279 bp, DROSOPHILA
tttagcatttttgataagatatgacagatttgaactgcatggactttgcttcaccgcctccaatcatccggtttatataagctctatctgctccggcaagagctattaaaacatgaaaacaacatttttatcgccgtcaattggcaattagctcgcatttgcaataaattcatgcttttgggggcctctgaaaatgcaacatttgtgcatacgttcgaattgacgtcactaaggtttttggtttttaagattagcatgaagagaggtcaaatgaatgttaaatttccagaaaaattattgcgaccaatcacacataccgtcataactacacattattgtgtacggcactttgaatgcatatgtatgcatattcttcacatttgataatcaaatatgcagattattaataataatttgatgatatatactatacgagcgtagcgagaaatcgccggcaagcttaccattttagaatttcacaggtgcaacgctccacggacgaacttcaagtaaaaacgtaaatagggatcgccaattgggaacctgttacttttcacaattattttccagtcactactttttgaataaaagtagccgtgactccaacgcaatatgtttttggcaaaataatcgattatgttgctccttacaaatttactaaatttttaaataatacaaagagttaaggagttctcttattgttattaatatttacagttgccaaaaaaaagtaaatacatatataaataaataaaacgatgataaatgaaaaattaatagaaatatagttattaaattagttaatgtaaacaacaaaattttgcagaaaaagcatcaaatatcatatttctttgcattattcttggtcactttgtttacacatacaaaattagtacctagctatattttcatatctgaaatacgcaaatgcagtcgtgtgaagtgattttttcgcttgctattatcgatagtttgagctgtggaaaaaaatcgaatgtttcttgtggaaaaaattggagtctttaatttggcgaatccattcgtttactttgcgtttatttttagccttagtactttcgtttgatacgtttgctaccaagtatttataaaaattaaaaagcgttcaaaaacacaattaaccattgcaacgtcgtttcatcagctattcagagtgaataaagaaaacctacatcacacctacaatcatacgtgttacgtgtacatacatatgtgtatgtatatatactcttgcttatgtacattaaacatttgccgttttcctttccaaccagccttttgttattgtctaaaaatcgattttcgttacccttttatacgagttcgtgatttgccataattaataaacaataaatcacagctgtggtttggtaaataagtgcagcgtgaacaatgtacgcttatgtacataaacactcgcatatgtgtgcgtatatagtggattaacaaattgctgatgtacacatattaagtgcttttacaatgcatacgcaaatatcgatgcaaattctagtaattttgcttaatacccacacgtatttgcatgtcgccatactcacacacatgttcggttattaaactcttgaaaattgtactttctttttgattgtgttttaaagagagcttccgttttaaatttgagaacttattgatgtacgcaggtagtgcgtatatttccgagctggtttgatttttgttatgaaaaggtatccatatttaaaaatactttttgtgtttgtttgtctgcgttgtaggcatatgcgtgtgtgtgtatatacacaataaaattacctgacggcaaacaccttcttcgggtcgcattaaattgtcttttttcaaaggttgcataaagtcaacaataccacgaatacaatgggcagtatgtaaacaattttgcacaaatcgcaactatcaaaaaaagtgttaaatatggatattaactaaagtggtcagctacaggtgccaaatgtccacaacttgtttttcgtagtgtgcaaaataacggggtgattcatctaataaagatcgcatgccttccttttttttaggtgttttaggtagacaaaatcatatatgcatagtttagaagtacaagacaagggaatattcttcttatttcaatgcaggttcataccaatctgatgaaaatccatcctacaaaagctatccttgagatttaagaatctacacacaaaacttcatcctcccgaatatatatatatatatatattatttatacatataaattttatttactttctacagcttggttctcatcattatcaacaattttataaaaattacaactgcgagtacttcatcactaatcaacaaatcacctgaaaatgaacggcctgagcagcaatgatgatgcagtcgagtgccctttgtgtatggagccgcttgaggtggacgatctgaccttctttccgtgtacctgcggatatcaggtacatactgtcattaaagcacccttatcagcagcgtattcaagtgctattgcttccagatttgccgattctgttggcataggatccgcacggatgagaacaagctgtgtccggcatgccgaaaggagtatcccgagaatccagctgacttcaagccgctgtcgcaggaggaagtatgtcgtggtcacctcgtattcattccactaacttctactcttctttagatgattgccttcaagtcccagaaacgccaaagggaccaacaacgaaaacaaaagatcaccgagaaccgcaaacacttggccaacgttcgcgttgtccaaaagaacttggtgttcgttgtggggctaccgccacgacttgctgatgcagacgtatgttgattttgcgccatagataaccgacagcaaacccactcacaattgccatttcagatattaaagaaacacgagtatttcggtaaatatgggaaaattcataaagtcgttataaatccaagtaccacgtatgccggggtccaggtaagagttgtaagattcaattatttattacctctatacattcatatggcccaatgggccaatacccgagttgcttagtcatttttaggtggtttctatgaaaactttgataatggcacgttttcaatgaaactgaacagatttacgtgtatctaccaaaatttattttcgattaaaatgaatttgaaccttttgttgttagctgctctggtaagcgaacattgtttataacaagaagtttaagtttattttttaaccttttttattaatatatatatgtatttttttattttaggcaaaattgtgtgcgaaatgcaaaaatttcttgttaatttatgattaaatggatcggaatttacgttctgtttccgtgcttatgctaaaaaaatcaacttttgaccaattatgataagagtctattttagaataaccccgattattgtatacaaatcaaaaagcgtaacatttgataaacctgctttctataaaactgcgagggtatcagagttttcggtccaccgaatcgcgtttcacactctgccatcattgcttatttaaattttttcgattttaaagggtccatctgcttctgcgtatgtcacatatgttaataactcggatgccttgcgggccattcaaagcgtcaataatattatgatagacggtcggcttataaagaccagcttggggacaaccaaatactgtagccacttcatgaagaaccagcagtgtcccaagggcgactgcatgtacttacatgaattgggcgatcccgaggccagtttcacaaaggaggtaagttgtgagataactaaatttgtccgtatttaaatgttatgtccggatatttaaaggaaatgcatcagggaaagcacctggagtacgagaagcgcctgcacgatactctaattgcgtcattgggaccgaatgcaacaggtattgtaaatggtaatggagcttctaaagcaaatggtaatttcagccaagctacatactaaatgacttaataatgtttatacccaatcagtcgcgattccatcgtcatcgtcagcgtcatcctcgtcctctggatcgggtacaaatggttcaagtgcatcaggtaatgcccagcaaaaggaggcctggccaagcttatcggtctcgcccatcaatggcaaagaggcggctgccactgcgaccagttccagtgggaaaagtaaacgggaaaagctgcgcaacgagaagaggcacgagaagaacaaggcgaagaataagaacggcagcaatacaaacgccaatgcctcgaacaaggagaactatgttcccgaaacgagaagcagcacaagtactgagacattcgcagaggctacggcggatgcaccggcttccaccaaggcagaaccgccgcaagcctctagcaatagaacgagggcggatcgtggaaaagatcggaccacggctagtgcaaaggagcagaagaagagcaaggaagctgctccagcacctgcagcaagtaaaccggcggagcgggttgaaacaagcgagagtacaataagacaaaagaaggcggaagtaacagaaagctgtgaagataacttaccacaaaagagattagcgggaacaaacgttcaaagatctgtgagctcttgtagcgaaaatagcgaaggacacgtctctgagagtagcttaagtgagaagagtttaactggtgattatgtggaggaaaagtgcaatagtgtgaattcggaaagccagcaagaaagtgtaaagtttcaggaggagctcgaaaagagcaacgaggcaattgtcgaggccgaaacgattctgccaacagctgagtcctctgaggacatcagtcccgctgcagttgcgccaggcaatggagaagtcgaaggatgcttacccgttgttgatccagtcgaaccaccgagtctggcggataatggaagcagagtaacaggtattgtaccttatccatttagtccaccacactttgctaacactttccgttgcagatgcgctatctaagctgaacattttcgatgacacgcctagctttttcacatcgccatcattccagcaagcacccatattaaagaataagctagatttggaaatgcgacagtctcatttacctgacttggtcaacggtaagttacgaatctttgaaaataaagagaattctttaatttattttttctcatttttcggtactgctaaaaaatatcaacgggcttaaacagacattgatggaatccaaaaggcatccaatacaaacggtaatggtttcattattaaagcatgtatttgaattaactcatatttattcttaatttatccatcctttgcataaacagagtgggaggaagccttcaaaaatgtgatgatgggcaacacgcagcacatggaggagcaactgttgcagcagcaacatttgcagcagcatcagaatttgcgccaccagctggtgttgcaacaggaggagttccttcgcatgcaagaattacagaaacgcaacaactttgcgacgcaaatcaacggtcctgcgaatggtaggtgaattcctactgtggtgtactgcaactttaataattgtgtaattaattccttttagatttccttagagcttatgagctcagagctcaagccaatgcaatcattcagcaacaattattacaacagcacgcaggcgaaaatctatttggcggcaacatgtcgaagttcttcgatttccataaaagtcagccgcagtcacaccatcagtatctaaatggacatccgcctcaaatcaatgggaacggtgctgtgccggagccgcaaagagtggcggcctctttggaaagcaatcgactgaattcgccttttgtcgaaaatggtgggacatactttacaatgaaattgctggccagcccgcaataataatatttacgttgttatcctaggacttattaactcgcagcagcagcagcagcagcagcaacagcaacaaaagcagagaatgatgggaatgtatgaatttatggtaatgatttcaaatggatttaaaaagcaacatgctaatatcatatttgtttcgatttccagcctccaaacacgcaatctcagcagaatcggtttacacagaactcgatagtcgacgatgacttaggtaagaccttgtttatatctcacttcaaagccttttcactgattctgcttgttaaaaggattcgacccgttcgttgagacccaaaagggacttgctgaacttatggaaaatgaggtggtccaaaaacagagtattaataatgagaaccccttgccgaagttgc

SEQ ID NO: 10904 - DNA, 2190 bp, DROSOPHILA
cttgtggaaaaaattggagtctttaatttggcgaatccattcgtttactttgcgtttatttttagccttagtactttcgtttgatacgtttgctaccaagtatttataaaaattaaaaagcgttcaaaaacacaattaaccattgcaacgtcgtttcatcagctattcagagtgaataaagaaaacctacatcacacctacaatcatacgtgttacgtgtacatacatatgtctacagcttggttctcatcattatcaacaattttataaaaattacaactgcgagtacttcatcactaatcaacaaatcacctgaaaatgaacggcctgagcagcaatgatgatgcagtcgagtgccctttgtgtatggagccgcttgaggtggacgatctgaccttctttccgtgtacctgcggatatcagatttgccgattctgttggcataggatccgcacggatgagaacaagctgtgtccggcatgccgaaaggagtatcccgagaatccagctgacttcaagccgctgtcgcaggaggaaatgattgccttcaagtcccagaaacgccaaagggaccaacaacgaaaacaaaagatcaccgagaaccgcaaacacttggccaacgttcgcgttgtccaaaagaacttggtgttcgttgtggggctaccgccacgacttgctgatgcagacatattaaagaaacacgagtatttcggtaaatatgggaaaattcataaagtcgttataaatccaagtaccacgtatgccggggtccagggtccatctgcttctgcgtatgtcacatatgttaataactcggatgccttgcgggccattcaaagcgtcaataatattatgatagacggtcggcttataaagaccagcttggggacaaccaaatactgtagccacttcatgaagaaccagcagtgtcccaagggcgactgcatgtacttacatgaattgggcgatcccgaggccagtttcacaaaggaggaaatgcatcagggaaagcacctggagtacgagaagcgcctgcacgatactctaattgcgtcattgggaccgaatgcaacagtcgcgattccatcgtcatcgtcagcgtcatcctcgtcctctggatcgggtacaaatggttcaagtgcatcaggtaatgcccagcaaaaggaggcctggccaagcttatcggtctcgcccatcaatggcaaagaggcggctgccactgcgaccagttccagtgggaaaagtaaacgggaaaagctgcgcaacgagaagaggcacgagaagaacaaggcgaagaataagaacggcagcaatacaaacgccaatgcctcgaacaaggagaactatgttcccgaaacgagaagcagcacaagtactgagacattcgcagaggctacggcggatgcaccggcttccaccaaggcagaaccgccgcaagcctctagcaatagaacgagggcggatcgtggaaaagatcggaccacggctagtgcaaaggagcagaagaagagcaaggaagctgctccagcacctgcagcaagtaaaccggcggagcgggttgaaacaagcgagagtacaataagacaaaagaaggcggaagtaacagaaagctgtgaagataacttaccacaaaagagattagcgggaacaaacgttcaaagatctgtgagctcttgtagcgaaaatagcgaaggacacgtctctgagagtagcttaagtgagaagagtttaactggtgattatgtggaggaaaagtgcaatagtgtgaattcggaaagccagcaagaaagtgtaaagtttcaggaggagctcgaaaagagcaacgaggcaattgtcgaggccgaaacgattctgccaacagctgagtcctctgaggacatcagtcccgctgcagttgcgccaggcaatggagaagtcgaaggatgcttacccgttgttgatccagtcgaaccaccgagtctggcggataatggaagcagagtaacagatgcgctatctaagctgaacattttcgatgacacgcctagctttttcacatcgccatcattccagcaagcacccatattaaagaataagctagatttggaaatgcgacagtctcatttacctgacttggtcaacgacattgatggaatccaaaaggcatccaatacaaacggtaatggtttcattattaaagcatgtatttga

SEQ ID NO: 10905 - protein, 623 aa, DROSOPHILA
MNGLSSNDDAVECPLCMEPLEVDDLTFFPCTCGYQICRFCWHRIRTDENKLCPACRKEYPENPADFKPLSQEEMIAFKSQKRQRDQQRKQKITENRKHLANVRVVQKNLVFVVGLPPRLADADILKKHEYFGKYGKIHKVVINPSTTYAGVQGPSASAYVTYVNNSDALRAIQSVNNIMIDGRLIKTSLGTTKYCSHFMKNQQCPKGDCMYLHELGDPEASFTKEEMHQGKHLEYEKRLHDTLIASLGPNATVAIPSSSSASSSSSGSGTNGSSASGNAQQKEAWPSLSVSPINGKEAAATATSSSGKSKREKLRNEKRHEKNKAKNKNGSNTNANASNKENYVPETRSSTSTETFAEATADAPASTKAEPPQASSNRTRADRGKDRTTASAKEQKKSKEAAPAPAASKPAERVETSESTIRQKKAEVTESCEDNLPQKRLAGTNVQRSVSSCSENSEGHVSESSLSEKSLTGDYVEEKCNSVNSESQQESVKFQEELEKSNEAIVEAETILPTAESSEDISPAAVAPGNGEVEGCLPVVDPVEPPSLADNGSRVTDALSKLNIFDDTPSFFTSPSFQQAPILKNKLDLEMRQSHLPDLVNDIDGIQKASNTNGNGFIIKACI

SEQ ID NO: 10906 - DNA, 3673 bp, DROSOPHILA
caccggcttccaccaaggcagaaccgccgcaagcctctagcaatagaacgagggcggatcgtggaaaagatcggaccacggctagtgcaaaggagcagaagaagagcaaggaagctgctccagcacctgcagcaagtaaaccggcggagcgggttgaaacaagcgagagtacaataagacaaaagaaggcggaagtaacagaaagctgtgaagataacttaccacaaaagagattagcgggaacaaacgttcaaagatctgtgagctcttgtagcgaaaatagcgaaggacacgtctctgagagtagcttaagtgagaagagtttaactggtgattatgtggaggaaaagtgcaatagtgtgaattcggaaagccagcaagaaagtgtaaagtttcaggaggagctcgaaaagagcaacgaggcaattgtcgaggccgaaacgattctgccaacagctgagtcctctgaggacatcagtcccgctgcagttgcgccaggcaatggagaagtcgaaggatgcttacccgttgttgatccagtcgaaccaccgagtctggcggataatggaagcagagtaacaggtattgtaccttatccatttagtccaccacactttgctaacactttccgttgcagatgcgctatctaagctgaacattttcgatgacacgcctagctttttcacatcgccatcattccagcaagcacccatattaaagaataagctagatttggaaatgcgacagtctcatttacctgacttggtcaacggtaagttacgaatctttgaaaataaagagaattctttaatttattttttctcatttttcggtactgctaaaaaatatcaacgggcttaaacagacattgatggaatccaaaaggcatccaatacaaacggtaatggtttcattattaaagcatgtatttgaattaactcatatttattcttaatttatccatcctttgcataaacagagtgggaggaagccttcaaaaatgtgatgatgggcaacacgcagcacatggaggagcaactgttgcagcagcaacatttgcagcagcatcagaatttgcgccaccagctggtgttgcaacaggaggagttccttcgcatgcaagaattacagaaacgcaacaactttgcgacgcaaatcaacggtcctgcgaatggtaggtgaattcctactgtggtgtactgcaactttaataattgtgtaattaattccttttagatttccttagagcttatgagctcagagctcaagccaatgcaatcattcagcaacaattattacaacagcacgcaggcgaaaatctatttggcggcaacatgtcgaagttcttcgatttccataaaagtcagccgcagtcacaccatcagtatctaaatggacatccgcctcaaatcaatgggaacggtgctgtgccggagccgcaaagagtggcggcctctttggaaagcaatcgactgaattcgccttttgtcgaaaatggtgggacatactttacaatgaaattgctggccagcccgcaataataatatttacgttgttatcctaggacttattaactcgcagcagcagcagcagcagcagcaacagcaacaaaagcagagaatgatgggaatgtatgaatttatggtaatgatttcaaatggatttaaaaagcaacatgctaatatcatatttgtttcgatttccagcctccaaacacgcaatctcagcagaatcggtttacacagaactcgatagtcgacgatgacttaggtaagaccttgtttatatctcacttcaaagccttttcactgattctgcttgttaaaaggattcgacccgttcgttgagacccaaaagggacttgctgaacttatggaaaatgaggtggtccaaaaacagagtattaataatgagaaccccttgccgaagttgccgccacagcctcaagttccaccccatccgcaattggtggacaacctgcagcgagctcgcatgccgccgccaggcttcaatcacgtcaacacattgggcttgggcggtgcatccagactgcagctcaccagcaaaataatacccttcatgaacatgcccgtcaatggggtgggcaacagcggtgcccagggacagcaccaaatgccaatgggtgtcaactggaatgcgccgatgggcatgcaccagaacccgggacagcccgtgggtgattcgcaattgcagcatccaatggctcacaacaagggtaagtaattgaaatgattacattttttggtaccgagaaaactgtttaatcaaattatttggattcgcaacagtttacaacaacagtgattggacttcaatggatccggctatactttcgtttagacagtattcttcttttccacaaaaccaaattcccccacatcctcagcagcaacaggatttatttttgcagcatttggctcaacagcaaaattcccagagtggtggtaagtggggcaaccaagagtttacatatcaacagtcgattaaaatgcatcggattgtgtacttgcaggtttcaacaaccaggcacagcaaatgcttcctatggggatgcccaatagtttgctgaacggacaacaaacgcagccgccacaggtcaatgccaatgttcagggcatgcttgagtttttaaaaagccgtcaattcgtttagctacaatacatataaataatacatttgtttacctgtactctttattaaatatttcttaaagtaaatataggcaaaataaaattcgaatataatgaaactacatgatacaaacaaacagacggtccagtgaaattcagcctactaaaagcatttgtgcagcaagcgaaacacttggatgccgtctccccgcgccggacgtgtccgcatgaatccaattatagtatccaataaaccccgttcagggtgtagtctgcttggcaatagtgaagcccccagtgatttttcaaacttgaaaccaactcattccaattgctcgctggataaaagacagattaccatggcaataagtagcaaagaaaacctcgtgatgtgaaattatcgagactgtgtaaaaatgtcaactttttaataataaatacgtgacttgaaatggttgaaaagaatttattactacgatccgaagaactatttcctatttttggcggcgtggggcagacggttcccttggccagcagcgccacccaggcgcatcgcgttgttagcagcacctccgtatccctggccgggacgattgccgacattgttgcggttgccgccaccaggacgtccgccgcgctgattttgcgacgagttgccgccgcggtttttgttcatctctgtgcgattccttgacttggcctgcgcgtcctccttgaccatgtcgattacttcgtcggggattcgcagatatttgatggtgctcccgcggatataacattcgggcatgcgccaaaaccgatcgccatcctgcaaagtacacatacacatattggtataaacaagctcttcatgttatcatttttccggctgtttacaaatcaatgcgattgtatttatgtatataccagttgtcgcatattttgcacaccggcaatctacatattaattacatatacatacatatttaattaaaatattacctttgaggtgcaaataacatcgcgcagattaatattcatcc

SEQ ID NO: 10907 - DNA, 1283 bp, DROSOPHILA
atgtgatgatgggcaacacgcagcacatggaggagcaactgttgcagcagcaacatttgcagcagcatcagaatttgcgccaccagctggtgttgcaacaggaggagttccttcgcatgcaagaattacagaaacgcaacaactttgcgacgcaaatcaacggtcctgcgaatgatttccttagagcttatgagctcagagctcaagccaatgcaatcattcagcaacaattattacaacagcacgcaggcgaaaatctatttggcggcaacatgtcgaagttcttcgatttccataaaagtcagccgcagtcacaccatcagtatctaaatggacatccgcctcaaatcaatgggaacggtgctgtgccggagccgcaaagagtggcggcctctttggaaagcaatcgactgaattcgccttttgtcgaaaatggacttattaactcgcagcagcagcagcagcagcagcaacagcaacaaaagcagagaatgatgggaatgtatgaatttatgcctccaaacacgcaatctcagcagaatcggtttacacagaactcgatagtcgacgatgacttaggattcgacccgttcgttgagacccaaaagggacttgctgaacttatggaaaatgaggtggtccaaaaacagagtattaataatgagaaccccttgccgaagttgccgccacagcctcaagttccaccccatccgcaattggtggacaacctgcagcgagctcgcatgccgccgccaggcttcaatcacgtcaacacattgggcttgggcggtgcatccagactgcagctcaccagcaaaataatacccttcatgaacatgcccgtcaatggggtgggcaacagcggtgcccagggacagcaccaaatgccaatgggtgtcaactggaatgcgccgatgggcatgcaccagaacccgggacagcccgtgggtgattcgcaattgcagcatccaatggctcacaacaaggtttacaacaacagtgattggacttcaatggatccggctatactttcgtttagacagtattcttcttttccacaaaaccaaattcccccacatcctcagcagcaacaggatttatttttgcagcatttggctcaacagcaaaattcccagagtggtggtttcaacaaccaggcacagcaaatgcttcctatggggatgcccaatagtttgctgaacggacaacaaacgcagccgccacaggtcaatgccaatgttcagggcatgcttgagtttttaaaaagccgtcaattcgtttag

SEQ ID NO: 10908 - protein, 424 aa, DROSOPHILA
MGNTQHMEEQLLQQQHLQQHQNLRHQLVLQQEEFLRMQELQKRNNFATQINGPANDFLRAYELRAQANAIIQQQLLQQHAGENLFGGNMSKFFDFHKSQPQSHHQYLNGHPPQINGNGAVPEPQRVAASLESNRLNSPFVENGLINSQQQQQQQQQQQKQRMMGMYEFMPPNTQSQQNRFTQNSIVDDDLGFDPFVETQKGLAELMENEVVQKQSINNENPLPKLPPQPQVPPHPQLVDNLQRARMPPPGFNHVNTLGLGGASRLQLTSKIIPFMNMPVNGVGNSGAQGQHQMPMGVNWNAPMGMHQNPGQPVGDSQLQHPMAHNKVYNNSDWTSMDPAILSFRQYSSFPQNQIPPHPQQQQDLFLQHLAQQQNSQSGGFNNQAQQMLPMGMPNSLLNGQQTQPPQVNANVQGMLEFLKSRQFV

SEQ ID NO: 10909 - DNA, 2770 bp, DROSOPHILA
ccatagcgatatatgtataagccacgttttggtttcggtttcgatttcggttccgttttataaactttggtttggtttacacttttggaaacttcggaaacgcatttcaggccaacaaattgaaaataaacttagacttttggaccagttttgttcccgctaaatcggataaatcgatcaaaattgtacatttagcgcaaacgaaaaattgcaattaaatgattaaaagtcccgaaaaacggaaaatcgaaatttggatttacatttagagaatgcatttagcgcaaagcaaaagcaatcgacaccacaccacacgacaccatcaccacacaaaaatgaatgaaaatatgtatgaggtaaattcagtatttcggatataagcgaatataataacatacaaatttatatttatgcaagcgacaaaatcgatagacatcgtactaaaaatgtgtaatggaatggaaattgtaaaacaagaggaaaacactaaactacaatatgacatttttaatcgaaaaaaaacaaaacttattttattgaaaaattatgtaaaatttactaagaaaaaaatacaaaaaaacacacaataaaactatattgtttattttcatctttaaaaataaagttttaaaatcgtataaaaatagtaaatgcattgttttatcttggcaaagtgagtggtaagtactgaaacaatatgggaatatgaatagcaggcctaaaatgttgaaaagtagaaaatctgagaaagatttcgttgtgcaacatgtcgtatgcgtaatttgtatggatattttgaaaataacgtactcagatattcggcggtattttttcagtatttccatatttgccgtcctgttttctacattttacattggacttatcgattttccaattagactggtcaatcgagataggtccatcgctaggacattgaacagcaacaaaaacagctgttcgtacattacgcaaaggttttttccacatttgtttattaaaaatgtcgctgctgggcgcctttgccaggtaagtgaatgcacctggtccctggtcacacaatcactcactccccacctgccttctgtctcagattgagtctgcagagaagtggcggcgtcgccggtgccgcctttgcacgttgcctccacacgacaccagttctttgtgcggagcccctgaagaaaaagaagaaactggatccgcagattgtcaagcagcgcgaggatcgcaagaagaagaagatcgaaaagcagattcgccggctggagaagaatgcccgtcagctgaagcccgtggatgaactggaggttccactggagctcatcgacgaaaaggagtaggttctcatacgggtttccctcatatgctgagatgtaatgctatcctatcgttcagcaaacggcagcggaagctagctccactgaccatcgaccagttggaggaacgtgctctcctcaagaagcagtgggcgcactacaagcacgacgagcgcgtagcagactttcagatcatcgaccggctggtccaggcgcaaaacaaggcgctggcggaacttcggcgcgagtccgaggagctctaccaggcggccatcgatatcgatccccagctgctgcccgtcgccgtcaaaggacccgttgccacgccccccattaaggattacgtcagtcccgatggcgactacctgcaccaatccatgaagtgggaggtcaaatgaggcgtgtaagttccggatgttaaagatttgaaataaactgaaccctaatcctatgatttgtgaattcggctttactctcaatgaattgcgttcgccgtttattcggtttacatgcagttaaatgcccgtagccaaattaaaatattacattcctccggaataggcatctcgtttggagtcagcttgatgcgtttgtgtggcggttttattgctatcagtggagaacaagaataagccaggtggaatcgcctgccgagcccttgcggtgtactgtcgaaataaataagatgcgagtggctgctaccgatgttgatcttgggatgggatttgggtgggtctccttaggatggggtagtggcggtggtcttggtagcggcctgccgctttttcacgccccagttgtagacccgcgccatgttcacctccgtagttgtgatttgatccctaaaatatacatttataatacaataaaacaagtaacttgaataacagcactcgaactgacctcagaaaatcctgatcgtgctccacggactttaggttgcccacggccgatgtgatgttctggttcagcagagcctccgcctcgtctagcggatactccagcatcacgctggcccccagccagaggtatactgttttcgtgggcggcaccagtgtcttgatgaacacctggtcgctgagcaggaattgcgtctcgcgctcctcgtcctccttgcgaagcacattgaccatttccagggagcgctccaggtccggaatttgagacttcaacttgcgccgccgcgcctccagattgcaggccatgaatcgatacttgccgtgctgctcgtccagtcgctgcagcaccttttcgcaattttcgttctccggctgcgacatgaaggtgtcgatctcctcctgcaagggcccaagaaccacgaattagcctgcagtgtccagctgcaggtgcacgcttgtaggttaggaccactcaccaggaacactgcctccgggatgccggcgaaggtcttctggttttccggtaatttgggcatttccaccgagtccattatt

SEQ ID NO: 10910 - DNA, 647 bp, DROSOPHILA
atgtcgctgctgggcgcctttgccagattgagtctgcagagaagtggcggcgtcgccggtgccgcctttgcacgttgcctccacacgacaccagttctttgtgcggagcccctgaagaaaaagaagaaactggatccgcagattgtcaagcagcgcgaggatcgcaagaagaagaagatcgaaaagcagattcgccggctggagaagaatgcccgtcagctgaagcccgtggatgaactggaggttccactggagctcatcgacgaaaaggacaaacggcagcggaagctagctccactgaccatcgaccagttggaggaacgtgctctcctcaagaagcagtgggcgcactacaagcacgacgagcgcgtagcagactttcagatcatcgaccggctggtccaggcgcaaaacaaggcgctggcggaacttcggcgcgagtccgaggagctctaccaggcggccatcgatatcgatccccagctgctgcccgtcgccgtcaaaggacccgttgccacgccccccattaaggattacgtcagtcccgatggcgactacctgcaccaatccatgaagtgggaggtcaaatgaggcgtgtaagttccggatgttaaagatttgaaataaactgaaccctaatcctatga

SEQ ID NO: 10911 - protein, 196 aa, DROSOPHILA
MSLLGAFARLSLQRSGGVAGAAFARCLHTTPVLCAEPLKKKKKLDPQIVKQREDRKKKKIEKQIRRLEKNARQLKPVDELEVPLELIDEKDKRQRKLAPLTIDQLEERALLKKQWAHYKHDERVADFQIIDRLVQAQNKALAELRRESEELYQAAIDIDPQLLPVAVKGPVATPPIKDYVSPDGDYLHQSMKWEVK

SEQ ID NO: 10912 - DNA, 3000 bp, DROSOPHILA
atacttggatccattttgatgcagatcctgtgtgcctgttaggacccgaaatgccgtcgcctgtctgcctcttgtacagtgagccgccgttataatccaccgttcatcgatgatagcaccgccacaggaatgagctccactgccgattccttgaagggatatctgataaggtgccagacctgcggcagcctcctccccgcccacaatgcgattcttggtatactgcggcggatataggatctgacttgcggcactcgaagtgaacagaacaagtggtaacaaaatgagcaacataacgactccttgtcttttgaattactgaatatcgtaacacctctgtaaacgtatcttataggtaaattgcgatttacaattacgagttcagtcacgtttcgcagccaatatctggttgaaaaagtccagctgagtggagaacccttcattctaggcaaccaaccaccactcagcacaaataaggttgttctgataactacgattcactctaaatttacataacaggaacttgaaacaaggcgataattaaactgtttatttaactacattaaaagcctatccaataaacaaatatatgtactatctaggtcacaactaagtgacattatccctccacaaaatttttggtgttttgacatatgagaaaacattaaagaaattctttaaaaatttgaatcgacttataatcaaagtagtctttcaatcagttctatttaattatcttataatttgagaacctgctggaaaactacttaggtattgtttatttccatagtcaatcatactcgagtctaatctctacattaagtaatgccacaggtgatagtcaatactttctgatatcccacttctttctaactggcgcttgtttgtttgttgactcagttctcagaactgaatataatgatggatcatacgaatgactgggctttggagaagtgctaaaattgaacacccgccttaaagaacatgacatacgaaaaagtttttatttaaactgaagcgcaattgttcatttattcgttcataaatattttatgatatctttgatatctaagtaataaaatttacagtctaatttgatcaatttgcagaagccattagatggcagctgctatttttgttcggttttggcttttgtacccccacgggtgacttttggacctttagcacgcggtaccagcgtctgtcatcatctgttcgatccaatcgtggtagtaggcgaccgaaccgaacacatccggatagccaatggcacaggcctcgccccagttgaccacgccgacgagggtttggttggcatcaaccaaaggaccgccggagtctccatggcaagatccctcgccctcctgggtgaaggtgcacacgtgtccttcgctcagccagttggcgtttcgcactcgagactggcagttgtcgtgatcgatgtagttcagatcgattttctgcagctgggtggagtaccttccccaggtcttggtgctgccccatcccgtcagcgttagcttatctcccaccttcggcagtgatcccttgctggccagtttaataggttgagtcaggtcgtcgtaaacaatgggcttagccgtgtggatcaacgctatgtcattgtgataggctggcttgtcgtgactgcaatggatcttcgatccatctaccagatactccgctcctggtctcgtatagtccactgtgccggtgacaatcttcagatactgaatgggccactccatgcaatgggcggcggtgaggatccattgtggcgcgatgatactgccaccgcaaacatgctcgccaaaggtattcatgatggacacctggtagggagcaaatccagtgggggaatcgacacctccaatcacacgggtctcgggcttcacatggcccaaatgatgatttaactggtgacgacgatgaatcttaacgcttttcgccgaacattgagacaggatcaccaaaacactgatcagtactagacacttcattttggctcaaatatcttgaaatatttgtttcaattaattgtaataattgtaatttgtagtgttgtgttgtgttcaacttccgtaagcggaatgcccactttttggcaccaaaatcgcttttatagcgctgtgcaaaatttccttatctctcgaagagtttcttttaaatattttttgcgataagcgtctcagttcgggggaagcttcgataatgacaatttccatagcccgtatatagtaacctgatagggggaattctatagccatttggactgagagtgatagacaactagcacacgaccgtaataatattactcatacgcaacgggggcggactttgtgctaactcgagttgtgctaggcagatcttcagacgtcgtcggttgatagggtcgtaatcggatggaagtttacttgaaattcacctggaataatagcgaaatgattgaaggcccattgaagatactgaagtcggcatacccttagggtaggcaagttaaaggaatagataggacaatcttcaacaaatattaaaggatttataaaaataaattagataacttcgatatggaaacctacttacttattacttattttgttttttatcaaacactaaaaaagtatatattgtatagacatagttctgtgtgtcatggtttggtagtgtattatattgtttctgaaaaaccagttcatttttatggcttcaatgaaattttgacgttttacttatcacccgcaattacaacaattggcagacgtctggacgagggattatcaagatttcaagttaatcaattgtttcacatactggattttggactttgacataatttaggagacaatgtatcttttggaacatccgtaataaactaggtaatataaaaatgttcgtctggcgatattgaaaatgcgtaccacaatttttacagtattttattgaataaagttatttttccaggataaaagtaattgatacgaatttttgcacttaggaaat

SEQ ID NO: 10913 - DNA, 1000 bp, DROSOPHILA
atgaagtgtctagtactgatcagtgttttggtgatcctgtctcaatgttcggcgaaaagcgttaagattcatcgtcgtcaccagttaaatcatcatttgggccatgtgaagcccgagacccgtgtgattggaggtgtcgattcccccactggatttgctccctaccaggtgtccatcatgaatacctttggcgagcatgtttgcggtggcagtatcatcgcgccacaatggatcctcaccgccgcccattgcatggagtggcccattcagtatctgaagattgtcaccggcacagtggactatacgagaccaggagcggagtatctggtagatggatcgaagatccattgcagtcacgacaagccagcctatcacaatgacatagcgttgatccacacggctaagcccattgtttacgacgacctgactcaacctattaaactggccagcaagggatcactgccgaaggtgggagataagctaacgctgacgggatggggcagcaccaagacctggggaaggtactccacccagctgcagaaaatcgatctgaactacatcgatcacgacaactgccagtctcgagtgcgaaacgccaactggctgagcgaaggacacgtgtgcaccttcacccaggagggcgagggatcttgccatggagactccggcggtcctttggttgatgccaaccaaaccctcgtcggcgtggtcaactggggcgaggcctgtgccattggctatccggatgtgttcggttcggtcgcctactaccacgattggatcgaacagatgatgacagacgctggtaccgcgtgctaaaggtccaaaagtcacccgtgggggtacaaaagccaaaaccgaacaaaaatagcagctgccatctaatggcttctgcaaattgatcaaattagactgtaaattttattacttagatatcaaagatatcataaaatatttatgaacgaataaatgaacaattgcgcttcagtttaaataaaaa

SEQ ID NO: 10914 - protein, 272 aa, DROSOPHILA
MKCLVLISVLVILSQCSAKSVKIHRRHQLNHHLGHVKPETRVIGGVDSPTGFAPYQVSIMNTFGEHVCGGSIIAPQWILTAAHCMEWPIQYLKIVTGTVDYTRPGAEYLVDGSKIHCSHDKPAYHNDIALIHTAKPIVYDDLTQPIKLASKGSLPKVGDKLTLTGWGSTKTWGRYSTQLQKIDLNYIDHDNCQSRVRNANWLSEGHVCTFTQEGEGSCHGDSGGPLVDANQTLVGVVNWGEACAIGYPDVFGSVAYYHDWIEQMMTDAGTAC

SEQ ID NO: 10915 - DNA, 6602 bp, DROSOPHILA
aaatatttctacttcaatctttgttcgtattttcgttgtcgtttgccgcagatgcgtcttaattttatttccgcctggcgaatttcgacggaaatcttaaatgtcgcagtgcaaatattagaatgctgactgagcagcaggagctctgtagtcgtagtttgtcaagccaagctggacggccacagccggaaaattattccggggcgggcggcaggccacacggcgtatgcgtaacgagtgaacgaaacggaaagtgatgcgtaatttgcgggcccaaccaacaaaaattcaaataaaaggaaaaatatcagaatcagtgcaaggcgaaatacaaaacccgcaatcaattatcagcttcatactaattaaaagcccagcaaaaagtaaacgggtattattttaataaaaaaattgaaagcaatgtgagggaaaaaccagtgcaaatgcaaaacgagagtacaaagcgcaccaaaacggcagccaaatgaagaagaataattcaagtgagttgtcttcgaggaattttcatttcattttctcaaccggtgatgcggtgggtgggcattgggtggccatgcccctgaacgtgaacgtgtaacctccactaaggccgtaatcttgaactgcaccaccaacaccagagccgcaccccctacttttggctgaccccctgcactcgctactcgttgccgttttgcagttagcttttagcagtggcgataacacgaatgcaacactgtgaaaattctgaggagcttttccagggcgagggagtgcaggggttcaggtgtagaggatgataggcgcctctatttatagcgccaaattatgactatttttaaaacgcattttcccatcctttgtgccattccagatcaagtaaaacttcaaccacaaacaactagcagaataagcagcaaccactgaaccccctatatatatataaaatcagcacatatatacacagtgttagctgagcaacaatctagctatagtcgccatgcatggacatcacaaccacaaccatctgccgcagcagcagccacaaaatccgcaggagcagcagtcgggtgccatcatgaaggcagccaaccagccccaccatcccgcccacagccatccgctcaatcacccacatccgcaccagcatgcccagccacatccgcatccacatccccatccgcatcacaagctgtcggcgagaagggcgcgcagtcgcagtcgaagtcgcagtccgacgccggatggcaatcaggactacgatgtgaccaggatgcgggaggaggacttcgagcggctggccgtctacctggtgccggatgtccaggcggagcggggactgcccaatcgggcggacaagacgctgccgcgcagcctgacgctcaagtcatccatggtctactcaacgccaaatgttaaggtaagaaaggatctatacaaatgaaaagccctaagagcttaaaagattatacaggagaatgtgaagctaatcctagcattttgattttttcctaacttgcagactgaaggagtttggagcagcggggtcatcccacgtggcactcgctttggcccattcgaaggcattccaacctctaattatcccaatgataagaataaggcgcgctatttctggcgggtaagcatcctcatctctttttaaacatttaacgaagggttaagcatctgttgtgggctttcaattcatttgcatattttttatttgcctttgtttttggtcacagctccttcgcaaaaaaaaaaacgaaggttttagtgttgccttaaatgagtcattataaaaatcacctaaaaacatgcttcccccatccaatcatccagccgaaaagaaaatcgaaatatgcaactaaccaactcgtttctctttaatttttatttcatgtgatctaatcttaaaccatcccacaattacccaaccaaaatgaacacaaatatgtataaaaccaaaaaaaaaaaacaaaaaaccgatcataaattcaaaattatacttttgcattttggaacgaattcgatttgattgtggttaaatcaggtgcagggaacacgccacataacctacgggaatattaaggtaccactcacgatttatgctttctttgatttctatttgttgtctttgaatcccaaaactatacacctgctttcccagctaatccccgatcagcacaaagcctctttctaactaaccttgcactgctctatcaatctatatgtgttgtgtattttaaaaaaatttaggaatattaaagagtatttaaaaaaaaatacttttaaattatgcaaatttttctaaaaacacatccttcaatcaattttccttgtagaatgagctatgttttttcttctttgttgtgcgtcttgtgtcgttatgctttctttcgtttttctccagaatttttctaaatctccccatttccccccgctcttttctctttctgtagatcttcaaggacgatgactactattacttggatggttccgatcgctcgcagtccaattggatgcgctatgtggcctccgcttatagtttatccgtaatgaacctggtggcgtgccagcaccaggagaacatctatttctacaccacccgcgacattctgcccaacgaggagctaatggtttggtactgcaaggacttcgccagtcgcctgggctacgatgtggatcctgagacgacgatcttcggcgcatgcaagcaggctgtggaagcggaggaggaggcggacgaggaggaggaagaggcggagggagaggacggaaagccgcgatactcgatgccagctccggaaattccacccgatgtggccgtgagtcacataacctacgtcatgggtctccatctgcctgtgggagcgggaaatggtccggcgaatggttcggttgcgggttccgtttccggtgccacacctccaccaccgactgccacgccatgctgccgccgctccagtccacccgcccacgtcagcaccaccacctccacttgcaacgcccaccacccgcacatccagcatggtcgacatgcctccgtaatcatcggccaggatcgatcgcctatggccagcagtgacaaggatacggcgggatctcccctttccggtctggaccatcagatgaccccgcaggatggcagcgtgaggtctgtgagatcggacgagggctaccacagcaacgagtgccacgaggatggactcacaccacccgaggattccagcgacagcgagagtgaacataactacgtgctggactgctcgaagaaggcaattgctcccaaagagacagtgattgcccaggcccaaaagcccagcagttctccaccggcagtggtaatggccaacacgactaccaactcgatgattagccacagttcacccactgcgacgcccatttgcgaaacggacaagaatgagtatagaaagttcaaggtgaaaatgccgctgaagtacgagttcaagaacaagacctgcgtaaaacaggagccaagccttaaggaagtggaccaggagatgtccttgccgcaggaggaggaggaggatcaggtgatgcatccggaacccgattcaatttgcccatcgaccaccacccatctgggcgatgagcacatgctgatgatggagcgggaacgggaaagggagcgcgaaaggatccaggagagggaaccatccaaccagcagcccgcctcctccacggtcatcgtactggaacacaactctggcggtcaagcccgcaccattgtcccactgagtaaaccctactacgaaccagatcctcccggcgaacgctatatgcgatttggccagccctcttccagcatcctggagactatcctcaccagccaacatcgcttggaggcggcagctgctgcggcaaatgcctgccgacaggccaatgccgccacaccaccgcccacatcgcccacggagatggcctacagctacaagaaatcccagcggtacggtaatgccgtgagtccggatagtagttccaatctgggacagaatcccgagcagctttcctcgtcggcagtggtggtcggcgaacaggaaatgaccagagccaccatgatcaagggagagtgctcaccaccaccgcctagccaccatcatcacaatgtcatcttctcgccctcgagacatgctgcttatctgggagccggcgaagcgggtggccactcaccgagtccgggttatcctggctatccccactatggagctgcagccacctcgaccttccactcaccaccacatagttcccattccccgttcgatcgccagtcgaatgcatccagtggtgcgggttcggccacaaatctgcatttattgcaaaccagcacccaaatgctgaaccatccgctgatgcagcccctcacacccctgcagcgtttgtccccgctgaggatatccccacccagcagcctcagtcctgatggcaactcgtgtccccgcagcggcagccccttgagtcccaattccttggcctccagaggctaccgatcgttgccttatccgctcaagaagaaggatggcaagatgcactacgagtgcaatgtgtgctgcaagacttttggccaattgagcaacctcaaggtgcacctgagaacccattccggcgaaaggcccttcaagtgcaatgtgtgcacgaagagcttcacccagttggcgcacctccagaagcatcatctggtgcatacgggcgagaaaccgcatcagtgcgacatctgcaagaagcgtttctcgagcacctccaacctgaagacccatttgaggctgcacagtggtcagaaaccatatgcctgtgatctctgcccgcagaagttcacacagtttgtgcatctgaagttgcacaagagactgcacacgaacgacaggccctatgtgtgccagggttgcgacaagaagtacatcagtgcatccggcttgaggacccactggaagaccaccagctgcaagcccaacaatctggaggaggagctggccatggcagcagcggcaacatcggagtgtttgggtaggtttcaatggcttactgctctgggttaaacttaactaacattaaattttttaaacattcagataaagaccatcccgaaccggactcccgagaagcctacgagcaactgacgcagcacatgcatcctgctgtgcatccgggattgaggcacctctcgagtgggggtcaatcgccaccgcgcctgatacccctgggcaatcacatggcgccacaacagcagtcgcatcagcagcagcaacagcagcatcagcagcagggagtgccaccgccccacttactgatgacccagcattcggtgggtccggcacccatgctgctgaccaccgccagccagttgccaccaccgccgccacatcatcagcagaactcgcccagccgtctgctgcaacatggccacgcacatccgttgcagatgcaacagcaacagcagcagcaacagcagcactcgcccaagggactcaaatccctgccggaatcgggggtgtatctgcatggacagcatgtgcaggcccaggagagcagaccatcggtcattgagtcctccaaccagcccatgatcatcgaatgcacgtagaaggtacatggtacatggtatatggagcagctgcagaccagaccaggaagtgatgtaatccaagtgcaataaagttaaatagagttaagcgacagacaggcagacagacagacgataccccttaaaacaaaaaaaaaatcgaaaaggataacaaaaatgcagcacaagtaaacgtaacggtattattatatagttgtatatagttagagattcccctcgtaaatttttggatcctcctcaaaccctgaaattgaaattgaaaactcattttcgcgctatgaaaactagatctcaccaattggcaatcccatgaattcttcttctcatcattatcagcatggcaggagagcactaaaggcatattatttttgataaatattttatatatatacaccgaacatatatatcggaagtgaacaaaattggttaacagcaagcgattgttaatgggaaaataaatggagccgggagcagatgagaattttgcaaaaaactgagaacgagagaaagaaaatgcatttacacttgactttcgatgattttccagttttgatttgttctctcaccctcgctgtttgtttgtttgtttgttgaggcgcgcacctttagatgtagattacgtagtaaagagttaaaggataaataaggatacatttacacatacaatacatagattcaagttgccttatttgaatttcgttagcactgagatccgcgaaaagaacatttcgatcatctctgttcagtaagaacagaactgcaaagcttatatacgtattttatatatgaatatatcattattatacatacgaatatatatatatatttatatgtattttattatatatacacaaccggaaatgcagcaacaaacaaatgatagcaaaactgtacatagaaggaaatcttatttcggcatctgttgaactagtatcgcctagctatatataattacgtagacctctagggattaccattaccattatcattattatgatta

SEQ ID NO: 10916 - DNA, 3612 bp, DROSOPHILA
atgcatggacatcacaaccacaaccatctgccgcagcagcagccacaaaatccgcaggagcagcagtcgggtgccatcatgaaggcagccaaccagccccaccatcccgcccacagccatccgctcaatcacccacatccgcaccagcatgcccagccacatccgcatccacatccccatccgcatcacaagctgtcggcgagaagggcgcgcagtcgcagtcgaagtcgcagtccgacgccggatggcaatcaggactacgatgtgaccaggatgcgggaggaggacttcgagcggctggccgtctacctggtgccggatgtccaggcggagcggggactgcccaatcgggcggacaagacgctgccgcgcagcctgacgctcaagtcatccatggtctactcaacgccaaatgttaagactgaaggagtttggagcagcggggtcatcccacgtggcactcgctttggcccattcgaaggcattccaacctctaattatcccaatgataagaataaggcgcgctatttctggcggatcttcaaggacgatgactactattacttggatggttccgatcgctcgcagtccaattggatgcgctatgtggcctccgcttatagtttatccgtaatgaacctggtggcgtgccagcaccaggagaacatctatttctacaccacccgcgacattctgcccaacgaggagctaatggtttggtactgcaaggacttcgccagtcgcctgggctacgatgtggatcctgagacgacgatcttcggcgcatgcaagcaggctgtggaagcggaggaggaggcggacgaggaggaggaagaggcggagggagaggacggaaagccgcgatactcgatgccagctccggaaattccacccgatgtggccgtgagtcacataacctacgtcatgggtctccatctgcctgtgggagcgggaaatggtccggcgaatggttcggttgcgggttccgtttccggtgccacacctccaccaccgactgccacgccatgctgccgccgctccagtccacccgcccacgtcagcaccaccacctccacttgcaacgcccaccacccgcacatccagcatggtcgacatgcctccgtaatcatcggccaggatcgatcgcctatggccagcagtgacaaggatacggcgggatctcccctttccggtctggaccatcagatgaccccgcaggatggcagcgtgaggtctgtgagatcggacgagggctaccacagcaacgagtgccacgaggatggactcacaccacccgaggattccagcgacagcgagagtgaacataactacgtgctggactgctcgaagaaggcaattgctcccaaagagacagtgattgcccaggcccaaaagcccagcagttctccaccggcagtggtaatggccaacacgactaccaactcgatgattagccacagttcacccactgcgacgcccatttgcgaaacggacaagaatgagtatagaaagttcaaggtgaaaatgccgctgaagtacgagttcaagaacaagacctgcgtaaaacaggagccaagccttaaggaagtggaccaggagatgtccttgccgcaggaggaggaggaggatcaggtgatgcatccggaacccgattcaatttgcccatcgaccaccacccatctgggcgatgagcacatgctgatgatggagcgggaacgggaaagggagcgcgaaaggatccaggagagggaaccatccaaccagcagcccgcctcctccacggtcatcgtactggaacacaactctggcggtcaagcccgcaccattgtcccactgagtaaaccctactacgaaccagatcctcccggcgaacgctatatgcgatttggccagccctcttccagcatcctggagactatcctcaccagccaacatcgcttggaggcggcagctgctgcggcaaatgcctgccgacaggccaatgccgccacaccaccgcccacatcgcccacggagatggcctacagctacaagaaatcccagcggtacggtaatgccgtgagtccggatagtagttccaatctgggacagaatcccgagcagctttcctcgtcggcagtggtggtcggcgaacaggaaatgaccagagccaccatgatcaagggagagtgctcaccaccaccgcctagccaccatcatcacaatgtcatcttctcgccctcgagacatgctgcttatctgggagccggcgaagcgggtggccactcaccgagtccgggttatcctggctatccccactatggagctgcagccacctcgaccttccactcaccaccacatagttcccattccccgttcgatcgccagtcgaatgcatccagtggtgcgggttcggccacaaatctgcatttattgcaaaccagcacccaaatgctgaaccatccgctgatgcagcccctcacacccctgcagcgtttgtccccgctgaggatatccccacccagcagcctcagtcctgatggcaactcgtgtccccgcagcggcagccccttgagtcccaattccttggcctccagaggctaccgatcgttgccttatccgctcaagaagaaggatggcaagatgcactacgagtgcaatgtgtgctgcaagacttttggccaattgagcaacctcaaggtgcacctgagaacccattccggcgaaaggcccttcaagtgcaatgtgtgcacgaagagcttcacccagttggcgcacctccagaagcatcatctggtgcatacgggcgagaaaccgcatcagtgcgacatctgcaagaagcgtttctcgagcacctccaacctgaagacccatttgaggctgcacagtggtcagaaaccatatgcctgtgatctctgcccgcagaagttcacacagtttgtgcatctgaagttgcacaagagactgcacacgaacgacaggccctatgtgtgccagggttgcgacaagaagtacatcagtgcatccggcttgaggacccactggaagaccaccagctgcaagcccaacaatctggaggaggagctggccatggcagcagcggcaacatcggagtgtttggataaagaccatcccgaaccggactcccgagaagcctacgagcaactgacgcagcacatgcatcctgctgtgcatccgggattgaggcacctctcgagtgggggtcaatcgccaccgcgcctgatacccctgggcaatcacatggcgccacaacagcagtcgcatcagcagcagcaacagcagcatcagcagcagggagtgccaccgccccacttactgatgacccagcattcggtgggtccggcacccatgctgctgaccaccgccagccagttgccaccaccgccgccacatcatcagcagaactcgcccagccgtctgctgcaacatggccacgcacatccgttgcagatgcaacagcaacagcagcagcaacagcagcactcgcccaagggactcaaatccctgccggaatcgggggtgtatctgcatggacagcatgtgcaggcccaggagagcagaccatcggtcattgagtcctccaaccagcccatgatcatcgaatgcacgtag

SEQ ID NO: 10917 - protein, 1203 aa, DROSOPHILA
MHGHHNHNHLPQQQPQNPQEQQSGAIMKAANQPHHPAHSHPLNHPHPHQHAQPHPHPHPHPHHKLSARRARSRSRSRSPTPDGNQDYDVTRMREEDFERLAVYLVPDVQAERGLPNRADKTLPRSLTLKSSMVYSTPNVKTEGVWSSGVIPRGTRFGPFEGIPTSNYPNDKNKARYFWRIFKDDDYYYLDGSDRSQSNWMRYVASAYSLSVMNLVACQHQENIYFYTTRDILPNEELMVWYCKDFASRLGYDVDPETTIFGACKQAVEAEEEADEEEEEAEGEDGKPRYSMPAPEIPPDVAVSHITYVMGLHLPVGAGNGPANGSVAGSVSGATPPPPTATPCCRRSSPPAHVSTTTSTCNAHHPHIQHGRHASVIIGQDRSPMASSDKDTAGSPLSGLDHQMTPQDGSVRSVRSDEGYHSNECHEDGLTPPEDSSDSESEHNYVLDCSKKAIAPKETVIAQAQKPSSSPPAVVMANTTTNSMISHSSPTATPICETDKNEYRKFKVKMPLKYEFKNKTCVKQEPSLKEVDQEMSLPQEEEEDQVMHPEPDSICPSTTTHLGDEHMLMMERERERERERIQEREPSNQQPASSTVIVLEHNSGGQARTIVPLSKPYYEPDPPGERYMRFGQPSSSILETILTSQHRLEAAAAAANACRQANAATPPPTSPTEMAYSYKKSQRYGNAVSPDSSSNLGQNPEQLSSSAVVVGEQEMTRATMIKGECSPPPPSHHHHNVIFSPSRHAAYLGAGEAGGHSPSPGYPGYPHYGAAATSTFHSPPHSSHSPFDRQSNASSGAGSATNLHLLQTSTQMLNHPLMQPLTPLQRLSPLRISPPSSLSPDGNSCPRSGSPLSPNSLASRGYRSLPYPLKKKDGKMHYECNVCCKTFGQLSNLKVHLRTHSGERPFKCNVCTKSFTQLAHLQKHHLVHTGEKPHQCDICKKRFSSTSNLKTHLRLHSGQKPYACDLCPQKFTQFVHLKLHKRLHTNDRPYVCQGCDKKYISASGLRTHWKTTSCKPNNLEEELAMAAAATSECLDKDHPEPDSREAYEQLTQHMHPAVHPGLRHLSSGGQSPPRLIPLGNHMAPQQQSHQQQQQQHQQQGVPPPHLLMTQHSVGPAPMLLTTASQLPPPPPHHQQNSPSRLLQHGHAHPLQMQQQQQQQQQHSPKGLKSLPESGVYLHGQHVQAQESRPSVIESSNQPMIIECT

SEQ ID NO: 10918 - DNA, 4392 bp, DROSOPHILA
ggatggggtagtggcggtggtcttggtagcggcctgccgctttttcacgccccagttgtagacccgcgccatgttcacctccgtagttgtgatttgatccctaaaatatacatttataatacaataaaacaagtaacttgaataacagcactcgaactgacctcagaaaatcctgatcgtgctccacggactttaggttgcccacggccgatgtgatgttctggttcagcagagcctccgcctcgtctagcggatactccagcatcacgctggcccccagccagaggtatactgttttcgtgggcggcaccagtgtcttgatgaacacctggtcgctgagcaggaattgcgtctcgcgctcctcgtcctccttgcgaagcacattgaccatttccagggagcgctccaggtccggaatttgagacttcaacttgcgccgccgcgcctccagattgcaggccatgaatcgatacttgccgtgctgctcgtccagtcgctgcagcaccttttcgcaattttcgttctccggctgcgacatgaaggtgtcgatctcctcctgcaagggcccaagaaccacgaattagcctgcagtgtccagctgcaggtgcacgcttgtaggttaggaccactcaccaggaacactgcctccgggatgccggcgaaggtcttctggttttccggtaatttgggcatttccaccgagtccattattcctgtcatcctgttgccttcagccgtgccgtctacaaatgcaatttaattttcaggaggtcagcctgccgctgtaaaagtcgatgagtcaaaattgcgatggaacaatcgattgaatggctgtcatcgaaaggtggtggtcaacttcgtataaaaatgtaaaactaacttatattaaaataattatataaataaacgttgggataatataatatgttaaaaacattaaataatgtctaaataaatttaaatatatatcaattctcttcgtgactctcatccctagctcaatcgataacaacagcgacgataagcgcgcccgccttcttgtgaaattagcggaaagtcagatttttagcaatctaaagaagccgcataatgagcacctggaatccggagaacgatgtggacctgctgtctgggtccgaggacgaggaggatgtgtccatgaagcgggactaccatgggcgcgaggccattctgttcgtggtagacgccaatcttcagacagccggcgtggagcgcctgttggaggcactgaacatcatccggacggcctttatatccggacttctggttaacgacaaggacctcatcggactcatcttcgccaacaccaagcacagtccgccgccgctggaagccagtgcattggacaacatcgtaatgccggataactgcgcagtgttcttgccccttcgccaactaaccaaacccattgtggagcactatctggaattcatgggcggggtggagacgcagttcgccgatgtgtatggcctggcggaacccgatggtcgcggcaggtttgaccttatgatccggctctgcatcgagatgctggaaaagtgcggcaagaagctaaacaacgccaagatcgcctatgtcacggacgtcagggaacctcatccatcgaacagcaatcacttccaggctgccctgcaaaaggccagcgatctggagggcaaggagttcgagtttcatgtcattcccatggtcgatgactttgactacgagccgttttacaaggagttcatcacgttgtcaagaggtaagtcctttaagtctgctattcatttcttatgggttttaatgtgcgaagtctgttcccctgtttggcgttcaattttcgcctgaaaggttttaagacttcgtagatcaaatataagcaatcattcacccgcatccaagtgaagctcaattggttcgtggttttggattggcttacaagaataataaaataaatatatagcaatccgtacactagatgatgtttaatgaggaccttttttgcagctatcgaactggacgccttccaggtgccagatgcccagatgctgcgcgaaatcctgtccgatcgtaagttgaagcaggatttccttcgccgatgcctgggccacttcagtttttatctgggccccaacctatccatgtccgtacagtactacaattactttcagcgacgcgcctatccgcgcaaagtgcaaatcctgcgcagggacaacagtgtggtgcgtactaagcgagtgattacggtgcaaaaacaaaaggacgatggctcgcaggatatcgagcacgagtatcagattaaggtgacgggcggttggtacacttgcaacgtgggcgaaagggatctgcgcatcagcatggatcagttgaacagggtgcgcaatctgcacaagccgcaaatgatgctgctgggcttcaagcatcgatcctctcttcccgaagttagctacatcaagccagcgaatttcatgtaccccgatgatcagagcatcatcggatcgaagcgcttgttccgcgcattgtgggaacgatgcttggtgcgcgacaagattgccatttgcctgttcatgtgcaagcgcaagtcgatacctcgctatgtggcacttgtgccagtagaggccccagataatggggaagataagaactatcgctctctgctctgcggtgacggattcaagattgtctacttgccggaggccaagcacatccgccacctagacttgcaggactggaacaatacggaaaacactgctgacgaacagaaagtcgagtttttccaaaagatcatcaagaagctgcgcgttgactatcagccgaatctcatcaacgatccaagtctggacgccctgcaggcgaatcttctggccctctccctggacttttcgacagatactaaaggactcgataatctgctggacacttcgcaacaggacaagcgcatagaaaagctgctgccggactatgaaatgttcgctccggaagcagaaccccataagaagcgagcagccaagtccaccacagcgggagcgagcggtcccaaaatggccaagatcgatgatgatcaactcaaggaattcgaattcgtaaagagcctgaacaaggatgaggctctgacgagttgcacggccgcccagttgcattttattctgcagcatcacttcgatgttacaatgcccaagtcgtcaaagaaggcaaaactggtcgccaaaatcgaggaactacataagtaattaaaatattccatactttgagtgataaatctgtaccaatctagcttgtattaaccattggtaaacttaggattagaaaataatgttttgttgtccgaattgttaattaaatacataccaacacataattacttgtaaaataaattattaaaatgttgttttaaaaaaaatgtatattccattacacaataacagaaaagaaaaaaacgtaaaaattgtactgagcaggcttaacatagtagtcaagaatcctttttaaaaatcgattactatccaatcgtaagtttgtcatcactagtttcgcacgaagcagtcttgcaaaacgcccgttgactacatgtgatagcgccgcgccggcttcttttgtgcgaatttgggcattacgaattaatttatttcgaaccacggccgaagaatgtcgctgcaattccaaaacgactgcggggactccgttaagcaagccatcatcgaggagctgcagaacctacttagctcggacacaggagtcctgcagcagacagaaaagaggatcaagcagctggagtacacggaaggtgatttggcgggcagctggattggcgtggcttgggcgcggttcacatgtagccctattttaaccatctcattcatttgcaggctatggcgtctacctgtccgagatcattatgaaccaggcgcacgagctgccactccgtcaaatcgcgatcgtgatgctcactcgttacgtggagaaccactggacggatgacgatgatgttaaaaggaaagccaacggttgtatggccagcgagcaggccaagcgaaccatacgaaacattctgccaaacggactgtatgatcccaattcaaagatacgctcctcagtcgcgcataccatctccaccatagccgccacggattacccacattgttgggcggagctgttcgacatcattgtcaaatgcctgggcggcaatgaggattccatacacggtgccatgcaggtgctgcaggatttcagctacgacgtggagcaaatcaaggaactgggtccagtagtcatacccgaagtctatcgcatcttcgactccgagcaaaattactcgatcaaaacaagagtttcggccattcgcatcttgaagccactttttgcatccattgctgcactgatcaccaacaaaga

SEQ ID NO: 10919 - DNA, 2147 bp, DROSOPHILA
aatcgataacaacagcgacgataagcgcgcccgccttcttgtgaaattagcggaaagtcagatttttagcaatctaaagaagccgcataatgagcacctggaatccggagaacgatgtggacctgctgtctgggtccgaggacgaggaggatgtgtccatgaagcgggactaccatgggcgcgaggccattctgttcgtggtagacgccaatcttcagacagccggcgtggagcgcctgttggaggcactgaacatcatccggacggcctttatatccggacttctggttaacgacaaggacctcatcggactcatcttcgccaacaccaagcacagtccgccgccgctggaagccagtgcattggacaacatcgtaatgccggataactgcgcagtgttcttgccccttcgccaactaaccaaacccattgtggagcactatctggaattcatgggcggggtggagacgcagttcgccgatgtgtatggcctggcggaacccgatggtcgcggcaggtttgaccttatgatccggctctgcatcgagatgctggaaaagtgcggcaagaagctaaacaacgccaagatcgcctatgtcacggacgtcagggaacctcatccatcgaacagcaatcacttccaggctgccctgcaaaaggccagcgatctggagggcaaggagttcgagtttcatgtcattcccatggtcgatgactttgactacgagccgttttacaaggagttcatcacgttgtcaagagctatcgaactggacgccttccaggtgccagatgcccagatgctgcgcgaaatcctgtccgatcgtaagttgaagcaggatttccttcgccgatgcctgggccacttcagtttttatctgggccccaacctatccatgtccgtacagtactacaattactttcagcgacgcgcctatccgcgcaaagtgcaaatcctgcgcagggacaacagtgtggtgcgtactaagcgagtgattacggtgcaaaaacaaaaggacgatggctcgcaggatatcgagcacgagtatcagattaaggtgacgggcggttggtacacttgcaacgtgggcgaaagggatctgcgcatcagcatggatcagttgaacagggtgcgcaatctgcacaagccgcaaatgatgctgctgggcttcaagcatcgatcctctcttcccgaagttagctacatcaagccagcgaatttcatgtaccccgatgatcagagcatcatcggatcgaagcgcttgttccgcgcattgtgggaacgatgcttggtgcgcgacaagattgccatttgcctgttcatgtgcaagcgcaagtcgatacctcgctatgtggcacttgtgccagtagaggccccagataatggggaagataagaactatcgctctctgctctgcggtgacggattcaagattgtctacttgccggaggccaagcacatccgccacctagacttgcaggactggaacaatacggaaaacactgctgacgaacagaaagtcgagtttttccaaaagatcatcaagaagctgcgcgttgactatcagccgaatctcatcaacgatccaagtctggacgccctgcaggcgaatcttctggccctctccctggacttttcgacagatactaaaggactcgataatctgctggacacttcgcaacaggacaagcgcatagaaaagctgctgccggactatgaaatgttcgctccggaagcagaaccccataagaagcgagcagccaagtccaccacagcgggagcgagcggtcccaaaatggccaagatcgatgatgatcaactcaaggaattcgaattcgtaaagagcctgaacaaggatgaggctctgacgagttgcacggccgcccagttgcattttattctgcagcatcacttcgatgttacaatgcccaagtcgtcaaagaaggcaaaactggtcgccaaaatcgaggaactacataagtaattaaaatattccatactttgagtgataaatctgtaccaatctagcttgtattaaccattggtaaacttaggattagaaaataatgttttgttgtccgaattgttaattaaatacataccaacacataattacttgtaaaataaattattaaaatgttgtttt

SEQ ID NO: 10920 - protein, 631 aa, DROSOPHILA
MSTWNPENDVDLLSGSEDEEDVSMKRDYHGREAILFVVDANLQTAGVERLLEALNIIRTAFISGLLVNDKDLIGLIFANTKHSPPPLEASALDNIVMPDNCAVFLPLRQLTKPIVEHYLEFMGGVETQFADVYGLAEPDGRGRFDLMIRLCIEMLEKCGKKLNNAKIAYVTDVREPHPSNSNHFQAALQKASDLEGKEFEFHVIPMVDDFDYEPFYKEFITLSRAIELDAFQVPDAQMLREILSDRKLKQDFLRRCLGHFSFYLGPNLSMSVQYYNYFQRRAYPRKVQILRRDNSVVRTKRVITVQKQKDDGSQDIEHEYQIKVTGGWYTCNVGERDLRISMDQLNRVRNLHKPQMMLLGFKHRSSLPEVSYIKPANFMYPDDQSIIGSKRLFRALWERCLVRDKIAICLFMCKRKSIPRYVALVPVEAPDNGEDKNYRSLLCGDGFKIVYLPEAKHIRHLDLQDWNNTENTADEQKVEFFQKIIKKLRVDYQPNLINDPSLDALQANLLALSLDFSTDTKGLDNLLDTSQQDKRIEKLLPDYEMFAPEAEPHKKRAAKSTTAGASGPKMAKIDDDQLKEFEFVKSLNKDEALTSCTAAQLHFILQHHFDVTMPKSSKKAKLVAKIEELHK

SEQ ID NO: 10921 - DNA, 2881 bp, DROSOPHILA
cttccttgtcgtatattttcagttgataaaagtgattccggtagataaccaccacataatcagagcacggattgtagacgatatcgtcggtaaaccttctcggtatccggcatgtgccgaaaacctttccaaactgactgttgtccagctcgttcttgcccattttcacaatcggaatctttttggcgtgcaccaagtcattgaactcacccaaaccgaagataaccctagacgtgtagtccacaaattcgtggacactttcaaatttctgtttgggaaaggtcatgccgggactggagaagcaagtcactggcgaccgaaactgtaagtaggcaaccttcagccagcgatgggctaaccagttcttctcctgttcaccagtttcttcgaggagcttttgtagcttagcgccctccttcctctggaattcgttagtaatcttctcttgctttttgaactcctcgggtgtcagcaatggttgtacggtaatcatgaagcggttgaggatttcttcaagaggtaagacatgatactttagaaggtttggctgatcggatttaggcttatccttggcagtgctatagctggcaattggcatttttttgccgaacgtatatcgagtctgttgcagagccgatatccttgcgaaattccaaaggacctttccattgtcacggaacttcatgtcggccttggcggttctcaagaattaccctaaaaagtgcaatgcgcactttacttgtgttccaaatatatgtataatttttacgaatttttacaaaaatagccacattgttacagtaaatttccagtttgcattgatcagttacattagttaaaataatttaatacaaactatacattttaatgtaatcagcactatacgttcttctaaaaatgtgtaaaaattatcgttagatatgcttcattttatagctttcatttatattttcagagtttgaaagatttttataatgttattataatgtctatcttgtcactaatcctggagagcaatcatttcctcctcgatatcctcagagctgtccgttttggatagacttaggtgagtgcgtataaagtcgtgataatatgaaattgaagcgtgagcatctgtagaatatagtaaatgagctttaatatgtatttaacgcatattaaattattattacctggatatcctttagcacatggcagtccccagttgaccagagccaccagcttgccattgtgcaccagaggaccaccggaatctccatgacacgctccgcgtcccttgtcattgaaggtgcaaacgtggccaatgtccacccgagtgctattgtcgtgggcagctcgacactgctcgaagggcacatagttgacctccagactctgcagacgggcgggaacatctccgcccaaggagagggttccccaaccggttaaaaggagtcgggatcctggaaccaaggcctcgtgatccagttccaccggttgagtggcattatcaaacacaatcgattcattcagatgcagtaaagctatatcgttgcgatacttgcgtggtgcatagttactatgctccacaatcctgtcgggatagtaatacttggatccattttgatgcagatcctgtgtgcctgttaggacccgaaatgccgtcgcctgtctgcctcttgtacagtgagccgccgttataatccaccgttcatcgatgatagcaccgccacaggaatgagctccactgccgattccttgaagggatatctgataaggtgccagacctgcggcagcctcctccccgcccacaatgcgattcttggtatactgcggcggatataggatctgacttgcggcactcgaagtgaacagaacaagtggtaacaaaatgagcaacataacgactccttgtcttttgaattactgaatatcgtaacacctctgtaaacgtatcttataggtaaattgcgatttacaattacgagttcagtcacgtttcgcagccaatatctggttgaaaaagtccagctgagtggagaacccttcattctaggcaaccaaccaccactcagcacaaataaggttgttctgataactacgattcactctaaatttacataacaggaacttgaaacaaggcgataattaaactgtttatttaactacattaaaagcctatccaataaacaaatatatgtactatctaggtcacaactaagtgacattatccctccacaaaatttttggtgttttgacatatgagaaaacattaaagaaattctttaaaaatttgaatcgacttataatcaaagtagtctttcaatcagttctatttaattatcttataatttgagaacctgctggaaaactacttaggtattgtttatttccatagtcaatcatactcgagtctaatctctacattaagtaatgccacaggtgatagtcaatactttctgatatcccacttctttctaactggcgcttgtttgtttgttgactcagttctcagaactgaatataatgatggatcatacgaatgactgggctttggagaagtgctaaaattgaacacccgccttaaagaacatgacatacgaaaaagtttttatttaaactgaagcgcaattgttcatttattcgttcataaatattttatgatatctttgatatctaagtaataaaatttacagtctaatttgatcaatttgcagaagccattagatggcagctgctatttttgttcggttttggcttttgtacccccacgggtgacttttggacctttagcacgcggtaccagcgtctgtcatcatctgttcgatccaatcgtggtagtaggcgaccgaaccgaacacatccggatagccaatggcacaggcctcgccccagttgacca

SEQ ID NO: 10922 - DNA, 822 bp, DROSOPHILA
atgttgctcattttgttaccacttgttctgttcacttcgagtgccgcaagtcagatcctatatccgccgcagtataccaagaatcgcattgtgggcggggaggaggctgccgcaggtctggcaccttatcagatatcccttcaaggaatcggcagtggagctcattcctgtggcggtgctatcatcgatgaacggtggattataacggcggctcactgtacaagaggcagacaggcgacggcatttcgggtcctaacaggcacacaggatctgcatcaaaatggatccaagtattactatcccgacaggattgtggagcatagtaactatgcaccacgcaagtatcgcaacgatatagctttactgcatctgaatgaatcgattgtgtttgataatgccactcaaccggtggaactggatcacgaggccttggttccaggatcccgactccttttaaccggttggggaaccctctccttgggcggagatgttcccgcccgtctgcagagtctggaggtcaactatgtgcccttcgagcagtgtcgagctgcccacgacaatagcactcgggtggacattggccacgtttgcaccttcaatgacaagggacgcggagcgtgtcatggagattccggtggtcctctggtgcacaatggcaagctggtggctctggtcaactggggactgccatgtgctaaaggatatccagatgctcacgcttcaatttcatattatcacgactttatacgcactcacctaagtctatccaaaacggacagctctgaggatatcgaggaggaaatgattgctctccaggattag

SEQ ID NO: 10923 - protein, 273 aa, DROSOPHILA
MLLILLPLVLFTSSAASQILYPPQYTKNRIVGGEEAAAGLAPYQISLQGIGSGAHSCGGAIIDERWIITAAHCTRGRQATAFRVLTGTQDLHQNGSKYYYPDRIVEHSNYAPRKYRNDIALLHLNESIVFDNATQPVELDHEALVPGSRLLLTGWGTLSLGGDVPARLQSLEVNYVPFEQCRAAHDNSTRVDIGHVCTFNDKGRGACHGDSGGPLVHNGKLVALVNWGLPCAKGYPDAHASISYYHDFIRTHLSLSKTDSSEDIEEEMIALQD

SEQ ID NO: 10924 - DNA, 3558 bp, DROSOPHILA
ttattctttttggccgtttgcttgatcagattgccaatgggcttgctaatgtgcttaatggcaagtaaagctagtttcgccagtggaaagacgcccacaaccattgtgcaatttctaagtttcgacagaattccctaagtgccctacaaccgaaaattttcaaatttcatataatcagtttttcaaattatttctaaactcaatttctgagtcgcaataactttaagtctgtggatatccaaacccagcaatttaaaacatgtactctttttaaacttcttgttcttatttaataactaacagattcttgaaagatgtttagacagtttagtttatgaatcggtaatatttggcatataaaacccggtcacacctgttactaaaacgctggttttgtttgttattaaatctttacctctgcatgctttaatattcttcctaaaaaataatgtcggcacttggggattctgatgatgaaactgagtttaaagagatcagctcgactaattatcatcgtgtgcaggaaaaggtggcaaaggtaagtttaaaatgaatttggcgtggccagctttcatgatgaaatcagctggctttacattgccgagtaaacacgacttctaaataccctttccctatcaagataagctatgcagatggcgttgccgatggcagggaaaaggtcttccaagagagcttcgatgaaggctttgagaatggctttaaaactggattcgaactggccaaactgagtgccttctatgaaaccataagcaatgcggcgggagctgaaagctccgaatggaatgcagaacgagaagcttatcaaaaactccaactggcagatgcaacaaataaagcacacttcacatatttggagcatcaaggcgctccactcaacgttatatccgaaaaacaaaagacctacgtggacgacctcctaggaaaactggcacagcaactcccggcaactacgaatttattcacatcggggagcgattctagtgttaatgtggtttaatgcatgtgtttgggaattatcaaaattaacttgaaagtatatcttcgcgcgacttataaataaagaccctcgggcgtgccctccttcttccggtacaagacgctctcctttgacttcttgaagtcctcgttggtcaccttcatgcggcgttcccgcagcgccatcaagccagcctctgtacagatggccttgatgtcggcgccggatagatcgtcctttgccatgatcagttcgctaaggttcacgtcctcggccagcgtcatgcgagatgtgtggatggtaaagatgcggcgcttggtcttctcatcgggcagcgggaactcgatcttgcggtcaatacgaccgggtcgaatgagcgccgggtcaagggtctcgatacgattggtggccatgatcaccttgacatcgccgcgcgaatcgaaaccatccaactgattcagtaactccaacatagtacgctgaatctcccgctcgccaccagaatttgaatcgtagcgctttgtgcccactgcatcgatttcgtcgatgaacacaatggatggagcgtgctcctcagccacacggaagagctcacgaactagcttgggtccgtcgcccaggtacttctggatcagctctgagcctacaacgcgcaggaaagtggccgaggtctggttggccactgccttggctagcagggtcttgcccgtaccaggaggcccatataggatgacgcccttgggtggcttgattcccatttcctcgtagtactcgggatgggtcagtggcagctcaacagactccttgatctcctggatctgagtgtctaagccaccgatatctgcgtaagtctcttgcggagccttttccagtttcatcaccgtgaccattggatcggtgtcgtcgctgagaactccgactacagcgtgtactttgtggttgagcagcacggagcagcctggttccagctgatccttgtccacgaaggacaggatgctaacatagtgctcggagcccaccgatgtggacacgatggcgtggttgtcgtcgatgatctcctccaggttgcccacggacatgggggtgccgcgcagatcgtcaaccttagagcgctcctcctcgttcttctcgtcctggggcttcaggcgctcctggttgcggatgaactcgtcctccatcatcaggtaatccttgatgcgctccagcttgagcagcttaaggcggcagcgggtgtggggcgtgacctggggcagcttcatggccgcatctggaccctttgcgcgcctcttcttcttgccaacgcgcgttgggattggaggctcgtacttcttctttttatccttgtcatctttcttttcgccagctcccccttgagccgattggttttgtccctgcaaatgtattgttcccgatcgtaaatgagttcagggtgttctgaaggtgctattttaccattttgtcttggtgcttgctgctttgccgaacgtttgatgaactttttactctttattgtcggcaacaaaattactagtcattcgcgttagctgtgttgccgtactatggaaacatgaaggtctggcaactctaagggtgaacaaatattttaaaaaaacgtgaaaattaaaataggcaagaaatgcttaagcaatcggattaaaacaatagtaatgattaacaaccaaaatataaatgaattcaagacttgaaaaaagcaaattttaaaagtcactgttttatatacttatcgattactgtaaacaaactgaatgtttcagtctggcaacgtttgcaattagtgcgaaaagagcatttgtttaaatttgttatattgcgaccttttaatggatcaaaatgtcaagaatgttgatcttaaactggataacattgaggttctgaccagtgggacaacagcggagttcgtgaatggcatcctggacttcttgctctatcaacgccggcaaatccccttcgtgtacaaaacatacaaatattatgtggataaatggtcagatgctgatgaatcgggagaatccaaggatcaggagtcctttgctcattaccaacgcaaccagcagcgctctaaggcaaaggccaccaaggaatctattagtgacatgagagaggtgaggttccccttacatccaggacttcttttggtctttacttgccagttctctcctacagatcatccgacaagccttcaggagctctgaagtgaagagcctgcgatttctttttggcaacaatatgttcatgccctcggaggcctatactctgcacataccacatgattccatatccagagatcactattgcgagcaccatgctctgcccgaaggtcgcatcaaccaggcgctgctccgcctgctcacctgcgaggagctgtacaggctattctccaccgaactaaaagtcaccaacgtgtttctagaaatggagctccttacagactccgatcgaccccaaggatcccattgtgactcctttaatctaatcccaaagcatatattaagccaacttccgcgcagctgcaagaacatacacctgcatctactgcattg

SEQ ID NO: 10925 - DNA, 1497 bp, DROSOPHILA
atagtacggcaacacagctaacgcgaatgactagtaattttgttgccgacaataaagagtaaaaagttcatcaaacgttcggcaaagcagcaagcaccaagacaaaatgggacaaaaccaatcggctcaagggggagctggcgaaaagaaagatgacaaggataaaaagaagaagtacgagcctccaatcccaacgcgcgttggcaagaagaagaggcgcgcaaagggtccagatgcggccatgaagctgccccaggtcacgccccacacccgctgccgccttaagctgctcaagctggagcgcatcaaggattacctgatgatggaggacgagttcatccgcaaccaggagcgcctgaagccccaggacgagaagaacgaggaggagcgctctaaggttgacgatctgcgcggcacccccatgtccgtgggcaacctggaggagatcatcgacgacaaccacgccatcgtgtccacatcggtgggctccgagcactatgttagcatcctgtccttcgtggacaaggatcagctggaaccaggctgctccgtgctgctcaaccacaaagtacacgctgtagtcggagttctcagcgacgacaccgatccaatggtcacggtgatgaaactggaaaaggctccgcaagagacttacgcagatatcggtggcttagacactcagatccaggagatcaaggagtctgttgagctgccactgacccatcccgagtactacgaggaaatgggaatcaagccacccaagggcgtcatcctatatgggcctcctggtacgggcaagaccctgctagccaaggcagtggccaaccagacctcggccactttcctgcgcgttgtaggctcagagctgatccagaagtacctgggcgacggacccaagctagttcgtgagctcttccgtgtggctgaggagcacgctccatccattgtgttcatcgacgaaatcgatgcagtgggcacaaagcgctacgattcaaattctggtggcgagcgggagattcagcgtactatgttggagttactgaatcagttggatggtttcgattcgcgcggcgatgtcaaggtgatcatggccaccaatcgtatcgagacccttgacccggcgctcattcgacccggtcgtattgaccgcaagatcgagttcccgctgcccgatgagaagaccaagcgccgcatctttaccatccacacatctcgcatgacgctggccgaggacgtgaaccttagcgaactgatcatggcaaaggacgatctatccggcgccgacatcaaggccatctgtacagaggctggcttgatggcgctgcgggaacgccgcatgaaggtgaccaacgaggacttcaagaagtcaaaggagagcgtcttgtaccggaagaaggagggcacgcccgagggtctttatttataagtcgcgcgaagatatactttcaagttaattttgataattcccaaacacatgcattaaaccacattaacact

SEQ ID NO: 10926 - protein, 439 aa, DROSOPHILA
MGQNQSAQGGAGEKKDDKDKKKKYEPPIPTRVGKKKRRAKGPDAAMKLPQVTPHTRCRLKLLKLERIKDYLMMEDEFIRNQERLKPQDEKNEEERSKVDDLRGTPMSVGNLEEIIDDNHAIVSTSVGSEHYVSILSFVDKDQLEPGCSVLLNHKVHAVVGVLSDDTDPMVTVMKLEKAPQETYADIGGLDTQIQEIKESVELPLTHPEYYEEMGIKPPKGVILYGPPGTGKTLLAKAVANQTSATFLRVVGSELIQKYLGDGPKLVRELFRVAEEHAPSIVFIDEIDAVGTKRYDSNSGGEREIQRTMLELLNQLDGFDSRGDVKVIMATNRIETLDPALIRPGRIDRKIEFPLPDEKTKRRIFTIHTSRMTLAEDVNLSELIMAKDDLSGADIKAICTEAGLMALRERRMKVTNEDFKKSKESVLYRKKEGTPEGLYL

SEQ ID NO: 10927 - DNA, 5539 bp, DROSOPHILA
ccccgatgatcagagcatcatcggatcgaagcgcttgttccgcgcattgtgggaacgatgcttggtgcgcgacaagattgccatttgcctgttcatgtgcaagcgcaagtcgatacctcgctatgtggcacttgtgccagtagaggccccagataatggggaagataagaactatcgctctctgctctgcggtgacggattcaagattgtctacttgccggaggccaagcacatccgccacctagacttgcaggactggaacaatacggaaaacactgctgacgaacagaaagtcgagtttttccaaaagatcatcaagaagctgcgcgttgactatcagccgaatctcatcaacgatccaagtctggacgccctgcaggcgaatcttctggccctctccctggacttttcgacagatactaaaggactcgataatctgctggacacttcgcaacaggacaagcgcatagaaaagctgctgccggactatgaaatgttcgctccggaagcagaaccccataagaagcgagcagccaagtccaccacagcgggagcgagcggtcccaaaatggccaagatcgatgatgatcaactcaaggaattcgaattcgtaaagagcctgaacaaggatgaggctctgacgagttgcacggccgcccagttgcattttattctgcagcatcacttcgatgttacaatgcccaagtcgtcaaagaaggcaaaactggtcgccaaaatcgaggaactacataagtaattaaaatattccatactttgagtgataaatctgtaccaatctagcttgtattaaccattggtaaacttaggattagaaaataatgttttgttgtccgaattgttaattaaatacataccaacacataattacttgtaaaataaattattaaaatgttgttttaaaaaaaatgtatattccattacacaataacagaaaagaaaaaaacgtaaaaattgtactgagcaggcttaacatagtagtcaagaatcctttttaaaaatcgattactatccaatcgtaagtttgtcatcactagtttcgcacgaagcagtcttgcaaaacgcccgttgactacatgtgatagcgccgcgccggcttcttttgtgcgaatttgggcattacgaattaatttatttcgaaccacggccgaagaatgtcgctgcaattccaaaacgactgcggggactccgttaagcaagccatcatcgaggagctgcagaacctacttagctcggacacaggagtcctgcagcagacagaaaagaggatcaagcagctggagtacacggaaggtgatttggcgggcagctggattggcgtggcttgggcgcggttcacatgtagccctattttaaccatctcattcatttgcaggctatggcgtctacctgtccgagatcattatgaaccaggcgcacgagctgccactccgtcaaatcgcgatcgtgatgctcactcgttacgtggagaaccactggacggatgacgatgatgttaaaaggaaagccaacggttgtatggccagcgagcaggccaagcgaaccatacgaaacattctgccaaacggactgtatgatcccaattcaaagatacgctcctcagtcgcgcataccatctccaccatagccgccacggattacccacattgttgggcggagctgttcgacatcattgtcaaatgcctgggcggcaatgaggattccatacacggtgccatgcaggtgctgcaggatttcagctacgacgtggagcaaatcaaggaactgggtccagtagtcatacccgaagtctatcgcatcttcgactccgagcaaaattactcgatcaaaacaagagtttcggccattcgcatcttgaagccactttttgcatccattgctgcactgatcaccaacaaagaagagcagagcaccatgatgagctccattttgacaaactttatggacaagcttatgcattacctgagcatgaatagcggcgccgtttccagtttcctgcttcgcacggaaattatcaagggtgggtttcatttcgtctttgctggaaagtaaactaaacttgatctcactttagtgtttacccatttggtcaatgagatgccaaagtacatcaacccctttatggaccgtgttctgcccattgtctggcagctactcacacaaatagccgagacttacgtgaaggtgtcggtgaatcagactgagacaagtccgctggccagcggcgacagcgaggaggatgacgagcagaccaatttccaatcactgatcatccagatccttgagttcatcaactgcatactgacatgcaacaaactacgtggcagcatcaaaaatgtgctggccgacctcatatacataaccattgtttacattcagctgagcgaggagcagttggaggactggcatgatgatccggagaagttcgtggatgatgaggatgatggcggtgtggagctcacggtgcgcatgtgcggccgtgatgttctcctggtgagcgagaaaagacttttctgaagagcttcatcactggcataatatatttttgtaggctattaacgacgaattcggagccaacgcaattcagccattgcaggaggcattgggcaggcactttagtgtggctgatgcagaaaaagcggccaacaatcccaactggtggaagatccaggaggcctgcatggatgccgtgcatgctttccgcgacgtcatcctcgccggcgactctacgtttgacctcctcaactacttgaccatagttcggaatttgcttgtgcatcaagaatctccacctcttgttggtcgtgccctttggacgttgagcatctactccaagtcggacctatacaatccgcagatgttgaccgagattcttgatgtcacgctgtgcagcctgtcgccggagaagtcacacatccttagaatcagcgcagtgcgcaccctgaatggattcctgcaggcgaacgaaacaatcgatggagagaagcgaactttgttggtctcaaagctgccgggtttcctagacggaattatggctttagtgccgggatccaaggcagcagtcttagcactgctaatggaagccctaactttcatggttaaagtaagtgattgaaaggcatttattgtctgcatatttaaagaaaatatctttaccttcagttcgatgctgagtttgcctttgctagccaggcaaagattacgccgctagccatcgctgtattcctgaaatacactgaagatccgtatgtgcttgaaacagtccaggatctcatcaaagctctgtgccagcgcaaggagtgcctgggaccgctacaggagaagtttattccaacgattgttagcatcctggggctgacaggagctgcttccacggaaaagcaggatattgccctagacgtccttaacacaatcgtgcgctacacggagccgccgctgaacaattccctgttagagaccgcttttcccgccattataaactgcgttctacacacggacgaccatgctgtcatggtagctgggggcgagtgcctgcgcagctttatcaatgtctccccggaacaaatatgcagctacaagaacggcgagggcatcaactgcatcatgcaagtggtggccactgttcttctgaatccgatgaacagcgaaatgactgcggcgggccaaattggacgtcttgttatcactattatcaccaagatgggaagcatgctcggccagaatgtggacatgctgctgaaggctgtgataagcaaaatgcagaacctcgagtgcctaaaagtgataatgaatcttgtgttgatcttcgcccatttgttcctcacgcaaatggacgccgtactcaactttctgtccaccgttcccggacccaacggggagccagcgatgcagtttgtactcacaaactggctctcccgccagaactcctttttcggaaactatgagcgaaaggtgagtgaaattgagtttacaaactttgcattttaatataaactttggtttttacaggtcaccaccatggctctgtgcaagctgttcgagtatggtgttgccactcaggacaaccgtttgaccacaataacattcaaagaactggtggacgaccccaccgacacgcgcagacgtactcgatccgtggcagctacaacccagaagtgggtaacaattccggctctcgtcaagatcttcaaggttttgatctccgagtaccagcacttccaggagggcaagagcgacgaacctcttacggacagcgaagaggatggcgatgatgaggatgcgcccggaaatccggacaagccgcgttacatatccgatctgttcgaatctgacgaggataacgccgaggacgaacaactgttgcaagagctgctgaaggaaaccaactaccagggcgacatagccgacaacctgcagaagttccttaccaccttcacgcagaacgaacactttcccactttctatgaacacctcaccgagggtgaacgcctcatcctgctcagcaaggtccagcagaagtaggataacctctccttattcgtattgttcgtatttatgtattgttgctaacccttgaattgaatatacatttatattttttattaagaagtcagctattagtgggtatagtttacgaggcttttagaatgcaaaccagtaaagaaatcatcaagtgcttggttataaaaaatcaaaaattttagttatgtattttgaacttttaacattgcaatacggatgaaaatcgattgggttgaaatggaaacattaacccagctttggattcaggtgtagccagttacgattcggttcgcttgatcataaggccacctcgtcgttacggagcttgtgctgcagtggaatgtcgggcctgaaggcatcctgtgggattttatatatgtaaaatgattaaactactcgccaagttccattccactcaccatgtgcttctctgagccaaaggcaaagaactttcgtatgcagggcgtgagcagcacgggatccaccttgttaggattgtttttgccaaacacgaaggtgcctagcaatgccacgaaaatcgtaatggaggcaccgaacgtggtgtaccacatgtacgagatccgatagagcggaaaaatgtccctgtggattcgcagtatattaagacgtgttctagtatgtgaagattcgattcttactctgcagatgctcccagatgagttgtgttggccagactggtggtcacattaaagctgtagtcgcactgctccacgtttaacggcttcgttttgtaggtaatggctcctgaggcgatggcccactgtgcattgaggctcacccaggacatggctattactcccataacaccgcccaccaaagcgctctgaaaaaaaaagaatgatatattatagatctaccatatctattttggttgtaagaattcacatttccattgatccaaggcaggaaaagaccgatggtaaagatgccaaaaagtggcccgttcgtgatcgcctccaggctcatggtcagctggaga

SEQ ID NO: 10928 - DNA, 3229 bp, DROSOPHILA
caagaatcctttttaaaaatcgattactatccaatcgtaagtttgtcatcactagtttcgcacgaagcagtcttgcaaaacgcccgttgactacatgtgatagcgccgcgccggcttcttttgtgcgaatttgggcattacgaattaatttatttcgaaccacggccgaagaatgtcgctgcaattccaaaacgactgcggggactccgttaagcaagccatcatcgaggagctgcagaacctacttagctcggacacaggagtcctgcagcagacagaaaagaggatcaagcagctggagtacacggaaggctatggcgtctacctgtccgagatcattatgaaccaggcgcacgagctgccactccgtcaaatcgcgatcgtgatgctcactcgttacgtggagaaccactggacggatgacgatgatgttaaaaggaaagccaacggttgtatggccagcgagcaggccaagcgaaccatacgaaacattctgccaaacggactgtatgatcccaattcaaagatacgctcctcagtcgcgcataccatctccaccatagccgccacggattacccacattgttgggcggagctgttcgacatcattgtcaaatgcctgggcggcaatgaggattccatacacggtgccatgcaggtgctgcaggatttcagctacgacgtggagcaaatcaaggaactgggtccagtagtcatacccgaagtctatcgcatcttcgactccgagcaaaattactcgatcaaaacaagagtttcggccattcgcatcttgaagccactttttgcatccattgctgcactgatcaccaacaaagaagagcagagcaccatgatgagctccattttgacaaactttatggacaagcttatgcattacctgagcatgaatagcggcgccgtttccagtttcctgcttcgcacggaaattatcaaggtgtttacccatttggtcaatgagatgccaaagtacatcaacccctttatggaccgtgttctgcccattgtctggcagctactcacacaaatagccgagacttacgtgaaggtgtcggtgaatcagactgagacaagtccgctggccagcggcgacagcgaggaggatgacgagcagaccaatttccaatcactgatcatccagatccttgagttcatcaactgcatactgacatgcaacaaactacgtggcagcatcaaaaatgtgctggccgacctcatatacataaccattgtttacattcagctgagcgaggagcagttggaggactggcatgatgatccggagaagttcgtggatgatgaggatgatggcggtgtggagctcacggtgcgcatgtgcggccgtgatgttctcctggctattaacgacgaattcggagccaacgcaattcagccattgcaggaggcattgggcaggcactttagtgtggctgatgcagaaaaagcggccaacaatcccaactggtggaagatccaggaggcctgcatggatgccgtgcatgctttccgcgacgtcatcctcgccggcgactctacgtttgacctcctcaactacttgaccatagttcggaatttgcttgtgcatcaagaatctccacctcttgttggtcgtgccctttggacgttgagcatctactccaagtcggacctatacaatccgcagatgttgaccgagattcttgatgtcacgctgtgcagcctgtcgccggagaagtcacacatccttagaatcagcgcagtgcgcaccctgaatggattcctgcaggcgaacgaaacaatcgatggagagaagcgaactttgttggtctcaaagctgccgggtttcctagacggaattatggctttagtgccgggatccaaggcagcagtcttagcactgctaatggaagccctaactttcatggttaaattcgatgctgagtttgcctttgctagccaggcaaagattacgccgctagccatcgctgtattcctgaaatacactgaagatccgtatgtgcttgaaacagtccaggatctcatcaaagctctgtgccagcgcaaggagtgcctgggaccgctacaggagaagtttattccaacgattgttagcatcctggggctgacaggagctgcttccacggaaaagcaggatattgccctagacgtccttaacacaatcgtgcgctacacggagccgccgctgaacaattccctgttagagaccgcttttcccgccattataaactgcgttctacacacggacgaccatgctgtcatggtagctgggggcgagtgcctgcgcagctttatcaatgtctccccggaacaaatatgcagctacaagaacggcgagggcatcaactgcatcatgcaagtggtggccactgttcttctgaatccgatgaacagcgaaatgactgcggcgggccaaattggacgtcttgttatcactattatcaccaagatgggaagcatgctcggccagaatgtggacatgctgctgaaggctgtgataagcaaaatgcagaacctcgagtgcctaaaagtgataatgaatcttgtgttgatcttcgcccatttgttcctcacgcaaatggacgccgtactcaactttctgtccaccgttcccggacccaacggggagccagcgatgcagtttgtactcacaaactggctctcccgccagaactcctttttcggaaactatgagcgaaaggtcaccaccatggctctgtgcaagctgttcgagtatggtgttgccactcaggacaaccgtttgaccacaataacattcaaagaactggtggacgaccccaccgacacgcgcagacgtactcgatccgtggcagctacaacccagaagtgggtaacaattccggctctcgtcaagatcttcaaggttttgatctccgagtaccagcacttccaggagggcaagagcgacgaacctcttacggacagcgaagaggatggcgatgatgaggatgcgcccggaaatccggacaagccgcgttacatatccgatctgttcgaatctgacgaggataacgccgaggacgaacaactgttgcaagagctgctgaaggaaaccaactaccagggcgacatagccgacaacctgcagaagttccttaccaccttcacgcagaacgaacactttcccactttctatgaacacctcaccgagggtgaacgcctcatcctgctcagcaaggtccagcagaagtag

SEQ ID NO: 10929 - protein, 1018 aa, DROSOPHILA
MSLQFQNDCGDSVKQAIIEELQNLLSSDTGVLQQTEKRIKQLEYTEGYGVYLSEIIMNQAHELPLRQIAIVMLTRYVENHWTDDDDVKRKANGCMASEQAKRTIRNILPNGLYDPNSKIRSSVAHTISTIAATDYPHCWAELFDIIVKCLGGNEDSIHGAMQVLQDFSYDVEQIKELGPVVIPEVYRIFDSEQNYSIKTRVSAIRILKPLFASIAALITNKEEQSTMMSSILTNFMDKLMHYLSMNSGAVSSFLLRTEIIKVFTHLVNEMPKYINPFMDRVLPIVWQLLTQIAETYVKVSVNQTETSPLASGDSEEDDEQTNFQSLIIQILEFINCILTCNKLRGSIKNVLADLIYITIVYIQLSEEQLEDWHDDPEKFVDDEDDGGVELTVRMCGRDVLLAINDEFGANAIQPLQEALGRHFSVADAEKAANNPNWWKIQEACMDAVHAFRDVILAGDSTFDLLNYLTIVRNLLVHQESPPLVGRALWTLSIYSKSDLYNPQMLTEILDVTLCSLSPEKSHILRISAVRTLNGFLQANETIDGEKRTLLVSKLPGFLDGIMALVPGSKAAVLALLMEALTFMVKFDAEFAFASQAKITPLAIAVFLKYTEDPYVLETVQDLIKALCQRKECLGPLQEKFIPTIVSILGLTGAASTEKQDIALDVLNTIVRYTEPPLNNSLLETAFPAIINCVLHTDDHAVMVAGGECLRSFINVSPEQICSYKNGEGINCIMQVVATVLLNPMNSEMTAAGQIGRLVITIITKMGSMLGQNVDMLLKAVISKMQNLECLKVIMNLVLIFAHLFLTQMDAVLNFLSTVPGPNGEPAMQFVLTNWLSRQNSFFGNYERKVTTMALCKLFEYGVATQDNRLTTITFKELVDDPTDTRRRTRSVAATTQKWVTIPALVKIFKVLISEYQHFQEGKSDEPLTDSEEDGDDEDAPGNPDKPRYISDLFESDEDNAEDEQLLQELLKETNYQGDIADNLQKFLTTFTQNEHFPTFYEHLTEGERLILLSKVQQK

SEQ ID NO: 10930 - DNA, 4331 bp, DROSOPHILA
tcataaccattatcattaattgtatgttgtttggctttataaaacaaaacaaaagacaatgctaaagtcaagtcctcgactatcagattgcttaaaagttgcggagtgtgaaaggaggtgtgtggccacagtgtttttggtatagagataaaaattggcaagacaaacaatataatgcagaaaaatttaagcgttttttatgtgtgagtgagacggcgtggcaagaagttgtattggcaaatcgattgaaatttacaagactaataaaattatgaacaaaccaaaaaaaagtgtgtgggcggtttgttggcgattgggcgtggcaacacgggtcagcaagctttcactgcgcatttgtctctacaatctgtattctgaatctcaaccttttagcttttatagtttctgagatctcgacgttcatacggacagacggacagacgacttgtctcgactcggctattgatcctgatcaagaatatatatacttaatatagtcggaaacgcttccttatgtctgttacatacttttcaacgaatctattataccctattatatatattatacccttatacaagttttgggcttaccgtactttcgatatggtttgttcttgattttacatcgaatagcggtactttttttctaagcgttctctacgaaataccatttacctgtcttttggtaatcgattgattgcagtgggcttttatattattactaacagataaccaccttacatacgatgattattttctgatatacctcacaattcttttttgtgcggagcatggatttttatttttatttattttaagcccaacaatgtttttaaattagactggtattaataagtaacttttaaaacgcacgatgtccatcaagtctacatttgtatttgaagttggaatggaataaaataggcatctggcagagtcctgaaaatcctgtctggcttaatctcgccttccttttgcaacattagacaggtccgcctatctagggcgaacgcgaatcgcgtctagggcgatggtaatgcccgtagcgcggcgatgagcgagtgtaggagcacgattgcgaacggttgcgccgagaatagcgcgatcccgacatagagcggacgcgagagtgggaggaccgcgacccgtattccgagccggacgcagagcgggacggcgatcgagagcgtgacgacgagcccgagcgggacaacgtacgctggctctggcgccggttgactggcgagtaacgtcggtattgacgccacggcgcctttagcatgctttcctgaaaggcggacaccctgatcagcttcccatcgatctgcccgccgttcatatgcttgatggcactggcgcagtcctctggacgtgagtactccacaaaggcgtatccgcgtccctggcgcccttggaaacggtccattggaaagtcgactgccgtcagggcgccgaagtgaccaaatatctcggttatgtgctccttggtcacctgacgcgtcaatcccttaatgtgcaggcgaacattgcgcacgggttggcgaaatttgaaggcgtcctttccgtttctgtaggccactttgtttacctcacccacggctctgtagccccgtccacttgcttctgctccttctccatccccttcaccgcgccgatggttccactggctgctgcaattccgcccattttgattttgaacgctttgtttttggcgagtaggttctgcaccagcagacggtgaagagccacgacgtggaggatcgttgatcttcgacgacttgcccttggggcctgagctgcctgagcggttctgctgaggactcttgtcgtgatctttggctgtcgagggcctggcactggagtgcagctgggtgaaactcgagctggaactggtgtggttcccgtggcctgaactggcgcttgcgttagacctgaccaccgctttcgaagatgtgcttgccactgaagtcttgggggcttggtaacccgccttgctgcccgcgttattggtgacaaccgtctttgaagattggccggtactgctgtcccccttattttttgtgctggagatgctagcgccgccacttgaattggtttcggccataccagtggcgttggcaatcgtctttgtaatggttatagtgctagactggatgatggcttggttggtgccgatagaactgctggcggccgaggcgatgttctgcgaggtggagctgcgtctacgagacttgcggtccaataccacgctgcttggctccctcataggagttggcatggcgatcggagcaggaattggtaccggaacaggggccggaacgggttgcgggtggggattgttatgggagctggaatggctatggagatgggagtgcgattgcgaacgggagtgggaacgcggttgtgcctccgaaacagacaggacagccggaatgggtgccggcacgggcagcggaatgggtgccggtatctgaatgaccccaggggctgaagcaggagaaattttttcgacaacctcctccttaaccgtgatagctcccttggcggcggatatgccacgacgactctttttagccaaacgcttggaaaagcgtccgtgattcgagtgatggcaacgggtgacgtgccggcgacggtgcgaatgacgagggttttggtggcgcctatggcgacgatggtgtcggtaatggcaacacgagtgcttggtgcgctcaaactttttgacggatccttctggctctggctcgctgtcgctcgacgagtagctgctgctggtggagctcaaaaagcttgtgcagctggacgatccagaggtgctgtagctcgagtccgagtagctggagtcgctgcagtctgcttcagtgctctccgaagcattcgagtgaattggtgagatgttcctcatccgggaggaggggcctctggctggctctttgcggtccttgcggtccttgcggtccttgcggtccctgcgttctctgcggtctctgcggtccctgcggtccatgcgctccatgcgttccaatcgctccctgcgatctttcttgtgcgaatgcatctccttgcgttcgcgcttagtggctggctcgccatcgtcttttgccttcgtccctgataccttggtcattttcacaagatttcactttcactgcgaacaaatatgacggccttcgaaactattttgatttgatgctccgttactcacacgttgggaacggctgccttatgaaaatgtaatggcgtgtaaaaacttggtctgacaactgtcataaaaataaaagctgaccaagcaaaggccactcaatgatagataacaacttttttgctttgtggttgccaccttaggtcaccgcagtaacgaattctcaagcaatttaacactagaccagaccacattaaggatataatcgttgtccaacacttcgaaatcagggctgtaactatcgtcattcagggaaggcattcctatcacctgtcaacataatttaaatatacacagacaagaaaaggaaggtagcatcggtaatacaaagtttatatacccttccagttactatacatttaaatacaaatttgttgtataccaagtaaaaacactttataattaaaagcaccgaaactatgatctctttattataactagcaattaatatgacatatcaaattttgatcaaatgaacaatgtccgtctgtctgtccgtataaacgtcgggctcacaggaagtataaaagataggaagttagttgtaagaaagtgtgcagattcgcagattaacttaacctatatatgtatgttacgaactgccttcttttttttagtggcagtgcccctagctcaggcttttctcagggcggagtgccacacagcttgcaacataggcatcgataactatcgacatcgactatcgaccctacatatctatgatctctaaaaagcagacaagcaaaaaaaagtagaagaaaaaaaacgaattcaatttacataaacgacaaaatcttaaagtactggcacccaaccgacctaggttgcacgaaggattattgcggacatcactcattatcaacacgtcggtgtcgcttcaaacgactaggacagccccatctccccaaaggtgaagcattccggtatgctttcttgttttattacacatacatataattactgattaactcttacattctttatttttttcttcaatcactcattaggcagcgatcaccctagatcgtcgactgctttgaaatggtcaaaattagttgattttctttcagattatatttcagaaagctgacgattctttaaaagtgtaccaaataccaattacttttgg

SEQ ID NO: 10931 - DNA, 2331 bp, DROSOPHILA
acaaagcaaaaaagttgttatctatcattgagtggcctttgcttggtcagcttttatttttatgacagttgtcagaccaagtttttacacgccattacattttcataaggcagccgttcccaacgtgtgagtaacggagcatcaaatcaaaatagtttcgaaggccgtcatatttgttcgcagtgaaagtgaaatcttgtgaaaatgaccaaggtatcagggacgaaggcaaaagacgatggcgagccagccactaagcgcgaacgcaaggagatgcattcgcacaagaaagatcgcagggagcgattggaacgcatggagcgcatggaccgcagggaccgcagagaccgcagagaacgcagggaccgcaaggaccgcaaggaccgcaaggaccgcaaagagccagccagaggcccctcctcccggatgaggaacatctcaccaattcactcgaatgcttcggagagcactgaagcagactgcagcgactccagctactcggactcgagctacagcacctctggatcgtccagctgcacaagctttttgagctccaccagcagcagctactcgtcgagcgacagcgagccagagccagaaggatccgtcaaaaagtttgagcgcaccaagcactcgtgttgccattaccgacaccatcgtcgccataggcgccaccaaaaccctcgtcattcgcaccgtcgccggcacgtcacccgttgccatcactcgaatcacggacgcttttccaagcgtttggctaaaaagagtcgtcgtggcatatccgccgccaagggagctatcacggttaaggaggaggttgtcgaaaaaatttctcctgcttcagcccctggggtcattcagataccggcacccattccgctgcccgtgccggcacccattccggctgtcctgtctgtttcggaggcacaaccgcgttcccactcccgttcgcaatcgcactcccatctccatagccattccagctcccataacaatccccacccgcaacccgttccggcccctgttccggtaccaattcctgctccgatcgccatgccaactcctatgagggagccaagcagcgtggtattggaccgcaagtctcgtagacgcagctccacctcgcagaacatcgcctcggccgccagcagttctatcggcaccaaccaagccatcatccagtctagcactataaccattacaaagacgattgccaacgccactggtatggccgaaaccaattcaagtggcggcgctagcatctccagcacaaaaaataagggggacagcagtaccggccaatcttcaaagacggttgtcaccaataacgcgggcagcaaggcgggttaccaagcccccaagacttcagtggcaagcacatcttcgaaagcggtggtcaggtctaacgcaagcgccagttcaggccacgggaaccacaccagttccagctcgagtttcacccagctgcactccagtgccaggccctcgacagccaaagatcacgacaagagtcctcagcagaaccgctcaggcagctcaggccccaagggcaagtcgtcgaagatcaacgatcctccacgtcgtggctcttcaccgtctgctggtgcagaacctactcgccaaaaacaaagcgttcaaaatcaaaatgggcggaattgcagcagccagtggaaccatcggcgcggtgaaggggatggagaaggagcagaagcaagtggacggggctacagagccgtgggtgaggtaaacaaagtggcctacagaaacggaaaggacgccttcaaatttcgccaacccgtgcgcaatgttcgcctgcacattaagggattgacgcgtcaggtgaccaaggagcacataaccgagatatttggtcacttcggcgccctgacggcagtcgactttccaatggaccgtttccaagggcgccagggacgcggatacgcctttgtggagtactcacgtccagaggactgcgccagtgccatcaagcatatgaacggcgggcagatcgatgggaagctgatcagggtgtccgcctttcaggaaagcatgctaaaggcgccgtggcgtcaataccgacgttactcgccagtcaaccggcgccagagccagcgtacgttgtcccgctcgggctcgtcgtcacgctctcgatcgccgtcccgctctgcgtccggctcggaatacgggtcgcggtcctcccactctcgcgtccgctctatgtcgggatcgcgctattctcggcgcaaccgttcgcaatcgtgctcctacactcgctcatcgccgcgctacgggcattaccatcgccctagacgcgattcgcgttcgccctag

SEQ ID NO: 10932 - protein, 708 aa, DROSOPHILA
MTKVSGTKAKDDGEPATKRERKEMHSHKKDRRERLERMERMDRRDRRDRRERRDRKDRKDRKDRKEPARGPSSRMRNISPIHSNASESTEADCSDSSYSDSSYSTSGSSSCTSFLSSTSSSYSSSDSEPEPEGSVKKFERTKHSCCHYRHHRRHRRHQNPRHSHRRRHVTRCHHSNHGRFSKRLAKKSRRGISAAKGAITVKEEVVEKISPASAPGVIQIPAPIPLPVPAPIPAVLSVSEAQPRSHSRSQSHSHLHSHSSSHNNPHPQPVPAPVPVPIPAPIAMPTPMREPSSVVLDRKSRRRSSTSQNIASAASSSIGTNQAIIQSSTITITKTIANATGMAETNSSGGASISSTKNKGDSSTGQSSKTVVTNNAGSKAGYQAPKTSVASTSSKAVVRSNASASSGHGNHTSSSSSFTQLHSSARPSTAKDHDKSPQQNRSGSSGPKGKSSKINDPPRRGSSPSAGAEPTRQKQSVQNQNGRNCSSQWNHRRGEGDGEGAEASGRGYRAVGEVNKVAYRNGKDAFKFRQPVRNVRLHIKGLTRQVTKEHITEIFGHFGALTAVDFPMDRFQGRQGRGYAFVEYSRPEDCASAIKHMNGGQIDGKLIRVSAFQESMLKAPWRQYRRYSPVNRRQSQRTLSRSGSSSRSRSPSRSASGSEYGSRSSHSRVRSMSGSRYSRRNRSQSCSYTRSSPRYGHYHRPRRDSRSP

SEQ ID NO: 10933 - DNA, 4291 bp, DROSOPHILA
aggtcgtatcttgtatctctgattgatgtacggtgtgccgtgagctatgaacaataaaccaatcaagagggacgagatgtcaaacgatttgtttgttcattgtgaggctccttctctttgaagcgtgtttacatgggcgagggacatcattaatgtgatgcacaggtaacaacccaatggttgtgctagagtctctagtttggcattacctcagctgtggaagttcatttctatttaaagcataaaatcccttctctgagtctgcaaacatgagcttagaacagctgtaattacatagtacatagtacatagtactttattctacttggcacaagtggacactgagaaatacgaattatccacaatatttagtactcgaaatctttgagcaatataggtatgtattttcccgcccttccgattcatagaccctaaccgtttccaattctggtgctaaattcaagtacaatttcggagaaacatctgataaatattgaaggatagagaacccgattgaatcttatatcgctcatctttattgtacataggctgaaaagagctttgttgtattgtatcagatttgttgagctttctgctggctgagatcgccaatctgcgatggcgagcaacccacgaggcaaagctcctaagcgatctgacggagcaaactcagctatggagtctttccagcacgcgtggctctctgggactcgtaatcccataaaatacataaccagcgaaagcttagccgcgtctcccagttcggcccctccctcactgcactggaaaaaaataatactatagagtggctgacttttctcaattgcactactacaccgacaatatactgcttacagattttataatcaacgagaaagaaagaactttttcttaacatcgaatagatatacatgctttgtgttcagtgtggctttttcttctggaacacaagcagctgcctcaacctcgagctcagtgcgaattgcgttctcgaagcgagcggtgtcggttgttgacccgtagtgttctagttggggtatttggattcagtagtagcagtagcgtcgtaaggatggccggacagcagcacgatatttcgcacgccaagcgggccgcctttcaggttttggccggcggctcggccggattcctggaggtctgcatcatgcaaccactcgatgtagtcaaaactcgcatccagatccaggccactcccgcgccgaatgccgcagctcttggtgaggtgagtgttcggagaggcaatgtagtttcccagatagttgcgaatgctataaagttatagccaaccaaagctcacatgcccgaaattataaatttggctcaattagcttatgtatgtacatatgtgtgttctatttacacatgttcgtatgtctaagcaccattgaattatttaaaatcccttccaatgacacaccacaaaatctataagaggtgacttcttctatagctggtaatcaccacaagattaagcggttagcacaaagatatagacaaaagatatctacttcttcgtccatcagctgtggcttgtttttgttttctttttgcgctggggccttctttttggataagggcaaagcaaggtcacagacaagctctccagtttctctattgttgtgagctggctccctatgtgtttacatttctcttgcgaaggaaaggggcgaaccatccacatttatcagcagtcgaagcaaatcgtcgctctcccgtaataagcttatcagtcgagtgaagaatatacatatatatgtacatatgtataaatacatgacaggccaaacattccccaatcgccatcgaaattatgcgccgatagcagacactcggcacgtgtgagggatactaacttgggtctagctgcaggcagcctaattaatacttaatttcggttgttttagctgctaagctagaccaactccacagcctatctaatctggattacgggtgttggccgcttttggagatcttcgggctatgtgcttagaacaccttaagataagacaaaggatcatttttgggaaaatttatatggtggctttaagaaattaccaaaaaatagaaaagtaggaatgattttgtggtacccagttctgggacgatatacgattcctaggaacattttgcgtgaagaccccagcaaaataatatcacaaaacattttcattttcttctgctcgtcgagacatgatgatttagcaaatttataagagcaaatgaaagcaaataaacgaagaaagcgccggaaggggacggggactagctggcgacaagagggaaattagcacaaatacagtatataaatacacacatacatagttcacacttccagttttgcgaaaacaaacagatacttgcagtccagtggaaacttgagtgatttcgagtaggtgttgtgccaatgccaatcagtgttttcaatattagtagtaaataacttatgatggtcaagctgttcgcagtcccttttttatattccacttctatttatcttctgcttgtattcccaatatctaggtgcactacaatggcgtcttcgattgcttcgccaagatgtaccgccacgagggcatctcctcctactggaagggcatcatgccgccaatcctggccgagacgcccaagcgggccatcaagttcctggtgttcgagcagacgaagccgctctttcaattcggctcgcccactcccacgccgctgaccttttctctggctggactgacagccggcacactggaagccatagccgtgaatcccttcgaggtggtgaaggtggcccagcaggctgatcgccaaaaaaagatgctcagcacgttcgccgtggccaagggtatcatacagcaggacggattgggcttcagcggcctcaacaagggcatcaccgccaccatgggacgcaatggagtcttcaacatggtgtacttcgggttctaccacagcgtgaagaacgtggtgcccgagtacaaggagagccatttggagtttctgcgcaaggtgaccatcggcttcctggccggcactctggcctgcttcgtcaacatcccattcgacgtggccaagtcacgcatccagggaccgcaaccggtccccgggcagataaaataccgaggaaccctcagctccatgggcatcgtctaccgcgaggaaggattccgagcgctgtacaaagggctcgttcccaagattatgcgtttgggcccaggtggagctattctgctgctggtcttcgagtactcctacgattacctgctccacaactactcctagtccttaagtcctcaagaggcaagcgccttctttgtttttttgtataatagtaagtcgattagtcgcgatcaatgccatcaaggggatgctactcttccgattgtgattcgtcaataaatgtatttttactttgtgttgaaaataaataatcaatgatatttttagaaaatttttaaatttaaatatgtaaatttaatatgtaaatttaatatgtatcctgcagcaggcgaaatgacgatctttctcgtgcaatcaaattacaaaagttctcgatttacggcaccaggcgcgcaaaaagatcaccgcgtgccaaacagtcagctgatcagtctaataagcgctttcttagtgatgcccgcgtgcctcttaattcgggaacccacccatgtaataccagggactttcgtgcctatcgtgctaattcgtgacacgaacatcaagaacatctaggccgctcatcactggtgtgcgctctgtttaaaattaacggttgtgccgctttcctattggtcaattggtaactggaaagatcggaagggctgccagcagcagcttgctagggattctgttggcctagtgtctgggacccgacagttgtcattttgactgggaaaaatgttctccgtccgacgtaaattttgtcagaaatttgtgaatatcagtggctggacaccaggcaaacaaaaattgccacatagggcagtaatcataaagtaactaacggtttctttccatctttggctttggtcgaatggggtgactggaaaggcgtaaggcgcagccatctttaaaaggatcagctgttttagttagtttgagcggacagctggcacctgttaccgtttctgttcgcctggtgtctgaaatcagaaaacttagcaatttgacactgaaaagggttgccacatttaattgcagcccgaaaatgtccctgaaaatgtcgtacacggtgcatgtattcgctaaatgtctagtgaagacacagaccgacaagtatttt

SEQ ID NO: 10934 - DNA, 993 bp, DROSOPHILA
cggtgtcggttgttgacccgtagtgttctagttggggtatttggattcagtagtagcagtagcgtcgtaaggatggccggacagcagcacgatatttcgcacgccaagcgggccgcctttcaggttttggccggcggctcggccggattcctggaggtctgcatcatgcaaccactcgatgtagtcaaaactcgcatccagatccaggccactcccgcgccgaatgccgcagctcttggtgaggtgcactacaatggcgtcttcgattgcttcgccaagatgtaccgccacgagggcatctcctcctactggaagggcatcatgccgccaatcctggccgagacgcccaagcgggccatcaagttcctggtgttcgagcagacgaagccgctctttcaattcggctcgcccactcccacgccgctgaccttttctctggctggactgacagccggcacactggaagccatagccgtgaatcccttcgaggtggtgaaggtggcccagcaggctgatcgccaaaaaaagatgctcagcacgttcgccgtggccaagggtatcatacagcaggacggattgggcttcagcggcctcaacaagggcatcaccgccaccatgggacgcaatggagtcttcaacatggtgtacttcgggttctaccacagcgtgaagaacgtggtgcccgagtacaaggagagccatttggagtttctgcgcaaggtgaccatcggcttcctggccggcactctggcctgcttcgtcaacatcccattcgacgtggccaagtcacgcatccagggaccgcaaccggtccccgggcagataaaataccgaggaaccctcagctccatgggcatcgtctaccgcgaggaaggattccgagcgctgtacaaagggctcgttcccaagattatgcgtttgggcccaggtggagctattctgctgctggtcttcgagtactcctacgattacctgctccacaactactcctag

SEQ ID NO: 10935 - protein, 306 aa, DROSOPHILA
MAGQQHDISHAKRAAFQVLAGGSAGFLEVCIMQPLDVVKTRIQIQATPAPNAAALGEVHYNGVFDCFAKMYRHEGISSYWKGIMPPILAETPKRAIKFLVFEQTKPLFQFGSPTPTPLTFSLAGLTAGTLEAIAVNPFEVVKVAQQADRQKKMLSTFAVAKGIIQQDGLGFSGLNKGITATMGRNGVFNMVYFGFYHSVKNVVPEYKESHLEFLRKVTIGFLAGTLACFVNIPFDVAKSRIQGPQPVPGQIKYRGTLSSMGIVYREEGFRALYKGLVPKIMRLGPGGAILLLVFEYSYDYLLHNYS

SEQ ID NO: 10936 - DNA, 4906 bp, DROSOPHILA
gtttgctgggagtatccgccggagcggtacaagcgtcgtccgcttccgccaccgtgccggggatcgaccattcccatccatttgctgaagccaaccttcaagcattgtgagaatatctactcccgctacgattttaagcttgagcagtgtgtgcacgagcaaactctagtagttgaccagaaaatgaaggccctgaagaatgagctggagcaggccaaaccatttcagattgagagggttaaggagatgcgttaccatggagtgcgttatcgcattttagccagctcgaccggatgcactaagacctatcccgagtacataagccggatgaccgaagagcgggccctttgcgagtttcagagagcctacaatatcgtcaatcagtcaaagtaagtctattaaaaatacacagccactgctaatttaaaactttttagcaccgatttgagcaatttatacctggacatgagtgagtcgaaaaaggagctagatcaacgcgtagccaggttggaccggtctttaggaagtacattcttgaaagagctagattcggtgctgcaaataatcgaggacttaaacacgtatttctttggcgtgatcgtgaagctaaagacgtgggcggagctgatggaccctatgaaagagcactctatagaggactatctggggcttttgagtcaggagacggacttccggacttttatgagtgccggcatggagaactgcacctgcaagcgttgcgacaagaaggatcccttgaagccgtaccttccgtgctggtgtcaaatggaatctagcgaggatgttacaaatcttaagaattttgacgacgattgtccaaagaacatagctggcatcacgcaacacgaaagtgacattgtgacacctagtgacacctccttgttagtgagggcagcggatgaaaaggccaggcttgcgatgaatcaggcggaataaagtctcattattattggttaatgaagtcaattgaatattggacttacctttccacaacgttgtagctctcaggatgcacccaagtgcaatctaatggattctgtagttgtcctccaacgcttcggggttcgatgcgcacaaaaccggcgcactggacaaacgatttctcacctatgcttcgcacggagagcagatccttccgtgtcttgaatggtcctttctgcgtacgatgctcaatgatcttttccgctttcttttccgacagaccagcaatgtgcctatatggtggagaatattaaaaatatataacttatttgacccttaatcacacatacttgagtacactcagactggctgtgttgagatcaacgccaacataactgacacactcggacacaacgtcattcagcgatgccgtcaaaatcttctcgggaacatcgtgctggtacataccaacccccaggtgacggggctctattttaacatattcactcaatggatcattcaaacgacgcgctatggacactatacaaaatatgtttgtttgtgttgcttttaatttgatcttcgtccaaacctgcgctcctttcgtttgtatccattttgggaaactccttggcggccacattgctgcaggagtaaatagatgctccattctcgttaacgatgctgtagcgaatgatcctgctgtccagaacgccggcatgaaacataccagttagccagtgctcagtttcgcgacaggcagtaccattgcccaggccaataattttacagcttttgggaaaggcaaaaaagacatattaataactatctttgcaaatcgaattcaaaatatatatatacttatgatctgaaagaagctgaaccaatttctgttcggcagcccgcttgtttgacatggcaccatgagggtaaataacaccagtgtacagcacatcagcagtctcggatataagtgccagcttgcatccatttataaaacccggatctatgcccaaaatgcgttcgcctttcaagggggatatcaacagtagttgcttcaggttcttggcaaacacatcgatggctgcctttgtgcctttttcttttaaagccgctcgaatctgcctgcacatcaagggctgcactgtaataagtaattaattaacatatcatatgggggtcttaatatattccatatcttacacttcttcgcgtagcactcctctaaggattttgtgaacacctcccttcttaatggatattgcaagccttggttcatgtactgatcggttatatagcgcatcagatctcttttaaggtaatcgttcgtttctatcttgacagaaagccatttgtgcttctccccacgattgatggctaacatttgataaggttttatagttttaacatcaccctggaagttgaaataattctcaaactttgagctatccaatttcttatctgcattttggttggatcctttactggagcttgctttactagaagaactagatttagacgatttcgcctccttggtcttgctgcacttgaggaatacccggtgcacgttttgcctagaacgatatagcaaataatttcaatagaaacttcctagttaggtacaagagcttacaatctgcgtatttcctccaaaacatttgtgtttttgctgatgttgtgaataataatttggcagattccagacatcacaagtgcctccgtagctaaagcctcatttcggcggtccacaatttcagaaaggttgaccttaggtgctgagccgtacagtaaacaatcggcgtacacctgcaagcccaaagctttggcgcgttccgccaaagtgcccttactggccggcttatagggggcataaaggaactccagttcttcgttggacttggcgcacattagctcctctcttatttccggagtcatgatgttttcacgctgcaatttaccaataatattctcagctcttttccgcagatcgacgatctctgtgtacgtgttccgaatatctctaaggcgatctggagcgatgtgatccaccagatctcgacggtacctgtcaggaaacaatgccaatataaatatatcaatgccaagataaatatatcaattatagcgtacctgcaaataaaaggtatggtattttcatcctcgaagagctttacaatatttcgagctgcctgcggttgtatgctctccgtttcggccaggagctcgtcgatgttccacacctttcgtcgctcccagaaggaactgcgtccagtggaagacttgttgtgtgaggagctggctacgatatcgtttggttgtgtcactgctgttgagggcacaacgtcccccttctcaggattagtctcattggctgccgttttcaagtcctccttatcctttctggcgcgttttctcttaggagccggagcttcggaattgtgttcagtgcctacggctccattccgttggtttgaagttgaaggtgtgtcctggactaccgattccggattgttctcattgggacaagcattctcgtccgccttttctttgtcgccccgctttttcttgggagctggtccctcagcagctgtttttttggatgttgggaaccgctggcgtttggtcctggaaggatatcgggtaaatatattattctttacaggataataagggtatgacttacacgacggtctgcgcatctgcagcgcgatctattatgcgactcttggtttcttccggcctgtaatcgtcgtctgccgtaagattcacttcctcatctgagtcggagatttcaattactatcttttttgtggatgccgcgcgtcgaggtcgtttcgacatgttgcaatctattcttaagattatgtttaataagcacaatattgcaattaatttacaatttattttatattcttaaaaaaggtaattaacaaatgaacttaacaatttctctttttgtgacctctttgatcacgaagtcgtaaatattcgattgcgagagacagctgttagcgccacttatcgataactataaaaaataaacagctgataaaagtggttaaatttggcagtttggttccatttttattcatttattaatgaaaatgctgaaatatgcatggcaaagcggtccaaaacaaagcaacaggtggctatggcatctttccaatcaaatctggaagcgtagctatagcagcaagatcaggaacataggcattctggcgcatatcgatgcaggtgagtaggagcactgcaaatttaaatactacttaacattactttgtcaatgaatctgtttcaggcaaaacaacgacaacggaacgcatgctgttctatgcgggcaagaccagagctttgggtgaagtgcatcgcggcaacacggtcactgattacctaacccaggagcgcgaacggggcataacgatctgcagctcggcagtaacattttcgtggaatgatcaccggtaggagtttcgtttgctacttcgcttacccgtaactcctgacaccatttaatccagcatcaacctattggacacacccggacacattgactttaccatggaggttgagcaatctctgtatgccgtggatggtgtggtcgttgttctggatggcacagctggcgtggaggcccaaacggtcaccgtgtggtcgcaggcggacaagcacaaattgccacgtctcatattcgtcaacaagatggatcgtcctgatgcggactttgaaaagtgcgttagcgatctgaaggataagctagaaacgcagcccgtttgcctacagtaccccgtgaaaaacgaagatggggttttaggtaagctctgtctacactcttttgaaagcttatctaagctccgccaattttagccatcaatgacgtgatcaccctggagcgactaagctggcagcaaaaggacttgggccgcagttacagaaatgtaaaactggagccctctgatgattt

SEQ ID NO: 10937 - DNA, 2487 bp, DROSOPHILA
aggtcacaaaaagagaaattgttaagttcatttgttaattaccttttttaagaatataaaataaattgtaaattaattgcaatattgtgcttattaaacataatcttaagaatagattgcaacatgtcgaaacgacctcgacgcgcggcatccacaaaaaagatagtaattgaaatctccgactcagatgaggaagtgaatcttacggcagacgacgattacaggccggaagaaaccaagagtcgcataatagatcgcgctgcagatgcgcagaccgtcgtgaccaaacgccagcggttcccaacatccaaaaaaacagctgctgagggaccagctcccaagaaaaagcggggcgacaaagaaaaggcggacgagaatgcttgtcccaatgagaacaatccggaatcggtagtccaggacacaccttcaacttcaaaccaacggaatggagccgtaggcactgaacacaattccgaagctccggctcctaagagaaaacgcgccagaaaggataaggaggacttgaaaacggcagccaatgagactaatcctgagaagggggacgttgtgccctcaacagcagtgacacaaccaaacgatatcgtagccagctcctcacacaacaagtcttccactggacgcagttccttctgggagcgacgaaaggtgtggaacatcgacgagctcctggccgaaacggagagcatacaaccgcaggcagctcgaaatattgtaaagctcttcgaggatgaaaataccataccttttatttgcaggtaccgtcgagatctggtggatcacatcgctccagatcgccttagagatattcggaacacgtacacagagatcgtcgatctgcggaaaagagctgagaatattattggtaaattgcagcgtgaaaacatcatgactccggaaataagagaggagctaatgtgcgccaagtccaacgaagaactggagttcctttatgccccctataagccggccagtaagggcactttggcggaacgcgccaaagctttgggcttgcaggtgtacgccgattgtttactgtacggctcagcacctaaggtcaacctttctgaaattgtggaccgccgaaatgaggctttagctacggaggcacttgtgatgtctggaatctgccaaattattattcacaacatcagcaaaaacacaaatgttttggaggaaatacgcagattgcaaaacgtgcaccgggtattcctcaagtgcagcaagaccaaggaggcgaaatcgtctaaatctagttcttctagtaaagcaagctccagtaaaggatccaaccaaaatgcagataagaaattggatagctcaaagtttgagaattatttcaacttccagggtgatgttaaaactataaaaccttatcaaatgttagccatcaatcgtggggagaagcacaaatggctttctgtcaagatagaaacgaacgattaccttaaaagagatctgatgcgctatataaccgatcagtacatgaaccaaggcttgcaatatccattaagaagggaggtgttcacaaaatccttagaggagtgctacgcgaagaagttgcagcccttgatgtgcaggcagattcgagcggctttaaaagaaaaaggcacaaaggcagccatcgatgtgtttgccaagaacctgaagcaactactgttgatatcccccttgaaaggcgaacgcattttgggcatagatccgggttttataaatggatgcaagctggcacttatatccgagactgctgatgtgctgtacactggtgttatttaccctcatggtgccatgtcaaacaagcgggctgccgaacagaaattggttcagcttctttcagatcataactgtaaaattattggcctgggcaatggtactgcctgtcgcgaaactgagcactggctaactggtatgtttcatgccggcgttctggacagcaggatcattcgctacagcatcgttaacgagaatggagcatctatttactcctgcagcaatgtggccgccaaggagtttcccaaaatggatacaaacgaaaggagcgcagtgtccatagcgcgtcgtttgaatgatccattgagtgaatatgttaaaatagagccccgtcacctgggggttggtatgtaccagcacgatgttcccgagaagattttgacggcatcgctgaatgacgttgtgtccgagtgtgtcagttatgttggcgttgatctcaacacagccagtctgagtgtactcaagcacattgctggtctgtcggaaaagaaagcggaaaagatcattgagcatcgtacgcagaaaggaccattcaagacacggaaggatctgctctccgtgcgaagcataggtgagaaatcgtttgtccagtgcgccggttttgtgcgcatcgaaccccgaagcgttggaggacaactacagaatccattagattgcacttgggtgcatcctgagagctacaacgttgtggaaaggtaa

SEQ ID NO: 10938 - protein, 787 aa, DROSOPHILA
MSKRPRRAASTKKIVIEISDSDEEVNLTADDDYRPEETKSRIIDRAADAQTVVTKRQRFPTSKKTAAEGPAPKKKRGDKEKADENACPNENNPESVVQDTPSTSNQRNGAVGTEHNSEAPAPKRKRARKDKEDLKTAANETNPEKGDVVPSTAVTQPNDIVASSSHNKSSTGRSSFWERRKVWNIDELLAETESIQPQAARNIVKLFEDENTIPFICRYRRDLVDHIAPDRLRDIRNTYTEIVDLRKRAENIIGKLQRENIMTPEIREELMCAKSNEELEFLYAPYKPASKGTLAERAKALGLQVYADCLLYGSAPKVNLSEIVDRRNEALATEALVMSGICQIIIHNISKNTNVLEEIRRLQNVHRVFLKCSKTKEAKSSKSSSSSKASSSKGSNQNADKKLDSSKFENYFNFQGDVKTIKPYQMLAINRGEKHKWLSVKIETNDYLKRDLMRYITDQYMNQGLQYPLRREVFTKSLEECYAKKLQPLMCRQIRAALKEKGTKAAIDVFAKNLKQLLLISPLKGERILGIDPGFINGCKLALISETADVLYTGVIYPHGAMSNKRAAEQKLVQLLSDHNCKIIGLGNGTACRETEHWLTGMFHAGVLDSRIIRYSIVNENGASIYSCSNVAAKEFPKMDTNERSAVSIARRLNDPLSEYVKIEPRHLGVGMYQHDVPEKILTASLNDVVSECVSYVGVDLNTASLSVLKHIAGLSEKKAEKIIEHRTQKGPFKTRKDLLSVRSIGEKSFVQCAGFVRIEPRSVGGQLQNPLDCTWVHPESYNVVER

SEQ ID NO: 10939 - DNA, 3015 bp, DROSOPHILA
cagcagagatgaaaattcgtttgcatttcgattttcagtcagttgagtttgcggcgtgcatttgtgatgttgttttggctttttcaagatctcgtcagccccgatccgtaaaccgcaattcgaatcgcttggaagccggcaactgaatggccaaaaccgattcataagaaacaacaaacaggtgtccgtgtgtgtcgccctctgggtcaactgatgtaaacaaaagtagctatatataaaatcacctaaatatatacatatatcgctatcatggtgatcgaaatgtgcttctgtgccagtgaacagtgaataacatgtctggccgacatatgggccagtctgggaatatttataaaaatttaatctacataaaaataaattctgctccaactcacctcggattttgcatccgctggggagtgcaatttatctgcggcagaggtggtcaggaaaatcaaacgtgaaaacttcaaagcacattttccgcttttcatcgttcggcttgagttatgcatcgcttttgtttttgacacctacacaacttttgtggcaacgaagggggaaatattgctgcaccagcgttcgcacctctttggctgtcttgatgataataaactgtggcgtgggttgcttcaacggtttaatctcacagatacgcgcacccaaagacctgaaacttgctgtgcggcccgcgttgcagatatgttgagtctttctcaagtttattgcagcttaaagatggtatttgccacacttttttaacgtcccacgaggtttatatcgatcgcctaggggtaatatgcaattcaagaaaatctagagcattaaattgttgttgagatactttctttgtttagctatatggttcgtagagtatatagattgcattaatagtgtacgtattgaatgaccctatgagcactgtttaaatggagaaattaatatataatgtatctgaagatagttacctaaaaacgaataacctctttccatcttttgcagcgatcgagtcgctaccacaaccatcggcacaaccagcggtcacagtcgctgaatcgcggacaggcgctctcgcaggcggacgtgagcggcatgtggtgacatcggggtgcctctggtaaagggtccccggtgtggaaaccacgagacatgataaatttaggcacagatccacagtcaacaacccgcaaagacgatgtgaaaaattaaatcagaaaaagcaaagcaaaacgtttagtatcaagctaagcaagcataagaactcttaatccacaacttcaaatcctctgttcgatttctcaattttacctaatcaagtgtaaggcaacggcaacagaaacagctaaaagcaaagcaaagcaaaagcagaaagcagaaagcaaaagcagaatgcaaacagcagaagcaagcagttcaaagttcaaagcaggcgaacccaaaagcatttttcaagctcaattctgcgatatgaagatgcattgaatcaccggccatcatcggtgtttggtgaatggatgtggttgttttttgaagaatgcttggcttcggtttgctttcgctcttttttaatggataaaacatcgaagagtttttgtcattttttacgtttgcgtttttaaacgggagaagcaccacgaaagggatgtcacagatcctttttagaaagagagaacaaacaaaaaaaaaacggaacaaaacctaaagcataaatgaaaaccaaaagagaagactttcatttatattgattgtatttaaagtgcaaaacatataataaaagcataattaaagcgaaggattttgagcaaatttaatatgaactaagtgaacagatttaacaaaattaagaaatacgagaacaaattcaaatgcatttgtcgctgaaaagacttgaaagtaaatttcgatttaaatacatacatttattgaggacaagacgaagaagcagctgtcaaagcgacgaggagggaaacccgtaaacaaattgcaaccatagtatttaggcttagagaatttaaattataaaaaagaaaacaaacgaagaccccagagatttgcaaaaaaaaatataagaaaaaagaatgaaacaaaagtcaaatgcaaagtaagcaaaaccaaagggttgaatgaaaaacattttagccaattaagccacacacacacacacacaaactgaagcaaatcaacacactcataagcgtaatgagaaaatttaaatgaaaacagcaatgaaaatgtttagttcgtaggaagtacactgaaaaaatacataaagataccatacaaaatccacacatacacataaacgaaaaatagcaaaaatttagtcaaaatgttaaatggtaaactaaatgaaaccgaaataataataacgaagcaaatgattccatgcaattaaattgggctaacagcctccacaaagaatccaatcagcaaatacaagcaaacaaaaattaactcaaagcaaactcaacacgttaaagcgggcgaacattaaattaaactataaaactatgcaaagaaaaccaaataaatgaaagtacataagcataaaaaagcaaaagaaacccaaataaaaaaaaagacaacaccttctagcagaattacaataataattaagaacttcactttgaacactttgaaacaaacacacgcgaatcgatatagttaaacaaaggaagcctattcccagcccaacaaaaaaaaaaaaatcccatagacaaaggcacagttttcgagaactcgattaaaggatacttttgattttcctacgtctcaataccctatggttttcaatttttgtaggacgaatttttagccagacgatgcaaatatataatcgaatacaatgaaaaaattctaccagatgagaaataataattaattggttgtgaatgcagcttggatgttaattcgattcaggaacaatgaaatccccaattgctgaacgtttgtttattttactggccgcacacacagcaggtgtgcgtgtgagtggcattgtcttttttttttcag

SEQ ID NO: 10940 - DNA, 7747 bp, DROSOPHILA
agcgatcgagtcgctaccacaaccatcggcacaaccagcggtcacagtcgctgaatcgcggacaggcgctctcgcaggcggacgtgagcggcatgtggtgacatcggggtgcctctggtaaagatgggtaacaaactgagctgctcctgtgccccgctgatgcgcaaggcctatcgctatgaggattcgccctggcaaagttcccgtcgtcgcgatggccatctattgagttcgttcaggttgtgggcagaggtcttccatgtatcagcgagcggagccggcaccgtcaaatggcaacaagtgtccgaggatttggttcctgttaacatcacctgcattcaggactcgcccgagtgcatctttcacatcaccgcgtacaacagtcaggtggacaagatactcgacgtgagacttgtgcagccaggcacacgcattggccaggcatcggagtgtttcgtttactggaaggatcccatgaccaacgacacctggggcctcaacttcacctcgcccatcgatgccaagcaattccgcgagtgctgttcgccttctttcaaattttcacgaaaggcctcgtcgtcgtactcgctgaaattggatccccccggcaagggcaaggtgaaggccaagcgaaagccgctcagcactccggcgtcgccgtcgcgcgtccgccaggagccccagtgcacctgcatgtccgccgagcagtatgcgcgcctgcgaaccgatccccgtgttagaggttcatccactttgccgcgtaacgttggttcgcaccgaatcaccgacgtcgacggccagcagcaggttggctccggaaaagtggtcagtgcggtgagcagcacctcgctgtacgacaacgtggccagcggtggtcccggtaccaaccagggagcagataccctgccgcgtcagatgaagggcggtcagcaggatagacaggatgtggccaatagtggagtcaataccaacactcctggcgtaattgtcaccggcgttggcaacgtcggctccgatatgtgcggccaaaatcacgtgggctcacaggtgggcaacgatgacccggccgcgtgccaaatggacatggatctctcgaagagcgagggcacacaggccggcggcggactgcatcagagcgtgggcacatgcacctcctcctccaagggcaccggcacccgcaacaaggactttggcgatgatatgacacgcgacgcgcactcgcacgacatgcaccagcataatgtaatcaacaacaacacccggcggaagaccaagagcaccgaggacatgaacgtggacaccagcacgctgaagcgcatgctgaaaccgatgcccagcaccgagtcgccggtgacctcgccggagatggggcgtcgtcgctataactactacaacgcgaatgcggcccagacattgggccacccgccgcacatgcaccagcatggaatggcgatgggaatgggcggtggcggaggcggcggccaccacatcatgaacaacaacacgatgggccgtgccagcagtcagtcgtcgcgattctccggctcgagatcctcgcatgaaatcggacgcggctatccgccacgtaatctgtacttggaactggagcgggaacgtagctgcatcgagggttcgccgccctcggacaatgttatgttcgacaaccagtgctatgcgaccacgccgagctccagcaatggcaactcggatcaggatcaatcctacggacagcagcaatcatcgggtcagcatccccagcagcagcagggaccgccgcagcgatcctcgcgacatcagcaccatcatcagcaggctcccaatgtgacacccactccgggctcacccacttcgcggctgctactcgagtacgagatgcatctgaggaacactctggccaagggcatggatgccgaatcctacagtctgcacactttcgaagccctgctctcgcagagcatggagaatttggccaatgcgaaatcttccacgctgccattgccgccacatcgaccattgtctaccattcgcgataaggagagggatcgcgatcgtgatggttactacagtgatcgcaatgagttgatcagggagcgggaacgcgaacgcgatcgtggctatctatcggatcacaattccagtttctccaactcgcgatgcgcctcttgcattggcgaatcggctcgtgcccagtggttccgtcactcggatggctggcgttccggaagttccactattggatccggatcgggtcatggcatgatgacccagcagattcctggctccggtcacaaacgttcgccctgggattcgctgccttcattgcgacaggatagcagtctcaacgattcgggttacaagagtgctcgtgccgattccctagaacaacgtgccgagtttatacgtcaggatagtttgcgatcagagtatttgagcgatcgcgagtcacgctacggaattgtcatttcggacgatgatcgaatgagcctaactaccgccgtttcggatgaagatgatggggaaagtgtcatggcgtcaccatataaagcaaaggcaactggcaccgctgcatcctccttcaattgcacgggagctgttcgcaaagccggcttcctatcggtaaagaaatggttactacgcaagaagcaccagatcgagctggcaagaaagcggggctggaagggctactgggtgtgcctgaagggcaccacgctgctcttctatccgtgcgattcccgggagggccggagtgtggaggcggcgcccaagcacttgattatcgtggatggtgcaattatgcaaccgataccggagcatcccaagcgcgactacatcttctgtctgagtacggcgttcggcgatgcctatctcttccaggcgccctgtcaggttgagctggagaactgggtgaatagcatacacagcgcctgtgccgccgcctttgccaggcatcgcggaaaaactggaacgctacacctgctccaggaggagatcttccggctggagaaggccattgagtcggatcacaagctgaagcacatggccgaactgcagcaatcagttgtcaccgatcaggagacgcgtcatcagatccagacgcagatactgcagtgggaggagaatctggagcggctccactgcgagcagttccggctgcgctgctacatggcctcgctgcaaagtggcgagctgcccaatccgaagtcgctgctgacacacgtttcgcggcccacgaagaacacgctgaacaagctgggcgtgttcacggtctcctccttccacgccttcatctgcgcccgctcgccctcgctgctcaacaacctgctcgccggacgcggggccaccaagcggcgaccgccgatgctgtcgcggtccaacagcggttccagccgtcgctccatgcagatgaattcacgtgacgaaccggaaaaaactttcaaagttgcaatgcccgacaatgcttactcgacagtttatctacgtgatgccatgtctgtggaggaattcctcgccagcgcctgcgcccgtcgcaacctcaatcccatggagcactttgtgcgcgtcaagaagcgacgtgacatggaggatcacaattactttgtgccgcatcgcaacgatctgattgaaaattatctacataatcacgagttcgtggaggtctgcatgaagatcctgtaccaggtggagctgcagcgcacgactctggagcagatgtggggcttctccgtggaggctgagctgatcgagaatgcggaacggcaggacgaactgtgctgctacgtgagtcgcgtggaggacaagagtgtggccatgcacaatggcattatcaaaggagacgaaataatggtcatcaatggcgcaattgtgtccgatctagatatgatgtacttggagagcgtcctgcaggaggaacaatcgctcagcatgatgatgcggtcctcgcgcacggagccaccagatctagtggggatcatgagggttacggacgatatgattgactcgctggtttgtccgccgccgcccacagatccgccggtgatgagcgaggagatgataactggactgattgttccggcccccggttggaatggcactagcaaggatttgtactcgccggaggctgaaagctcgccggccacctcctttgtggatcctgccgcaatggccgcccagctggcggtgggcggcctgggcgtggccaagccaacgtcgcgtacgagcagctttgagattgagaatctgctaaagaccgcggagcaagaaacgcggaaatcgagcccaaccggctcggtcacctcatcggtgtcgaccacggcattaacaccatcacggcagctgaccgatgcggagaagctgcgcaaagtcgtcatggagctggtggacacggaacgcacctatgtgaagcacctaaacaacctgctggagcactatctggagccaatgaaacgcgagacattcctgtccaatgccgagatcaacgctctgttcggcaacatacacgagatcgtcacattccagcgccaattcctgcagaatctggaggagtccttggacctggagccggatttcaacaagttcgagcactgcggccagttcagaaatgtgctctttgcgattggctcggccttcctgtactacgtcaatcacttcaagctctactcctcgttctgtgccagtcacagcaaggcgcagaaagtcctgcatccgaacgagggcaatcacgccctgcaggagttcctcgcagccaggaatcccaagcagcagcatagcagcaccctggaatcgtatctgatcaagcccattcagcgcatcctcaagtatccactgctcctgcagcagatgcgcaacctcacagacacccgggccgatgagcatgtgcatctttgtgaggcactcaagggcatggaaaaggtcgccgagcacatcaacgagatgcaacgcatccacgaggagtacggtgccatattcgatcacctgttccggcagcaccagaagtcttgcaaacaacccattgatctaagtccaggggatctgctctactatggcggagtggaatggctcaacatctcggactttctgggcaagatcaagaagggactggaactgcatgccatgtgctttgtgtttaagtcggcagtggtgttcctgtgcaaggagcgactgcgtcaaaagaagaagttgatgggcgtttccagcaagaatgccaccaatgaggtcgagatcattcgctaccaggtgctcatacccgtgaccgaggtgcaagtccgcgccagttcggccaaggacatggactcccacttcctgtgggagctcatccatctgcgttcccaattgcaacgccgctccgagaaggtctatgtgctgtccaacagcactgccgacttccgcaacgccttcctgaagaccattcgccagattatccgcgaaagcgtccggaacatgtcaattccgatgaagaactttggcggcagctccggctccgtctccggccattcctcgcagggcatgggcagcatgggctatccgggcaactctcagacgcttgaacgtcccaagcagcagatcaccatcgttcatggctcgcacactctgggcaaaccgaagaagaagtccggctcgcagcgccactcggctggcaacattgactacgacaatttgtcgggcagccaggaggcggacgacctgccacccagtgtgggcgtggtccactacgcctccggccacacccacggccagcagatgcagccagctggattccgcggtcgcagcaagacggtgggcgatgttacagaaatcacctgctcttccccagaacctcatcagcagcagcagcagcagcaacagcaacagcaacagctgatgcagcagggacacgcccatgcccacccacatccccatccgcatccaagggagccaccgccgcctccgatcaggcagccacatctgcaccatcacagctcggacatcgaaaggatcgatcctggaacgaaatcggagggcgaggaggactcgcagcagggcacaatcaggcccaaggccacactgggtcgaacgcccaatcacctgacgttgagcaccacatcgacgctctcggtgggcagcaccggcagccaggcgcgcctcattcaatcgtcgcatccaccggccagttaccagccggtgctgatgaaggacctagggtccccggtgtggaaaccacgagacatgataaatttaggcacagatccacagtcaacaacccgcaaagacgatgtgaaaaattaaatcagaaaaagcaaagcaaaacgtttagtatcaagctaagcaagcataagaactcttaatccacaacttcaaatcctctgttcgatttctcaattttacctaatcaagtgtaaggcaacggcaacagaaacagctaaaagcaaagcaaagcaaaagcagaaagcagaaagcaaaagcagaatgcaaacagcagaagcaagcagttcaaagttcaaagcaggcgaacccaaaagcatttttcaagctcaattctgcgatatgaagatgcattgaatcaccggccatcatcggtgtttggtgaatggatgtggttgttttttgaagaatgcttggcttcggtttgctttcgctcttttttaatggataaaacatcgaagagtttttgtcattttttacgtttgcgtttttaaacgggagaagcaccacgaaagggatgtcacagatcctttttagaaagagagaacaaacaaaaaaaaaacggaacaaaacctaaagcataaatgaaaaccaaaagagaagactttcatttatattgattgtatttaaagtgcaaaacatataataaaagcataattaaagcgaaggattttgagcaaatttaatatgaactaagtgaacagatttaacaaaattaagaaatacgagaacaaattcaaatgcatttgtcgctgaaaagacttgaaagtaaatttcgatttaaatacatacatttattgaggacaagacgaagaagcagctgtcaaagcgacgaggagggaaacccgtaaacaaattgcaaccatagtatttaggcttagagaatttaaattataaaaaagaaaacaaacgaagaccccagagatttgcaaaaaaaaatataagaaaaaagaatgaaacaaaagtcaaatgcaaagtaagcaaaaccaaagggttgaatgaaaaacattttagccaattaagccacacacacacacacacaaactgaagcaaatcaacacactcataagcgtaatgagaaaatttaaatgaaaacagcaatgaaaatgtttagttcgtaggaagtacactgaaaaaatacataaagataccatacaaaatccacacatacacataaacgaaaaatagcaaaaatttagtcaaaatgttaaatggtaaactaaatgaaaccgaaataataataacgaagcaaatgattccatgcaattaaattgggctaacagcctccacaaagaatccaatcagcaaatacaagcaaacaaaaattaactcaaagcaaactcaacacgttaaagcgggcgaacattaaattaaactataaaactatgcaaagaaaaccaaataaatgaaagtacataagcataaaaaagcaaaagaaacccaaataaaaaaaaagacaacaccttctagcagaattacaataataattaagaacttcactttgaacactttgaaacaaacacacgcgaatcgatatagttaaacaaaggaagcctattcccagcccaac

SEQ ID NO: 10941 - protein, 2045 aa, DROSOPHILA
MGNKLSCSCAPLMRKAYRYEDSPWQSSRRRDGHLLSSFRLWAEVFHVSASGAGTVKWQQVSEDLVPVNITCIQDSPECIFHITAYNSQVDKILDVRLVQPGTRIGQASECFVYWKDPMTNDTWGLNFTSPIDAKQFRECCSPSFKFSRKASSSYSLKLDPPGKGKVKAKRKPLSTPASPSRVRQEPQCTCMSAEQYARLRTDPRVRGSSTLPRNVGSHRITDVDGQQQVGSGKVVSAVSSTSLYDNVASGGPGTNQGADTLPRQMKGGQQDRQDVANSGVNTNTPGVIVTGVGNVGSDMCGQNHVGSQVGNDDPAACQMDMDLSKSEGTQAGGGLHQSVGTCTSSSKGTGTRNKDFGDDMTRDAHSHDMHQHNVINNNTRRKTKSTEDMNVDTSTLKRMLKPMPSTESPVTSPEMGRRRYNYYNANAAQTLGHPPHMHQHGMAMGMGGGGGGGHHIMNNNTMGRASSQSSRFSGSRSSHEIGRGYPPRNLYLELERERSCIEGSPPSDNVMFDNQCYATTPSSSNGNSDQDQSYGQQQSSGQHPQQQQGPPQRSSRHQHHHQQAPNVTPTPGSPTSRLLLEYEMHLRNTLAKGMDAESYSLHTFEALLSQSMENLANAKSSTLPLPPHRPLSTIRDKERDRDRDGYYSDRNELIRERERERDRGYLSDHNSSFSNSRCASCIGESARAQWFRHSDGWRSGSSTIGSGSGHGMMTQQIPGSGHKRSPWDSLPSLRQDSSLNDSGYKSARADSLEQRAEFIRQDSLRSEYLSDRESRYGIVISDDDRMSLTTAVSDEDDGESVMASPYKAKATGTAASSFNCTGAVRKAGFLSVKKWLLRKKHQIELARKRGWKGYWVCLKGTTLLFYPCDSREGRSVEAAPKHLIIVDGAIMQPIPEHPKRDYIFCLSTAFGDAYLFQAPCQVELENWVNSIHSACAAAFARHRGKTGTLHLLQEEIFRLEKAIESDHKLKHMAELQQSVVTDQETRHQIQTQILQWEENLERLHCEQFRLRCYMASLQSGELPNPKSLLTHVSRPTKNTLNKLGVFTVSSFHAFICARSPSLLNNLLAGRGATKRRPPMLSRSNSGSSRRSMQMNSRDEPEKTFKVAMPDNAYSTVYLRDAMSVEEFLASACARRNLNPMEHFVRVKKRRDMEDHNYFVPHRNDLIENYLHNHEFVEVCMKILYQVELQRTTLEQMWGFSVEAELIENAERQDELCCYVSRVEDKSVAMHNGIIKGDEIMVINGAIVSDLDMMYLESVLQEEQSLSMMMRSSRTEPPDLVGIMRVTDDMIDSLVCPPPPTDPPVMSEEMITGLIVPAPGWNGTSKDLYSPEAESSPATSFVDPAAMAAQLAVGGLGVAKPTSRTSSFEIENLLKTAEQETRKSSPTGSVTSSVSTTALTPSRQLTDAEKLRKVVMELVDTERTYVKHLNNLLEHYLEPMKRETFLSNAEINALFGNIHEIVTFQRQFLQNLEESLDLEPDFNKFEHCGQFRNVLFAIGSAFLYYVNHFKLYSSFCASHSKAQKVLHPNEGNHALQEFLAARNPKQQHSSTLESYLIKPIQRILKYPLLLQQMRNLTDTRADEHVHLCEALKGMEKVAEHINEMQRIHEEYGAIFDHLFRQHQKSCKQPIDLSPGDLLYYGGVEWLNISDFLGKIKKGLELHAMCFVFKSAVVFLCKERLRQKKKLMGVSSKNATNEVEIIRYQVLIPVTEVQVRASSAKDMDSHFLWELIHLRSQLQRRSEKVYVLSNSTADFRNAFLKTIRQIIRESVRNMSIPMKNFGGSSGSVSGHSSQGMGSMGYPGNSQTLERPKQQITIVHGSHTLGKPKKKSGSQRHSAGNIDYDNLSGSQEADDLPPSVGVVHYASGHTHGQQMQPAGFRGRSKTVGDVTEITCSSPEPHQQQQQQQQQQQQLMQQGHAHAHPHPHPHPREPPPPPIRQPHLHHHSSDIERIDPGTKSEGEEDSQQGTIRPKATLGRTPNHLTLSTTSTLSVGSTGSQARLIQSSHPPASYQPVLMKDLGSPVWKPRDMINLGTDPQSTTRKDDVKN

SEQ ID NO: 10942 - DNA, 7190 bp, DROSOPHILA
atatgcgttttggtctataataccataaatcatatgttatggactcataccattgtaaaaaaaaaacaaacccataccaggattttaggtccaccgtgattgaaagtcttcagtgggtgttttgggtggtactccgtgtttgaaggtcgtcagatatactgtagtgaaccagttccaccaaatagcactgtttttgaattatcagtccaaaggatatttcgccatttggagactggccagattaggtagattagattagattagataggttttagcgaagcttaaccttgccttaatatgccttcggctaagtagggaaacctttcgtggactcctcgcactgaaattttgattcagtagtcgtctccgaatagtaacgtccatgattcccaagttcagcttagactttatgtccctagaggatgcaaaaggataggctttgctctaacgaactatgcatcgatcctctataactgtggttttacatttgctaccacggctttcgggcttccattcatatttaatggcattggataccattttggcagaacattcaagggttttttaaatgtcattatatgtttgtccttaatttcttagctaaagaattaacattcttttctcctgggagcagtgctgtcctctacccactaaaatataatttttttaacttattgcccttttaaaaatacgaattatctaaccaaactcacgttttagaaaatattgtattgataatttcgggactttaagttggtcaaaaccagacactgctaacagcttaaaagttgtgattttactcaagaatgtaaataagaaaacgattgcatgaaaaactaacgggatattcttttttccctatttatccattttacacaaataagtggaataaaaagtcgattccgataagggacatgaaaaaatacctttgtattacttagtttccctcgcaatgctattattatgaacacagctgtacttaacccttctgcaggtgagactaacacacgctcaagtggtttgtattgagcaccacgcccgcagccatgtggcggtgggcatgggcatgggcgtggttgtgggcgtaacctacgtcgacagaggagtcggccaccaccaaacccacgcccacaagggtacttcccgccttgcccagaggcacgcctccgatgggcgtggtggccgtagtggttgtagagccggtgcccgtgccacctgtgctgaggctggtcccgctaatgtgagcactaatgccgctgggcacactggacatgtgcggagagctaccctcgtcggtcgaattattcgagttatgtgaattattagcagcggctgctgccgctactgtgcctgcattagcagcggtcctggtcagctcctcattgggtatggagaagtgcctgtatgatatatactctggcggcaaggcagcctgccgcttggcgttttcgatgcgcttcttcttcagcttgacataactcaaaaccgagatcattacgatgaacactatgatgcccaggcagcagcccacaatcagtcccaaccttctggtcaggatggagtgaatgaagccattgctggaaagaccgttctcgtcggtgaccaagctgggcgtggagtccagtgtctggacatctgtgcaggcggagatgtgagagttcttcagcacctccatcagagcgttatcctgaccgactacgttgtccaggtcctggtcaggattttgcttcttgttgtgatcctggaccatggctggattagcgttgccattggagttccggttgtgctgatgctgataaggcgaaaatgactcaggcagcggagctgacatcatcaccgcctcctcctcgcgcaaggactcgttggtatgaagccgttgcagagcgttcgccagcggctccgagagccaattaccgctcccgatgacacagatgtgatagcgggtattggggctcagcttggttagcttggtcgagctggccgtcccatttagccgcttgccgtggatctgtggaataaattaagcaggttgtaagacggttattgtcatcgccatgtagtcattgtcgtttccattctcattatcatttacatcagcatcccgccgatgtcaatgccgtgtcgctttattaaaaacgttccctgcggccctccgctttccgcgaccacagtggcctgttcgctcgcggtgtgttgatggagcacggcactttgagggctttaaagcgttagaaatatgtatgcagtaatgggcggacagaacggggagtcgggcattctgaaagggctgctaaagaacttcggacaacgaaaaaaagagctaaaaggattatggataaatgtgcaggtgtattcagacctctataactaaaggaactcgtaataatacttaagcaatgcatatctaataacaaatgccaagattagtcttgaaagcatttgctctttggaaaggtccttacctcatcggtggcaatggagaaccgctctctgtcccgctccctatcgcgatcccgctctcgtgaacgctctcgtgcctggtcccgagttcgctgcctttcggggtcgtgaatgtccctgagactgtcccgctcacggctcgttggagatccggccgtaacgagcccgtcgccagtggcatgataaacaatttcaaaaccgttgaggcccaaatggtcgcggctctgccaggacacgaccaccgagtagggctgaatgtcctggatggccattttgggtattagcggcgcgtcacaaaactgctgcggctccatacggccgaacaccttgccccgcagctccgttgggtgttcgcaccttaggtaattaatggaatcgccgcccagacctccggtcagtccgcctattcctcgtcctgcgccggagcccatggaaagcgaccatttacggtgatcccgcagccattcccagagcttctgggcgtcacagctgcaatgcagtggattctctgaaacgagcacgcaatatgaacaacaaattggccttgacaacggggcgacgaagagtaaaactgctatgtatgtttgaaaagctaaatatttaaaggcgctgcagccgtatgaaacgtttgtgaaaactgaaagtcaataattcgtgaaaatttagcatctaaaatgttgttgaggtctgtacttgttagtttgaaattgcattggaaagtcgaacaattgtttagaaggagtctttaaatgaaagccaccgacaaaaatggtgtttgtaaaattattttgtttcgttcaagaacaaaaaaagaaatagctaagcacttaccctccagtcttagggttcttaaattggtttccaggggccttagtggttccaacggcaccagctcgaaataatttttacgcagatccagaacatggagttttcttaagaaccggaaagcgtcgtttgatagaacagtcattcgattgcccataagaaacagttccagcagaccgtgaagatttctaaaggtcttctttgaaatacgatccagctggttaaagctcaggtccagagtttgcatctccaaaagatcgacgctaaactcctccaaatccttaagggtattatgcgaaatattgaggaaacgtagcagtcgaagtccttgcaatcgctctttgggcagcatttccaactcattgacactcaagtccagagtgagcagattggtcagagatttaaaggcgcccggagaaattctggtaattctgttgttcaccaaatggaggtgttgcaacgcctgaaaggcctcgaaatccttggacgtgagtatggaaaggttcgtttgacagatgtagagttcctttaggtagggataccgctcctcctttacagtataaatccgattaatagggttgccagtcaagttcaaccatgagagtcgtggtatggaaacatccgacaaagctgatgagggtatttgcaggaatcgattgttggacaagtgaaccttctgcaaattgatcgaatgacgcaagaagtttgccggcaaggagagtagcaggttgccactcaagtccacactgtccaactgggttaggttaacggcattaaagccactcaaggcggtaatcttattgtctctcaggattagttgcctaagatttaaggttccgcttagcttaaagaaatcaatcgaggccaattggtttcgggctagatccagactttccagagtgctgagattatagagggctatatgcggaaaatcggaaagttcatttctgcagagccgcaattccttaaacacattaaggccactgaagatattccgattgatctgggtcagtcggttgtcacacaggtctagtcttaccaaatttgtgtttttggcaaagagcaaatcgggtatttgccccaaactacaattagacatagagagttgctgcagagagcggagtctatctaacattccagccatgatgccaacagatccggcatagctgaagttgttatggctcaaaagaagtcttctgagatttggtatatccagcgtttgaatatccgctggattcagttggtttctttccagattgagctcattaagattggtcagtgatttaaacgcatgttgttccagtttccttagagaacaatttcctaaatttagggagtttaagggaaattcattgctgaaaatatcccgtgttagttgcaccagcggattgtgagaaaggtccagagacttcagattcttaagcttggcaaaggcataaccttcaatggcctctatgtgatttcgagctagactaagttcctcaagatcttgaagcggtgcaaaatagtcccttcttagttgtctcagttgattgccacttaagtcaaggaattgcagtagtaacaggtttacaaaagtgtccttttctatatctcttattttattgtcgctcagatacaacctccccaattgaggagtatcagcgaagaaagacctttccactctggtcaactgattgtcttttagccacataatttgcaccttctgttgccgactaaaggtgcgggggtgaactttgtgcaggtagttggcttctagctgcaccgaaagtagagaggaattttcgtctggaaagatatcttcgagtacagttagttgattatcctgaagattaatgtgctgcatattttccaaagtgtgaaacgcctgcggttcgatatcctcaatactgttcttctggatgtgcaactcttggagggagggcaggggctcaaacacgccccttcttacccgacggatgcgattgttgtgcagtctcacctccctcaggtgctccaactttcggaacatgcctatctccagatcctggatctcattgttgtctaaggacagtgatgtaagcttggtgctcttgtcaaacagggtaacaggtaggaggggtataaagtttgacctcaagtacaggtgatctaggttaaccagggtgctaaagacattgggatctatgtgggcgatggcgttggactccaagtaaatgacatcgacatttgtggagttggtaaacgcatctgccggcagctccaggatgttgttctcactcaggaagacctctcttaattgaggtaagttcgaaaacaccccaccaatagtgtgtatgtgattgtggctaagatccaccgtttgcaatcgcttgttcttctcgaataccttgggatctaatcctataatcctgttgtgtgacatgtccagggacatgagctcacgcaggctcttgaaagcctccggttgaaccaactctatctgattggcgtagaaggagagagtttttagttgaggaaaggccctgaagcagtcgggcccgatttcggcaaactgattggagctcaggtccagaaaaattaaggaaggcagctggaacgcacctactgcagccgccgctgccgacgcattgtttgtggccaactggatgtccccgtagaaggtgggtatccggttgtttgagagcctcaaaattcgcaggtggtccagttttcggagagccatcagtggaaaggtgcgcagtccattttctgagacgtctatctcctgcatgcactcctccagcccggcaaaggcgtgctccggcattccctgcagccggttgcccttcatattcagcttggagatccgcagcccgtagaagctgtagtcatccacccgcacgatctcgttgtagtcaaaatcaagggccgtcagcttttgcatcgagcttaaagcacgtgatggcatctgaaaatataaaaaatatatcttatttatttagacgttgtagacaaatattatatacttaggatcaggaagatattggcagggtctttgagctgtttacagagaagaaaataaatgactttttttcagaaatttaagtaaatgaagatttttagatgtagtttgtaaggtttgaacttaggatagtttaggatactgtgaattgatatggtgtcataatttcgacattggtggcttggttggctaggagaatcgatgacaatgggtcagtctgttgtgtcctagacgcagtccggacaagtggtgattgcaaagccttctaatttcatgtttctgttaccatttttgtaaaataacaataaccaacaattagccaacagactgaggagcataggtgagaacataactgcgcctccaccgaactggccgattagcagacttaacatgccagcaaataatttttatactcggggtcggcatatccgactttaagaagaataagtcaagattcttgatcagaatcacctgccatccaatcgatctgatcatatgcgatcccttttattccgatatcccgtttaataggaatacatttttacagccttttcatcgcatcttatatgctatcggaatatatgtacatatagtccacttttaattttcataaccattatcattaattgtatgttgtttggctttataaaacaaaacaaaagacaatgctaaagtcaagtcctcgactatcagattgcttaaaagttgcggagtgtgaaaggaggtgtgtggccacagtgtttttggtatagagataaaaattggcaagacaaacaatataatgcagaaaaatttaagcgttttttatgtgtgagtgagacggcgtggcaagaagttgtattggcaaatcgattgaaatttacaagactaataaaattatgaacaaaccaaaaaaaagtgtgtgggcggtttgttggcgatt

SEQ ID NO: 10943 - DNA, 4413 bp, DROSOPHILA
atgcaaaagctgacggcccttgattttgactacaacgagatcgtgcgggtggatgactacagcttctacgggctgcggatctccaagctgaatatgaagggcaaccggctgcagggaatgccggagcacgcctttgccgggctggaggagtgcatgcaggagatagacgtctcagaaaatggactgcgcacctttccactgatggctctccgaaaactggaccacctgcgaattttgaggctctcaaacaaccggatacccaccttctacggggacatccagttggccacaaacaatgcgtcggcagcggcggctgcagtaggtgcgttccagctgccttccttaatttttctggacctgagctccaatcagtttgccgaaatcgggcccgactgcttcagggcctttcctcaactaaaaactctctccttctacgccaatcagatagagttggttcaaccggaggctttcaagagcctgcgtgagctcatgtccctggacatgtcacacaacaggattataggattagatcccaaggtattcgagaagaacaagcgattgcaaacggtggatcttagccacaatcacatacacactattggtggggtgttttcgaacttacctcaattaagagaggtcttcctgagtgagaacaacatcctggagctgccggcagatgcgtttaccaactccacaaatgtcgatgtcatttacttggagtccaacgccatcgcccacatagatcccaatgtctttagcaccctggttaacctagatcacctgtacttgaggtcaaactttatacccctcctacctgttaccctgtttgacaagagcaccaagcttacatcactgtccttagacaacaatgagatccaggatctggagataggcatgttccgaaagttggagcacctgagggaggtgagactgcacaacaatcgcatccgtcgggtaagaaggggcgtgtttgagcccctgccctccctccaagagttgcacatccagaagaacagtattgaggatatcgaaccgcaggcgtttcacactttggaaaatatgcagcacattaatcttcaggataatcaactaactgtactcgaagatatctttccagacgaaaattcctctctactttcggtgcagctagaagccaactacctgcacaaagttcacccccgcacctttagtcggcaacagaaggtgcaaattatgtggctaaaagacaatcagttgaccagagtggaaaggtctttcttcgctgatactcctcaattggggaggttgtatctgagcgacaataaaataagagatatagaaaaggacacttttgtaaacctgttactactgcaattccttgacttaagtggcaatcaactgagacaactaagaagggactattttgcaccgcttcaagatcttgaggaacttagtctagctcgaaatcacatagaggccattgaaggttatgcctttgccaagcttaagaatctgaagtctctggacctttctcacaatccgctggtgcaactaacacgggatattttcagcaatgaatttcccttaaactccctaaatttaggaaattgttctctaaggaaactggaacaacatgcgtttaaatcactgaccaatcttaatgagctcaatctggaaagaaaccaactgaatccagcggatattcaaacgctggatataccaaatctcagaagacttcttttgagccataacaacttcagctatgccggatctgttggcatcatggctggaatgttagatagactccgctctctgcagcaactctctatgtctaattgtagtttggggcaaatacccgatttgctctttgccaaaaacacaaatttggtaagactagacctgtgtgacaaccgactgacccagatcaatcggaatatcttcagtggccttaatgtgtttaaggaattgcggctctgcagaaatgaactttccgattttccgcatatagccctctataatctcagcactctggaaagtctggatctagcccgaaaccaattggcctcgattgatttctttaagctaagcggaaccttaaatcttaggcaactaatcctgagagacaataagattaccgccttgagtggctttaatgccgttaacctaacccagttggacagtgtggacttgagtggcaacctgctactctccttgccggcaaacttcttgcgtcattcgatcaatttgcagaaggttcacttgtccaacaatcgattcctgcaaataccctcatcagctttgtcggatgtttccataccacgactctcatggttgaacttgactggcaaccctattaatcggatttatactgtaaaggaggagcggtatccctacctaaaggaactctacatctgtcaaacgaacctttccatactcacgtccaaggatttcgaggcctttcaggcgttgcaacacctccatttggtgaacaacagaattaccagaatttctccgggcgcctttaaatctctgaccaatctgctcactctggacttgagtgtcaatgagttggaaatgctgcccaaagagcgattgcaaggacttcgactgctacgtttcctcaatatttcgcataatacccttaaggatttggaggagtttagcgtcgatcttttggagatgcaaactctggacctgagctttaaccagctggatcgtatttcaaagaagacctttagaaatcttcacggtctgctggaactgtttcttatgggcaatcgaatgactgttctatcaaacgacgctttccggttcttaagaaaactccatgttctggatctgcgtaaaaattatttcgagctggtgccgttggaaccactaaggcccctggaaaccaatttaagaaccctaagactggaggagaatccactgcattgcagctgtgacgcccagaagctctgggaatggctgcgggatcaccgtaaatggtcgctttccatgggctccggcgcaggacgaggaataggcggactgaccggaggtctgggcggcgattccattaattacctaaggtgcgaacacccaacggagctgcggggcaaggtgttcggccgtatggagccgcagcagttttgtgacgcgccgctaatacccaaaatggccatccaggacattcagccctactcggtggtcgtgtcctggcagagccgcgaccatttgggcctcaacggttttgaaattgtttatcatgccactggcgacgggctcgttacggccggatctccaacgagccgtgagcgggacagtctcagggacattcacgaccccgaaaggcagcgaactcgggaccaggcacgagagcgttcacgagagcgggatcgcgatagggagcgggacagagagcggttctccattgccaccgatgagatccacggcaagcggctaaatgggacggccagctcgaccaagctaaccaagctgagccccaatacccgctatcacatctgtgtcatcgggagcggtaattggctctcggagccgctggcgaacgctctgcaacggcttcataccaacgagtccttgcgcgaggaggaggcggtgatgatgtcagctccgctgcctgagtcattttcgccttatcagcatcagcacaaccggaactccaatggcaacgctaatccagccatggtccaggatcacaacaagaagcaaaatcctgaccaggacctggacaacgtagtcggtcaggataacgctctgatggaggtgctgaagaactctcacatctccgcctgcacagatgtccagacactggactccacgcccagcttggtcaccgacgagaacggtctttccagcaatggcttcattcactccatcctgaccagaaggttgggactgattgtgggctgctgcctgggcatcatagtgttcatcgtaatgatctcggttttgagttatgtcaagctgaagaagaagcgcatcgaaaacgccaagcggcaggctgccttgccgccagagtatatatcatacaggcacttctccatacccaatgaggagctgaccaggaccgctgctaatgcaggcacagtagcggcagcagccgctgctaataattcacataactcgaataattcgaccgacgagggtagctctccgcacatgtccagtgtgcccagcggcattagtgctcacattagcgggaccagcctcagcacaggtggcacgggcaccggctctacaaccactacggccaccacgcccatcggaggcgtgcctctgggcaaggcgggaagtacccttgtgggcgtgggtttggtggtggccgactcctctgtcgacgtaggttacgcccacaaccacgcccatgcccatgcccaccgccacatggctgcgggcgtggtgctcaatacaaaccacttgagcgtgtgttag

SEQ ID NO: 10944 - protein, 1470 aa, DROSOPHILA
MQKLTALDFDYNEIVRVDDYSFYGLRISKLNMKGNRLQGMPEHAFAGLEECMQEIDVSENGLRTFPLMALRKLDHLRILRLSNNRIPTFYGDIQLATNNASAAAAAVGAFQLPSLIFLDLSSNQFAEIGPDCFRAFPQLKTLSFYANQIELVQPEAFKSLRELMSLDMSHNRIIGLDPKVFEKNKRLQTVDLSHNHIHTIGGVFSNLPQLREVFLSENNILELPADAFTNSTNVDVIYLESNAIAHIDPNVFSTLVNLDHLYLRSNFIPLLPVTLFDKSTKLTSLSLDNNEIQDLEIGMFRKLEHLREVRLHNNRIRRVRRGVFEPLPSLQELHIQKNSIEDIEPQAFHTLENMQHINLQDNQLTVLEDIFPDENSSLLSVQLEANYLHKVHPRTFSRQQKVQIMWLKDNQLTRVERSFFADTPQLGRLYLSDNKIRDIEKDTFVNLLLLQFLDLSGNQLRQLRRDYFAPLQDLEELSLARNHIEAIEGYAFAKLKNLKSLDLSHNPLVQLTRDIFSNEFPLNSLNLGNCSLRKLEQHAFKSLTNLNELNLERNQLNPADIQTLDIPNLRRLLLSHNNFSYAGSVGIMAGMLDRLRSLQQLSMSNCSLGQIPDLLFAKNTNLVRLDLCDNRLTQINRNIFSGLNVFKELRLCRNELSDFPHIALYNLSTLESLDLARNQLASIDFFKLSGTLNLRQLILRDNKITALSGFNAVNLTQLDSVDLSGNLLLSLPANFLRHSINLQKVHLSNNRFLQIPSSALSDVSIPRLSWLNLTGNPINRIYTVKEERYPYLKELYICQTNLSILTSKDFEAFQALQHLHLVNNRITRISPGAFKSLTNLLTLDLSVNELEMLPKERLQGLRLLRFLNISHNTLKDLEEFSVDLLEMQTLDLSFNQLDRISKKTFRNLHGLLELFLMGNRMTVLSNDAFRFLRKLHVLDLRKNYFELVPLEPLRPLETNLRTLRLEENPLHCSCDAQKLWEWLRDHRKWSLSMGSGAGRGIGGLTGGLGGDSINYLRCEHPTELRGKVFGRMEPQQFCDAPLIPKMAIQDIQPYSVVVSWQSRDHLGLNGFEIVYHATGDGLVTAGSPTSRERDSLRDIHDPERQRTRDQARERSRERDRDRERDRERFSIATDEIHGKRLNGTASSTKLTKLSPNTRYHICVIGSGNWLSEPLANALQRLHTNESLREEEAVMMSAPLPESFSPYQHQHNRNSNGNANPAMVQDHNKKQNPDQDLDNVVGQDNALMEVLKNSHISACTDVQTLDSTPSLVTDENGLSSNGFIHSILTRRLGLIVGCCLGIIVFIVMISVLSYVKLKKKRIENAKRQAALPPEYISYRHFSIPNEELTRTAANAGTVAAAAAANNSHNSNNSTDEGSSPHMSSVPSGISAHISGTSLSTGGTGTGSTTTTATTPIGGVPLGKAGSTLVGVGLVVADSSVDVGYAHNHAHAHAHRHMAAGVVLNTNHLSVC

SEQ ID NO: 10945 - DNA, 3448 bp, DROSOPHILA
atgacagcgccgaaccaaccaggcgcgcagaatgcatgcactagctaactctctttccgcccgccagagcgagacagctctaggctcggtggctgcaatgcagcatcgtagttccgtccctgtctgacgcccgtctttgaatgctgggcgccggtgcgcatttttgcgtctgaaagaaacaggtcgaagtcgggccaaaacccgcggaaatggtgattaatgcgaatgtagctgctcgaggcgaatgcccaatgccgctgtctggtcaattctgggcccctggtcctcgatgtcggaaaatgtcgtgcaagtgttcgctcgcactcgcatttgtcgctgcaagcgccagaaagagacgttacattttgaatttgacttgattttgcctccggtggtcgtaccgccaaagcgggtaattcaaatcgtgcagtcagtcgcatgtgaatgttgagttgaatgagtagaagtctgactgaaaggaatgtatgcattgtagccaggcttcattggcattgagaggcattataccaattagttttaaaaataaacaaaatgatttgaaaataagatattaaatttcataaataaaaaaataaataaaacaacaagctaaactatttaatacaattagctgtatgtactgaattaaatattttgatctctaatttcgttagagctacaacaattaacaattaacttagtaagcaatttttgtgcctgaaaaataaacatgtaaagcttgtaaaaatctgtaaattatatataaataaaagcgtagattctttgtaatttgtgaatctaaactttttttcacgctgactgtcgtaacctgaccgcctcagaaatgccttaagctgcggctaagacgttgggattatccttcctggaatgcacacgcaccccaaggtcaaatggtcaccacttaatccgtcttaattagattctttggcgggctataaaagcattttgacggcacttgccccagaccataggtgactcggaggccagaatgtcgacctgcaaaggaaactagattttggagcggatcaagcagtatgcacatcaacggcccaagtgggccacaggcctatgtgaacgatagcttaggagatggcagcgtctttccaatgggacatggatatccggcggagtaccagcacatggtgcacgcccactggcggggattccgtgaggcacctatctactatcacgccggtttctacattgcctttatcgtcctcatgctgtcgagtatctttggaaatggactggtcatctggatattctcgacgtgagtggaaaacccattaatccccacattaatccagacgaaatccattttctttcagttcgaaatccctgcgtactccatctaacctattgattctcaacctggccattttcgatctgttcatgtgcaccaatatgccgcattatcttatcaacgccacagttggctatatagtgggcggagatctgggctgcgatatatacgctttgaacggaggcatctccgggatgggagcctccataacgaatgccttcatagcattcgatcgctataagacaatatccaatccaatagacggacgtttgagctacggacagattgtactgctgatactcttcacctggttgtgggccactccgttctccgtgctgccattgttccagatctggggacgttaccagccgggtgagaagtgaattcatgaagactcttcaattactaaacattcttttcagagggcttcctgaccacctgctccttcgattacctgaccaacacggacgaaaaccgactgtttgtgcgcacgattttcgtgtggtcctacgtgataccgatgaccatgatcctggtgtcctactacaagctcttcacccacgtccgcgtgcacgagaagatgctggccgagcaggccaagaaaatgaacgtgaagtcgctgtcggccaacgccaatgcggataacatgagtgtggaactccggatcgccaaggcggccctcataatatacatgctcttcattctggcctggacaccctactccgtggtggcacttatcggatgcttcggggagcagcagctaatcacgcccttcgtctcaatgcttccgtgcctggcctgcaagtcggtgtcctgtctggatccctgggtctatgccaccagtcatcccaagtatcgtctggagctggagcgccgtctgccgtggctgggcatccgcgagaagcatgccacatccggaacatccggcggccaggagagtgtggccagtgtcagcggcgatactttggcactcagcgtgcaaaactaatggtacaattgtcagattaacgaagtgaaaactttctaaaaatcatacgtaattaagctaattagttgtaggtcgtgcaatgaactgaaagagttccaaaaaatacaaaccaaaaaaagttggcattaaaaaattattaaatctcttcttattcagggatcatattatcctaataaccctatcaagaaaatcacattgaagattgcattcaatccaatgttttaagggcatcccatcccatcctatctaagaacaccaaaaataaatcgaaacacttttgctcgactgctggctgcctcgtagagcgcacactcggaaacagaaactgaaacggggaaccgtaaaatgaaagcggcggcggcggctgcaaagtcaaaggcaaaggcgacggcaacggcgatttcaataggtggtggcggtccgggcagacagtccaaccaccggcgaggttgaagaagttgtgcttctttgttgcttgcgcacatccaaccaatccgaatacgaaaagcggcgtttcaattcagcgaatgttccacacgataccaggcgaacagagacgctagcgacggtttacaacatttggacgcgctcgttgaaagcgtgattggctggctggctggccgagtgggtgtgggtgtggttgtggtggtgatggtgggtagatcgagtccggatacctccggagcgaggagcatggcaacaatgttgcagttgctcgtactcgtactccaaggggatgggaagtagatgcgtgtgtgcacatagatatatatagccacagatacacatatggcatatagaccagtcggatgtgcgagcgagtggcgcaaagtggggcttcttcttgctctttaagaaacaacaaacatttttactaggtatccagcagatttagcagcatgccgcccggctagcgagcgattagatttccaatggaaactcaatagaaacgccgttagaagcagcgcacgcaggtgcgagcgagacgagcgtagggattagagagatgcacagatgtgatgtgccagtgcactcatcagcatctgaatgcttaatgctatgtggtaaatggtttggtgtggcccactcgattcaattctccggataatccaatttgtcgattcaattcgcttgcc

SEQ ID NO: 10946 - DNA, 1340 bp, DROSOPHILA
gaggccagaatgtcgacctgcaaaggaaactagattttggagcggatcaagcagtatgcacatcaacggcccaagtgggccacaggcctatgtgaacgatagcttaggagatggcagcgtctttccaatgggacatggatatccggcggagtaccagcacatggtgcacgcccactggcggggattccgtgaggcacctatctactatcacgccggtttctacattgcctttatcgtcctcatgctgtcgagtatctttggaaatggactggtcatctggatattctcgacttcgaaatccctgcgtactccatctaacctattgattctcaacctggccattttcgatctgttcatgtgcaccaatatgccgcattatcttatcaacgccacagttggctatatagtgggcggagatctgggctgcgatatatacgctttgaacggaggcatctccgggatgggagcctccataacgaatgccttcatagcattcgatcgctataagacaatatccaatccaatagacggacgtttgagctacggacagattgtactgctgatactcttcacctggttgtgggccactccgttctccgtgctgccattgttccagatctggggacgttaccagccggagggcttcctgaccacctgctccttcgattacctgaccaacacggacgaaaaccgactgtttgtgcgcacgattttcgtgtggtcctacgtgataccgatgaccatgatcctggtgtcctactacaagctcttcacccacgtccgcgtgcacgagaagatgctggccgagcaggccaagaaaatgaacgtgaagtcgctgtcggccaacgccaatgcggataacatgagtgtggaactccggatcgccaaggcggccctcataatatacatgctcttcattctggcctggacaccctactccgtggtggcacttatcggatgcttcggggagcagcagctaatcacgcccttcgtctcaatgcttccgtgcctggcctgcaagtcggtgtcctgtctggatccctgggtctatgccaccagtcatcccaagtatcgtctggagctggagcgccgtctgccgtggctgggcatccgcgagaagcatgccacatccggaacatccggcggccaggagagtgtggccagtgtcagcggcgatactttggcactcagcgtgcaaaactaatggtacaattgtcagattaacgaagtgaaaactttctaaaaatcatacgtaattaagctaattagttgtaggtcgtgcaatgaactgaaagagttccaaaaaatacaaaccaaaaaaagttggcattaaaaaatta

SEQ ID NO: 10947 - protein, 382 aa, DROSOPHILA
MHINGPSGPQAYVNDSLGDGSVFPMGHGYPAEYQHMVHAHWRGFREAPIYYHAGFYIAFIVLMLSSIFGNGLVIWIFSTSKSLRTPSNLLILNLAIFDLFMCTNMPHYLINATVGYIVGGDLGCDIYALNGGISGMGASITNAFIAFDRYKTISNPIDGRLSYGQIVLLILFTWLWATPFSVLPLFQIWGRYQPEGFLTTCSFDYLTNTDENRLFVRTIFVWSYVIPMTMILVSYYKLFTHVRVHEKMLAEQAKKMNVKSLSANANADNMSVELRIAKAALIIYMLFILAWTPYSVVALIGCFGEQQLITPFVSMLPCLACKSVSCLDPWVYATSHPKYRLELERRLPWLGIREKHATSGTSGGQESVASVSGDTLALSVQN

SEQ ID NO: 10948 - DNA, 9575 bp, DROSOPHILA
atagtatagtatatgtacatatatagtaatgttacttccttatgcacatcaaccactcaccaatcacgtagtcaaatgcaaagtgccgctccactggtgccaagacattgggtacggagttcttaagcagcgtgccggccaggacaacgatgatggagaggaatcctattacaataccagccaaaaccaggatctctgcaaggaaaaaccctcaagatgcagttgtttacagcaccaggaagcttactttggaatttcatgcccatgctgttccctgcgatgacgaaatcggactagttagcatatgagaaccgactaccgtggacttggtctaatccaattaaagaattcatggggtgagatttggttgggcgccaagtttgaatttcagtgcacgtcggatagagatgagctgttggcgaaagatgggcgcttagtgatgcgtcaccttgaatggaaaaattaggaaaaaaaaatattgattttatttgtttttaattttgtttttaacatacttacacgaaaacttaatttgttaagagaaactattcagctattccacaccagctattctagctcttttccctccaaatcgcatgaactgcacttcgacttgcagattgctatcgatttgttctcatcactggcaaggcaaccgttcgccacctaaattctttgtttttgcagtcggctgctccgaagatcgacggagtcggattatttgatcgactccaagctctgcgagataatatgtgggcctcccttatcactcgccagtggaagccgaagcctgaagccagaacagctgctagtcggtcagcagtggaaacaaaaggcgagctgtaacacaatagatcccgataatcagcagtggaagatcacttggcggagagccccaattcagaacagagcagtctgaacaatgaactagcattagtaccagtgaatcagcagagattagaagaacgttgcactcccgaggagccacaggtgtcccacaatggaggaccagcaggaggagaatatgcagcagctgctaaacttgttgcccaaggatcagcggcagatctttgaggtaagctaaggtaaccaacaaatatccatatactaagatatgcattttttacagatctttatccagtggctcaatggcaagtcctccgggcccattcaattgcaccagaacgccctgctaaccgtgcttcaggcgtcgccctatcccgccctgcaactgctacagttgctccacgaacggtccaaactgcacattggacaaataatttccaccttgcttcgacagctgctagatggcgatgtcgcatcgccgcgttccctttgtgtgctggccaattttccggcaagcgttttggaggcctctacacttcgtcagaaattgatgactcgtctagtggttgattccataaccagtgaacacttaatgctgaccatgttggcgcgcagcgatggacaactcctggatgatctgttgcatgagcagcaactgaccatgcgggcgcagtgtagtgaggcggcgcccactaaacttttggtcctgtggctggctctcaacgaaagggagcactttgtagccagcgtgtgccaacatctcaaggactttaagtgctttcaggatgtcacgttgaggaataacctgcttatccttcgactcgccaatgagtttgctctgggctcgcaaactttggaagagctgggatgcctggaaaaattgctagcggaattcgatgtcagcgctgtgcctgagaaattgcaggaagttcacgggtttttctatgctgactttcaacgcctgtccactttgcttaatttcttgcgtccgcgggagataagcaaaacgctaagagttgatgcacttctgcgggcgccaggcgttctgcccttgatccatgaaaatggtattcatttcaagcaccaagagctacaccgtttgattgaagatacttacaaatggcagcagctgacccctgcactaaagtgtcaccaccaggaggaggtggagattctgagctactacaccgctctctgtcatgtgtacgatgtggtcctcgaccaaggcgaacaaacgacgaagaccaagttggtacagctttccgtgcagttaaggcagctgcatcagctgggcgccttgtgctcgctgttggaggacatcttcctcttggtttttcttcgctgggaacagcttgagcccaacagtcagcggaaaggggaagatggcgagaatgacgaggaagatgatgaacagtacgtcgatgatgacgttgcctctccaccacgtccaaccgctgttcacagccagcgcacgcgttacggattcatctgccgctcggcctcgctgcacgctctgttcaccttcctcaaggcgtttgtcaccaaaaagattcattcacaagactacaagagcgcaccggagcagcaaggtagatttcagcgcctggtggatgctattagcgaagctctgtggaagctgggagttttacaaaagatagaacagtcactgctcaaatcggcgccatcgatcagctgcctgctagagcctgatcagctgctccagctggttcaacttcacagcacagccaagaaaaaggcctccagcgacgacgaaagccgggaacgcagcaaccatgcctccagtctcaaccggcggaaggctcgaaggcagcgacgggcggtcagctttagtggaggagtagctggaaaagcatccgcggatggaggtctcgcaatggagcagctgcgggcacgagctcaattacttagtggcagtggcagcaggaaaaattcttcggtaacctctccatgtgagcggtccattattcccaaaatgcttagcacgccagaacaattggccatcatggcgctcgccctaaagaattttaacgatgttaagaagatcatcgaggtaattagatagaaattttgtaataaccgtcttttttatacgttaatgttataaaatgttcctttccagacttttcacctggagcacagccaattaaaccgtgagctacatttcatggagcagcagcagctggtgaagcagaaactgtccgccatttacgccaactatcagattttagaggggcagcaggccaactctggcgagaccaccgtggagcaaattaagggcgtggcagctaagggttttgagttgtccaagatcatcagcgttgtggacaatttttcgcaggcccaccgtcttcagcaaagcccagaactaaaggcgctcatccagcgacacaatactagcgcacaacagggattcctacaacagttcgaggagcgcaatctgaacgccctaatcatatgtgatcttatagtgaatctgggcttcaatcgtgaaatcacaagcaaccttttactggtcattcgacgccaacagcagcagaagaagggcggcgacgaggcgtccaatacgcctggttcgtctgagctcggagctatgaatctcctgcagaatctctgtgagtgcatgcgtttgttagagcgatctggtcagcaggctgcactgaatgagttgctctctctgaagagttatccattgaggccggcagtcttggctctacaacttcaacgggaggctgcgtttcaaacgctctaccagaaggagccatccgagtactcgcatgggcatgagctgcgctccaacgccaatcagttccaacagctgcgttcgcgtcacaactactacgcccgcttctgcacgtatgtccaacaactagcccgcctcttgcagctcagggatcccaacctggagtatcacactacccagctgcttcgcaacgatccctacgaagttattggcgaactgatctacgagtgtggcataacacccttggagatcgaggcaagtgtcgctgcactacaccttaatctcgtccacgtcattgctctcaacatttgtccccaattgagcgaggaacccaccaaaagattgccacgcgttgtagctccacagaagcaggaatccattcacaactatatttcgcaacacaaccagttgttggcccatatattgctggccatacagctaggaagtcttcccgacggcgatgcagatgtggacttttcttttctgggtcacctggttcatttgtctgaagtgaatgttctggcttccgtgtacgacggcaaccgtgtgctggccgctttaaatgcctacaagctggaaagtgcgcgactggatcagttggtgacggatcaggaacaattattgcagattcttctccttggtatgagtggacaaacaggtagctataaccaaggtatattcacattccacctctaaaagttatctattcttatagattcccccaatcgtcacaagtcacggattgaccaacttattggtgatcttattgaaaaggatccgcgtaatatacatcttgtggtccacatggggaatctgggacagcgagcacagctgctcaaggagcacttcacgcgtattcccagcagccagcaggccaaggagctaatagaacgcaccttgcaccatcgttcggcagctaagtcaattcccaccgccctgcgcagtgaactggagcacacgctgtctgacatcaccatatacgctagagtctcggctctgctcaaattcgagagctggccacaggcctacgactttggacgtcagacgccgaatgtgatcttcgagcagttgctgcagagacggcgatttggtctgtgtttggagtggagtcgggtggtttaccttgctggatccgcggggcagcagcgggtgtgcttgctcaccctattggatgctctcttggaattgagggatggcgaggagctggatgaatcccttttgggcattgtggagatgtttccacccaatccattggtgaatttcctggatacacataaggataagtttagatcgctgccacttctgcagtgggtgatcgattacctggagggtcacgcccgtgatccacgtctatacaggaactatcagctatcccttgaattcctacgacaaatggataccaacgagcgatctccgttttggaagctaatccgtcatcctttgctcatcgtagagcagttagtgatgaatgctcgctttgaattgctgggaaagctactagatgcggctcgttccaagttgctaaaggagagaccacttggaccatgtccgtactgttttgacaaaacgggccatgtctatgatgtccagtccagtgctggtttaggaagtggagcgggagaaacaccggcaaagatacgttttcaactgggacaaacaacatccgaggcttttattctgctcaacttcaattcctaccagcaggatcactttgtgggtcaggattgtttggacctattactgcgaatttacgccagcaaagctctggactaccatgtggcgaatgtgcgtgctgcttctgagcccagttctcttggcacagatgtacataattcactggactctctttgtggtgccttcgtgatgcccaagcaagcacccaaccgacagcagtggacgcgggacgaggaggccagccactgcatgtgctgtcgccgagcagcattcactatgttgatgcggagacatcattgccgtaggtgcgggcgggtggtatgctacgcctgctccacccatcgaatacgcatcccagagctttacgacgagttggaggtgcggatctgcaacgattgtgcagcgtgcagcacgcctgccaaggatcaaggtgatggcacttctagtgagcggagtgctatctcgggacaagtatcaaaatcttctggacggagtgattcctgcaaatggcagttgagtgggattattacacacgataaactgctgcgcgaggagttctcctatgaacacgcgcccagtgtggccctcagtttgtccatacttcgcaatcatgtcgagcagcgcagttgcgttgatttgctgctcttccactgtcgcaaactggaaaagctaattgtgcccaatccagaggtggactacggtttggtggccaagatgataaactgtctggctttcgccgcaaaagttggttgtccatctgaaactaaaatggagttgtaataaaaatgttcttacttattctaggttcgtggcgcaccaggagagctggaaaacattcgtgagcactcggaaattataatggcagtggttcagcagggctgtgagtcgctgatcccaactggaccgctcaataaccacaatctgcgcaagctggctgacgctttggtggaagcggagcactggactctagctctggaagtgcatctgaagtgtggtttcgccaccaccggcgtaatggcggcccacggactagcctgccttcgtgctggttgctatgatgcaggtatgctcattcctttaccctcataaagctccaaataaattaatctcttttttagcccgagaaaagtttgcgcactgcatgactcgcctctcaagtgagcagctcaatagcagcatctgtaagaacattttcggagtggcttctacggaggcagtgctcttgcccagaaagcgaccacagcgcggaccggcactgcttcaagaaatcctacagttgatagccgccattcctcaagttcaaacccaaccggagacccttcaccgagcctcacttattcgtagttcgaatacttctctggcctcacttttcacacgacgtcgggagccctacgttcagccacgtccgctccaggaaccggctttgaacatcatgaacgcgctggcaggactcaagaacctagccaagggacagtatggtggccaaatgccaactagcgaggaaagtcgccggcaggagcgtggcttcgaggaatcactgcactatgtgcttacctatgggagtcacgccgatattctcacctttctgatgcgccgcgaagagctgcgggcagcacttcgctactggcagcaccagcagttggacgcggatctctttatccatcacatattctacccgcagctggccaacggcggcctaaacgttttgatggacgaactgcagcagctggacgacgctcaattcactgcctggcgtctgccactactgcagacctgtcgacatctggagcagcagcagcaactcagttcgctgtaccaactgcagctgctgctaaaggatcccatccgggccagcatgacgtgcgtgaagttctacgccttgcagtgcgagaactttcagaagctgcatgccaacgcccagcacttgctgtctgccctcaggcatcttcagggtgaactggatatggcggaatgggagcacctgcagcggcagcaggctcgcagaaacagcgtgagtagcacagcaagcgttcgaggtgcctgcttcgccatgcaaatggatgccagggctctcaatggacacatcaataccatccggcgacagttggaagtggctaagttcttggacaagtgtgagcgagaacagccgccagatgagccactacgaactatacaaactctgaagcaggtactgtcttgaattgcgtttattctttctttaactaataccaaacttaacctccgcaaagattcgactagagtccagtcgaggaactctacctactctgttcgaaggcgccgcagatcggatacaaatttgcattctgatcctcatgtgcggtaagaacatagacgaaggttttggcctggcttacgggtaagcaaaaagataaaatcaagacgacaatgtcagctataattgttttatttttagcattatgcaggacttcaagctggctgcacttaaggtgtttggagccactgctaagtacctgtcgagaaatcagcgcttgggtgaggtagagcgtctgctggactgcataggaagcaacaacggcggagacatttccacggagtccgatgaaatactctcgattgccattaatgctgctgtgcacagcagtgcgccggagacgaaacagatgctggatcggttgatcaaacgcatcggcagcgtggagctacgagtctcctcctacatctacattgggcagcttaaatccgcctatctgctggccaacaagcacgatcgattggcggatatccggcgaatcctgcggcaggcggagcttaccggtcaggttcacatcaagaaactgtgcgatatgaagctccagctaagcgccgcgccaacgcctctgtgatatcccaaccctcgagcaataacacattagtaaccccttgtttctgggatttactagctgtgagaaataccaaatgatgaatttgtagctttgaaaactcctgcattctaaaagacaataacatatctaagcaaattctcaattttgagatttagatgaatatatattattcggaattggaattcatcttttgattattcacctagtgaaggcccaagttgttttgtaactgagctagcatagataatttgtttttagaatttaacatatatgtagatcaattttaatctttccaaagggccagcaagtattccaccctccagctcaaaaagactctcccagcatgtaaccaaattatattattgattgtactgtattttatatttattatgttatttttatattatactgttatatgtttattacccagaaaatgcgcgatatttttgaattcttggggcgacggtcaacactgctcgtgtcaagtttaccagcactgacaaagatctaaataagtggtaaataaatagaataattaagaaatgcgtgcggttatacaaagggttaaggctgccaaagtgacgggtatgcaggatcaaatagttaccatctatcatataattttatactgctcccctagtgttggatgagctggtgtcctccattggaccaggcctgtgcgtgctggtgggaatcaaggccagcgacaccgccaaggatgttgagtatctgtaggtaaattccactctggtgataaccaccttaggtttagaccacctaacacagcttaccattcaagtgtccggaaaatcttggctctccgtttattcgaggaggagggcaagcgttggcaaaagtccgtgaaggatctgaacctagaactgctgtgcgtctcgcagtttacactgtatcaccgccttaagggcaacaaaccggattttttggctgccatgaagggcgaggaggcgcaggagttgtacaatcaatttttggatcgcctaggtcaatcctacgatagcaccaagattaaaggtgagtgataggaacactccagctggtcatgttttaatctcacttactataatagatggcaaatttggagcatacatgcaagtgcacatagaaaacgatggacccgtaaccattaatttggagtcccccgaacaaaaggatactgacagagaagtggacaaatgatttgaaaatatataacaaccaaagacaacatttatgtaccacggggtttttatataatgtattttttagcagcaacttaaactaagaaaaaatcagcgtactcgtccttaggcttctaacatctcgagatcctcgacccccattccctcctccagtttcttctcgagttcgcgtgcatccacgtaggtgatcttctcctcgggcagatcctcctccatgagggcggcctcctc

SEQ ID NO: 10949 - DNA, 6961 bp, DROSOPHILA
atggaggaccagcaggaggagaatatgcagcagctgctaaacttgttgcccaaggatcagcggcagatctttgagatctttatccagtggctcaatggcaagtcctccgggcccattcaattgcaccagaacgccctgctaaccgtgcttcaggcgtcgccctatcccgccctgcaactgctacagttgctccacgaacggtccaaactgcacattggacaaataatttccaccttgcttcgacagctgctagatggcgatgtcgcatcgccgcgttccctttgtgtgctggccaattttccggcaagcgttttggaggcctctacacttcgtcagaaattgatgactcgtctagtggttgattccataaccagtgaacacttaatgctgaccatgttggcgcgcagcgatggacaactcctggatgatctgttgcatgagcagcaactgaccatgcgggcgcagtgtagtgaggcggcgcccactaaacttttggtcctgtggctggctctcaacgaaagggagcactttgtagccagcgtgtgccaacatctcaaggactttaagtgctttcaggatgtcacgttgaggaataacctgcttatccttcgactcgccaatgagtttgctctgggctcgcaaactttggaagagctgggatgcctggaaaaattgctagcggaattcgatgtcagcgctgtgcctgagaaattgcaggaagttcacgggtttttctatgctgactttcaacgcctgtccactttgcttaatttcttgcgtccgcgggagataagcaaaacgctaagagttgatgcacttctgcgggcgccaggcgttctgcccttgatccatgaaaatggtattcatttcaagcaccaagagctacaccgtttgattgaagatacttacaaatggcagcagctgacccctgcactaaagtgtcaccaccaggaggaggtggagattctgagctactacaccgctctctgtcatgtgtacgatgtggtcctcgaccaaggcgaacaaacgacgaagaccaagttggtacagctttccgtgcagttaaggcagctgcatcagctgggcgccttgtgctcgctgttggaggacatcttcctcttggtttttcttcgctgggaacagcttgagcccaacagtcagcggaaaggggaagatggcgagaatgacgaggaagatgatgaacagtacgtcgatgatgacgttgcctctccaccacgtccaaccgctgttcacagccagcgcacgcgttacggattcatctgccgctcggcctcgctgcacgctctgttcaccttcctcaaggcgtttgtcaccaaaaagattcattcacaagactacaagagcgcaccggagcagcaaggtagatttcagcgcctggtggatgctattagcgaagctctgtggaagctgggagttttacaaaagatagaacagtcactgctcaaatcggcgccatcgatcagctgcctgctagagcctgatcagctgctccagctggttcaacttcacagcacagccaagaaaaaggcctccagcgacgacgaaagccgggaacgcagcaaccatgcctccagtctcaaccggcggaaggctcgaaggcagcgacgggcggtcagctttagtggaggagtagctggaaaagcatccgcggatggaggtctcgcaatggagcagctgcgggcacgagctcaattacttagtggcagtggcagcaggaaaaattcttcggtaacctctccatgtgagcggtccattattcccaaaatgcttagcacgccagaacaattggccatcatggcgctcgccctaaagaattttaacgatgttaagaagatcatcgagacttttcacctggagcacagccaattaaaccgtgagctacatttcatggagcagcagcagctggtgaagcagaaactgtccgccatttacgccaactatcagattttagaggggcagcaggccaactctggcgagaccaccgtggagcaaattaagggcgtggcagctaagggttttgagttgtccaagatcatcagcgttgtggacaatttttcgcaggcccaccgtcttcagcaaagcccagaactaaaggcgctcatccagcgacacaatactagcgcacaacagggattcctacaacagttcgaggagcgcaatctgaacgccctaatcatatgtgatcttatagtgaatctgggcttcaatcgtgaaatcacaagcaaccttttactggtcattcgacgccaacagcagcagaagaagggcggcgacgaggcgtccaatacgcctggttcgtctgagctcggagctatgaatctcctgcagaatctctgtgagtgcatgcgtttgttagagcgatctggtcagcaggctgcactgaatgagttgctctctctgaagagttatccattgaggccggcagtcttggctctacaacttcaacgggaggctgcgtttcaaacgctctaccagaaggagccatccgagtactcgcatgggcatgagctgcgctccaacgccaatcagttccaacagctgcgttcgcgtcacaactactacgcccgcttctgcacgtatgtccaacaactagcccgcctcttgcagctcagggatcccaacctggagtatcacactacccagctgcttcgcaacgatccctacgaagttattggcgaactgatctacgagtgtggcataacacccttggagatcgaggcaagtgtcgctgcactacaccttaatctcgtccacgtcattgctctcaacatttgtccccaattgagcgaggaacccaccaaaagattgccacgcgttgtagctccacagaagcaggaatccattcacaactatatttcgcaacacaaccagttgttggcccatatattgctggccatacagctaggaagtcttcccgacggcgatgcagatgtggacttttcttttctgggtcacctggttcatttgtctgaagtgaatgttctggcttccgtgtacgacggcaaccgtgtgctggccgctttaaatgcctacaagctggaaagtgcgcgactggatcagttggtgacggatcaggaacaattattgcagattcttctccttgattcccccaatcgtcacaagtcacggattgaccaacttattggtgatcttattgaaaaggatccgcgtaatatacatcttgtggtccacatggggaatctgggacagcgagcacagctgctcaaggagcacttcacgcgtattcccagcagccagcaggccaaggagctaatagaacgcaccttgcaccatcgttcggcagctaagtcaattcccaccgccctgcgcagtgaactggagcacacgctgtctgacatcaccatatacgctagagtctcggctctgctcaaattcgagagctggccacaggcctacgactttggacgtcagacgccgaatgtgatcttcgagcagttgctgcagagacggcgatttggtctgtgtttggagtggagtcgggtggtttaccttgctggatccgcggggcagcagcgggtgtgcttgctcaccctattggatgctctcttggaattgagggatggcgaggagctggatgaatcccttttgggcattgtggagatgtttccacccaatccattggtgaatttcctggatacacataaggataagtttagatcgctgccacttctgcagtgggtgatcgattacctggagggtcacgcccgtgatccacgtctatacaggaactatcagctatcccttgaattcctacgacaaatggataccaacgagcgatctccgttttggaagctaatccgtcatcctttgctcatcgtagagcagttagtgatgaatgctcgctttgaattgctgggaaagctactagatgcggctcgttccaagttgctaaaggagagaccacttggaccatgtccgtactgttttgacaaaacgggccatgtctatgatgtccagtccagtgctggtttaggaagtggagcgggagaaacaccggcaaagatacgttttcaactgggacaaacaacatccgaggcttttattctgctcaacttcaattcctaccagcaggatcactttgtgggtcaggattgtttggacctattactgcgaatttacgccagcaaagctctggactaccatgtggcgaatgtgcgtgctgcttctgagcccagttctcttggcacagatgtacataattcactggactctctttgtggtgccttcgtgatgcccaagcaagcacccaaccgacagcagtggacgcgggacgaggaggccagccactgcatgtgctgtcgccgagcagcattcactatgttgatgcggagacatcattgccgtaggtgcgggcgggtggtatgctacgcctgctccacccatcgaatacgcatcccagagctttacgacgagttggaggtgcggatctgcaacgattgtgcagcgtgcagcacgcctgccaaggatcaaggtgatggcacttctagtgagcggagtgctatctcgggacaagtatcaaaatcttctggacggagtgattcctgcaaatggcagttgagtgggattattacacacgataaactgctgcgcgaggagttctcctatgaacacgcgcccagagagctggaaaacattcgtgagcactcggaaattataatggcagtggttcagcagggctgtgagtcgctgatcccaactggaccgctcaataaccacaatctgcgcaagctggctgacgctttggtggaagcggagcactggactctagctctggaagtgcatctgaagtgtggtttcgccaccaccggcgtaatggcggcccacggactagcctgccttcgtgctggttgctatgatgcagcccgagaaaagtttgcgcactgcatgactcgcctctcaagtgagcagctcaatagcagcatctgtaagaacattttcggagtggcttctacggaggcagtgctcttgcccagaaagcgaccacagcgcggaccggcactgcttcaagaaatcctacagttgatagccgccattcctcaagttcaaacccaaccggagacccttcaccgagcctcacttattcgtagttcgaatacttctctggcctcacttttcacacgacgtcgggagccctacgttcagccacgtccgctccaggaaccggctttgaacatcatgaacgcgctggcaggactcaagaacctagccaagggacagtatggtggccaaatgccaactagcgaggaaagtcgccggcaggagcgtggcttcgaggaatcactgcactatgtgcttacctatgggagtcacgccgatattctcacctttctgatgcgccgcgaagagctgcgggcagcacttcgctactggcagcaccagcagttggacgcggatctctttatccatcacatattctacccgcagctggccaacggcggcctaaacgttttgatggacgaactgcagcagctggacgacgctcaattcactgcctggcgtctgccactactgcagacctgtcgacatctggagcagcagcagcaactcagttcgctgtaccaactgcagctgctgctaaaggatcccatccgggccagcatgacgtgcgtgaagttctacgccttgcagtgcgagaactttcagaagctgcatgccaacgcccagcacttgctgtctgccctcaggcatcttcagggtgaactggatatggcggaatgggagcacctgcagcggcagcaggctcgcagaaacagcgtgagtagcacagcaagcgttcgaggtgcctgcttcgccatgcaaatggatgccagggctctcaatggacacatcaataccatccggcgacagttggaagtggctaagttcttggacaagtgtgagcgagaacagccgccagatgagccactacgaactatacaaactctgaagcagattcgactagagtccagtcgaggaactctacctactctgttcgaaggcgccgcagatcggatacaaatttgcattctgatcctcatgtgcggtaagaacatagacgaaggttttggcctggcttacggcattatgcaggacttcaagctggctgcacttaaggtgtttggagccactgctaagtacctgtcgagaaatcagcgcttgggtgaggtagagcgtctgctggactgcataggaagcaacaacggcggagacatttccacggagtccgatgaaatactctcgattgccattaatgctgctgtgcacagcagtgcgccggagacgaaacagatgctggatcggttgatcaaacgcatcggcagcgtggagctacgagtctcctcctacatctacattgggcagcttaaatccgcctatctgctggccaacaagcacgatcgattggcggatatccggcgaatcctgcggcaggcggagcttaccggtcaggttcacatcaagaaactgtgcgatatgaagctccagctaagcgccgcgccaacgcctctgtgatatcccaaccctcgagcaataacacattagtaaccccttgtttctgggatttactagctgtgagaaataccaaatgatgaatttgtagctttgaaaactcctgcattctaaaagacaataacatatctaagcaaattctcaattttgagatttagatgaatatatattattcggaattggaattcatcttttgattattcacctagtgaaggcccaagttgttttgtaactgagctagcatagataatttgtttttagaatttaacatatatgtagatcaattttaatctttccaaagggccagcaagtattccaccctccagctcaaaaagactctcccagcatgtaaccaaattatattattgattgtactgtattttatatttattatgttatttttatattatactgttatatgtttattacccag

SEQ ID NO: 10950 - protein, 2176 aa, DROSOPHILA
MEDQQEENMQQLLNLLPKDQRQIFEIFIQWLNGKSSGPIQLHQNALLTVLQASPYPALQLLQLLHERSKLHIGQIISTLLRQLLDGDVASPRSLCVLANFPASVLEASTLRQKLMTRLVVDSITSEHLMLTMLARSDGQLLDDLLHEQQLTMRAQCSEAAPTKLLVLWLALNEREHFVASVCQHLKDFKCFQDVTLRNNLLILRLANEFALGSQTLEELGCLEKLLAEFDVSAVPEKLQEVHGFFYADFQRLSTLLNFLRPREISKTLRVDALLRAPGVLPLIHENGIHFKHQELHRLIEDTYKWQQLTPALKCHHQEEVEILSYYTALCHVYDVVLDQGEQTTKTKLVQLSVQLRQLHQLGALCSLLEDIFLLVFLRWEQLEPNSQRKGEDGENDEEDDEQYVDDDVASPPRPTAVHSQRTRYGFICRSASLHALFTFLKAFVTKKIHSQDYKSAPEQQGRFQRLVDAISEALWKLGVLQKIEQSLLKSAPSISCLLEPDQLLQLVQLHSTAKKKASSDDESRERSNHASSLNRRKARRQRRAVSFSGGVAGKASADGGLAMEQLRARAQLLSGSGSRKNSSVTSPCERSIIPKMLSTPEQLAIMALALKNFNDVKKIIETFHLEHSQLNRELHFMEQQQLVKQKLSAIYANYQILEGQQANSGETTVEQIKGVAAKGFELSKIISVVDNFSQAHRLQQSPELKALIQRHNTSAQQGFLQQFEERNLNALIICDLIVNLGFNREITSNLLLVIRRQQQQKKGGDEASNTPGSSELGAMNLLQNLCECMRLLERSGQQAALNELLSLKSYPLRPAVLALQLQREAAFQTLYQKEPSEYSHGHELRSNANQFQQLRSRHNYYARFCTYVQQLARLLQLRDPNLEYHTTQLLRNDPYEVIGELIYECGITPLEIEASVAALHLNLVHVIALNICPQLSEEPTKRLPRVVAPQKQESIHNYISQHNQLLAHILLAIQLGSLPDGDADVDFSFLGHLVHLSEVNVLASVYDGNRVLAALNAYKLESARLDQLVTDQEQLLQILLLDSPNRHKSRIDQLIGDLIEKDPRNIHLVVHMGNLGQRAQLLKEHFTRIPSSQQAKELIERTLHHRSAAKSIPTALRSELEHTLSDITIYARVSALLKFESWPQAYDFGRQTPNVIFEQLLQRRRFGLCLEWSRVVYLAGSAGQQRVCLLTLLDALLELRDGEELDESLLGIVEMFPPNPLVNFLDTHKDKFRSLPLLQWVIDYLEGHARDPRLYRNYQLSLEFLRQMDTNERSPFWKLIRHPLLIVEQLVMNARFELLGKLLDAARSKLLKERPLGPCPYCFDKTGHVYDVQSSAGLGSGAGETPAKIRFQLGQTTSEAFILLNFNSYQQDHFVGQDCLDLLLRIYASKALDYHVANVRAASEPSSLGTDVHNSLDSLCGAFVMPKQAPNRQQWTRDEEASHCMCCRRAAFTMLMRRHHCRRCGRVVCYACSTHRIRIPELYDELEVRICNDCAACSTPAKDQGDGTSSERSAISGQVSKSSGRSDSCKWQLSGIITHDKLLREEFSYEHAPRELENIREHSEIIMAVVQQGCESLIPTGPLNNHNLRKLADALVEAEHWTLALEVHLKCGFATTGVMAAHGLACLRAGCYDAAREKFAHCMTRLSSEQLNSSICKNIFGVASTEAVLLPRKRPQRGPALLQEILQLIAAIPQVQTQPETLHRASLIRSSNTSLASLFTRRREPYVQPRPLQEPALNIMNALAGLKNLAKGQYGGQMPTSEESRRQERGFEESLHYVLTYGSHADILTFLMRREELRAALRYWQHQQLDADLFIHHIFYPQLANGGLNVLMDELQQLDDAQFTAWRLPLLQTCRHLEQQQQLSSLYQLQLLLKDPIRASMTCVKFYALQCENFQKLHANAQHLLSALRHLQGELDMAEWEHLQRQQARRNSVSSTASVRGACFAMQMDARALNGHINTIRRQLEVAKFLDKCEREQPPDEPLRTIQTLKQIRLESSRGTLPTLFEGAADRIQICILILMCGKNIDEGFGLAYGIMQDFKLAALKVFGATAKYLSRNQRLGEVERLLDCIGSNNGGDISTESDEILSIAINAAVHSSAPETKQMLDRLIKRIGSVELRVSSYIYIGQLKSAYLLANKHDRLADIRRILRQAELTGQVHIKKLCDMKLQLSAAPTPL

SEQ ID NO: 10951 - DNA, 9642 bp, DROSOPHILA
aagctgtcggcatggttttccggcttcagctccggcagcaatgtcaggcagttcgtgagcagtatcttgatgtgcgcgatccagggcaggctgcgttccttaaaaagacagagggcggcataggatagcttggtgttctccgactccattgccttgatgatgtaacggcagatgcgctccagacgctcccgtgcacgcacatcgctcttgtccagcctgatctgggtgaggtagcgacgaagcaccggatagacgttgcttgccacgagttccagttccgcatccttatcgtcatgattctcagtgaacatggcatcgaaatcgagtctgcaaaacgggttactatttaggatgttccataaaagtagatagacacttacatgattcgtttctggtacttcctacgcgccgcatatcccttgagcgtggactgcagcaggatggccgcctgttcgcgtcgcttttccagtgcccgctcctcccgcgccgcctttgtctgctccaggaagctggccttttggttttgggcaaacattttgctctgcagcaggttgaaagaattttgttgatgatgtattgttgttgaccagagcgtttgtttttgtcgggattgtggccgttccgggatgtatttatcgtttcaatcacttcctcgagctgaacgctatcccagagccttgattcagagcctcgctggatattttctgcattgcatatcgagcaaaatgcaaaaagaaaatatccttattttgttccaattggtggtacagtgtcaccgtctccgcttactgtcaaataaccacagaaataggccaaagcgcggagatcatttttgttggcaattttctagctaaaaccgtggtttgagtccgcgctgcatgagcacggcatcgaacctagggcagctttgctgctcaactgagcgtccatcaccaagggaaagtaaccgataaccgcttgcaagaaagatcgactgtatcgagtacacatcgatttttgttccagcactagcaacgctgcgttcgcgtgaataaataattaattaattgctgaaaaaatggattagctggcgaaacatgcatccgaccaagtgcaacagcaaccgtgcgcagtactcagtaatcgggcgtttgtgagcgtaagcgccatgaattgtgtgtctaaaaaaaagtaatggtttagcaaaaacaacaacgctaaagcccaaaagtgctaataaaaagtacacacatacgcactcacacaaacgcgcgcgcgagcaaaggtgaaaattataaattaataaatacgcgatccgatagcatatcaaattagcgaaatatgctcgtttctcgtgctgatcgaatcaaaactgtgaattgcaacagaaaataatttcaaggtttgcagcaggcgaatagaaggcgaaaaggtaattgaaaaatagaacgaattttggcacaagcgcactgtagctatatatttttgttgtctggccgaccgtggctaggtgggtggggcgtgattttgggggccaatcttgtgtgttctgtgtactgtgcgctgctgctctgtgtggtgaaaacaacaaaacccgcttaccccgcaggagccccacccctctcccttaaatgtaatgcatgtaatttaccgcaattttgcccgtgcattgctcagtgtgtcactctcactcgcacacataccactgccgacgagcgcagcaaggtctccgtctgtgtgtgcgtgtaagtgagtgctctccccattttcttgacagcagtagcagcatcagcatcagcatcaatcctgtcagaaaaaaaaggcgcgcgctccttttcgcccgtttcgctctgcctgccgctgcgctgcttctgcagctccaccattttctttctaaatcgctgacgccagcgccaaatcattcgccatcagccgctcctcctccgcggtgctccccactgcagcttctcgtcttcagctgagcttcgctgtgctaaaccaattcttctgttctgtgtggttggatctgcagttttgcagatataatcaaatttattcgcaacgtacatatgtaaataaaagcgttcggaatatgccaagcgcctgtgatcgcgactgctgaaagggcagccaaaatacgataatatataagagcgtgtgagtttgcagtatcctttacgtttgcgtgtgtgtgcgtgcttgcaatctttgaactttgaacttttgttgaacttcggtaatttttttatttgcaagccggttagaaaacaacagcaattgcagtgacgcataacctcaaagatcgacatgcacaagtaccgttagatcgagtcgccccaaacgactcttttgcgctcccagtctcgcagggaaatgtgaaatttcatataaaacgttacgttaaatagcaaagaagttaacatcggtaaattccatagcagtgaatgtgctttaaatgcagtaattggggcccgttatgttttactgcttgctcacacacactaacttaagttggggtaccaatacacagtcagttacactgtctctggcttagattacagtcaacactcgatgtcgtaaaccaggataaaaaaataaaatgcagcaatttctcttaaaactacattttacattaaaaaatagatactttaattttcaaattttttgactcccatgcgttgatttgttcaatgttttgtgtgcttactgtgaaaacacggcaacaaaaatcgaagaaagtcgtcagagtaaaagcaataataacaacaacagcaacggcggcagaagaaacaagattcgaaatgggcacaaacgaaactaaatgaaaagcgcgaaactgtgcaaaaaaaatacaacctaaccaaacttctcgcccccgctctactttcccgcccggaaatcaaaatccgaacgccgccaagtcgaaatcagcgatttcgtatttgaaatgtttgttattttattgatttatcgtccctcgtcatttgcgccatcaaagcgaatcgaaggtgttatatatttgttgcttgtttatttgctttcctgataagccagccgaccaagcaaatgctaatttccattcgtcaattacagataattgttgttgctattgcgcttgtaaatttaacaaattagcgaaaactgatttgattaaattcgaacgttatttgcggcttaaagtttattttattatcgctgcacggcactctaatcccgagtggagcaatggcgacaaatccatggaataagggagaagctattgattggatcacgtggttcggaattgtggtatttttctatggaagtgattagattgggctaaactaggctttaagcgaatgatacagctcattgagcataaaaaaaattgtattaccacagtcacaaagtttagctttacataatagttcaattattaatcctaccccgttatctttacttgcagcaacgcaaccaaataaccacaaagaagccgtaacaaatacaataccataaactatagtaagaactatccccaaaaaacaagaagcaactaacaacgagatgaagtacgcaactggaactgacaacgcgatgacctccggcatcagcggccaaaccaataactctaacagtgcatccaacgagatgcagccaaccacatcaacgcctactgcagcccacaaggaggccacatcaacggccacgacgacggcgacatacgccaatggcaatcccaattctaacgccaatcccagccagagccagccgtccaatgcgctgttttgcgagcaggtgaccacagtgacaaatctcttcgagaagtggaacgactgcgagcgaaccgtcgtgatgtacgcgctgctcaagcggctgcgctacccgagcctcaagtttctacagtattctatcgacagcaacctgacccagaacctgggcacctcccagaccaatctgagcagcgtggttattgacatcaatgccaacaatccggtgtacctgcagaatctactcaacgcctacaagacgttccagccatgtgacctgctcgacgccatgtcctcctcgtcgtccgacaaggactcgatgccatgctacggcagtgacttccagatcaccacatcggcgcagtgtgacgagcggaagctgtatgcccgcaaggaggacattctgcatgaagtactgaacatgctgcctctgctgaagccgggcaatgaggaggccaagcttatctacctgacccttataccagttgccgtcaaggacaccatgcagcaaattgtgcccacggagttggtgcagcagatcttctcgtacctactcatccatccagctatcaccagcgaggacagacgttcgctcaacatttggctgcgtcacttggaggatcatatccaagcggctgcggcgggcctgacaaatcgcagttacttcctgcagccctcgccgcaactggtcgctggtggtagctcaacaggcagtggtagctgttcctcttcggcgaccagctcttcgacagcatcctgttcgtcggtggcctcatcctcgttgtgccccgcaagcggcagccgttcctcacgcaccaacgactggcaaacgatcgccccgcccagcaagcaattgcaaaacaaattggccggtgattggcgtggcaatggaggcggcagctccagcgggtcgatcaatccactctgtgataatcttaatggtattaccctgaacgaattagcttctagtcagaacagtctcggcctgtcgctggagggcagctcttccctggtcaacggtgtggtcgctggtgcaggctctatgttgggaatcgctggtggcgacgatcatgacacgtcatttagcaagaatggcacggagattctcgattttgacccggtgacggcggacatgggtgaggcctgtagtctggccagcagtagcctttgtggacgtaacggtggaaatcctgttgaggatcgatcgcaacctccgccgaatcttcagcagcaattgcttcagcctcctccctatgcctcgatccttatgggaaacgtgggcgatcagtttggagagatcaaccggtggagcctggacagcaagattgcagccctgaagacgcggcgctctaacagcctcaccacgcaaacgatctctagctgttccagctcgtctaactcatcggtgatcacggtcaatgacaactgctccaattcaacggagaatctggcacagtttgccaacaagccccgtagtttttccttatcgattgagcatcagcgcggcgccttgatgaacagcggttccgatactcgtctggatgaattcaagcccaattatattaagttccacacgcgcaacgtgggcatgtcgggaatcggactctggctaaaatccttgcgtctgcacaagtacatcgagctgttcaagaacatgacgtacgaggaaatgctcttgatcaccgaggactttctgcagagtgttggcgtcaccaagggcgcctcccacaagcttgccctttgcattgataagctgaaggaacgggccaatattcttaaccgggtagaacaagaactgctatcgggtcaaatggagctgagcacggcggttgaggagctaacaaatattgtgctgacaccaatgaagccactggagtctccaggaccaccggaggaaaacattggtctgcgttttcttaaggtcattgacattgtgaccaatacgttgcagcaggatccgtatgctgtccaagacgacgagactttgggtgtgcttatgtggattctagaccgctctatccacaacgaggcatttatgaatcacgccagtcaactcaaggacctgaagtttaagttgtccaaaatgaagatctccatggttcccaaaatgcatcacgtcaagccagccggcgtcgggccaaacaatgggaacattaacaagccaaggtaaggttttcaataagataaaaagtaatgcattttaaaaatgagctgttattttagatggaatggtaagactcgcaaatgcgatactaaaaatggcagcaacgataggattaacaaccgcaaaaactccaacgacatgctaaacttttcgctaaattgcctgccacacccgctgccccatcattcgcagcaggctccgccgcctctgccacagtttgactacaacggctatggcggcggtccatcccatcagccgcagtacaagagctcctcgtacccaagcttcatgggtaatcctcagcagcagccaccaccgccgccgtctagtaagtcgcatcatcatccccagcagatgcaacagatgttgcagcaacacaaccactttccagcgctgcctcagcagacgccaccacaatcgcatcgccggtcgctgaataatcttattctggtggccggaggtccgcagcaaccgcagcaattgatctttaagcccggtcagggagtgctcaccaacaacggatctaacgacaacctggtattggaacgcaatcagcagtcgcagcagcagcagcagcagagaaaacttagcggaggagtgtccagtgcggagcaacaaccaaagaagaccatggccgctgttgtgatggttagtaatccaaaccagaatcaggaccagcacgatcagccccagatcctgatcaacaacaataataacaacagcatgctgaacaacaatttgattaaccagcaacagttgcaacttttggcagcagctgctgccgccgtgggcagtggcagctgtctgtgctccaatggtggtggtggtgcctgtgtccacaatatctgtcaccaaagcagcaagaacaacaatcatggcgtagaccattgcctgtcccagtcaccgttgggcagcctgggcatgtcgccccacgtcaccgagtacaagatgaacgactttaagagcctagaacagctggagacgttgtgtcgccaaatgactgaacaggcaatgaactgagcaagattcagggctatctgggttttgaaatcatcatgtaatggcgttagatttgaggctgccagctgtttttgtgttcatttagctttgagccgtgtttgatgtttgatttcataacgaacataaatgtttttatatttagatatttaagattcgtgtctatttttgtgtcgcgtcaagttgtccaccctgcgtctcctttcacatcccgttctgtaatcgtttttagttagtaagacgatagtttgttttaatgttaagtttattaactgtatgccaaggcgcccccaaagatatgatcaattgactcgggctcgcaggaccaacggctggccgatgaacttgtggagcccatgctgcactccccgacggtaatcccatgtcggttgtcagcgggggcgtggcatcttactgtcaatgttattaatgtataggtttcgtaaatgttgtcgccatttatgtagttaaactaacaagccaagccccacaacacacacacacacagatcgcaacaacagaatacagtaacttctctctacctaggaaaatttggccaaatttgatcaacattttacgctattctaaaccccaatcacaacatcaactatttcattcactatcaacaacgtcgccaaatgaaagaaataccccgatctgaacgacgacgaaaaatggtttatctagtaaaaaattataaaatgaactctgcatcgtgaccatgagactgactaagattacttttcgcaactataaaaactagaaggaagaaagctggatggagagggaattgaaaagtgagaattgagaaacgagagctgataattgtttgcgcgaatcaaaactaggcttgctgaatgaagtagtagtcacataatgaatatgtttatatatacacgtacacataatttattttaaattaaaaggaacatatttgctgaaccgtaactgcaccagaggaaatcgcaacggcggaaactaccactagactaaactttaacagaaaagagtttcaatgtttcactgtttgtgtttgagaatcggaaccacatattgtattttgcatatttaagcgtaagccaaatccatgtattgcataccgatcatgatcaccattgtcattgattagattatctctactattactattatgtttgctttagtcaattgtttataatgtaaatggcaagccaatcactcgatatgttatgttttagttgtttttttaaaaattatatatatttatatatacaaatgtatgtcgctaagcttaggttcaaacaaaaaacgacgatgggccaagctggaaaaaagaaggcagccaaaaaatatttaccttaagagcgtaaaaacgtgtagtctaattgtaaatgtataaaaacgaacaaatgcatgtgtaaaaatcttggttggaaatgtttttgttttctaatttctcgtcgatatttccaagatttgtttgtttacaacaaccgcaacactgtaaatcgcagatgcttttatttaataataaaaacctattgtacggccagttgggatacaaagataatcgaaacctaattgtcaaactttagcgagttcaaaacgatccacaaactaaatggtttattgtaaaagtgcaactactcgtagacgaatgtgcataagtcagttaaatgttcgcaaaattatcataatgcgagcataaaccaagcgtgtacctacccacacatatacacacatacaatacctacatatatttattttcaataaattatttcgagatttaaaaatacccatgctgtttacctaacaacccaggttgccatgcgtctccacttttgttgtccggcgaaaaacaacttcataccgaggctagccttcaaacacaccaaacgaaattatcgaagcgattttctatagtatatacaagccttacttttccggagcaaaaattattagctttacagaatgagccgacatcgcttcaacaacgtgcagatcaaggcattgcccggtggtctgatggcccaccacgaaccggatgcggatggcggacagcccggttcgcagaagctgcccatgtggcccagtgaacgcattcctcctggcggtgctggagccttccactcggccaaggtgcaatatagcaaggagacagctgatctgatccgatgtaagtgcgttttgggcatgccaaatatctaaggaataagaggataagaggaccatccataaagataatcgtgtacattttccgcttcgttataacctcccttgttagtgcttgtcaaggagtccaagatgtcgatgttggtacgcaagcagatcgatgagagcctgcgcaatggggagccattgccattgcccgaaccgccgcgtcccaataccaacaacgatccggacaaggaaacactggccattttggatcgggcacgcaatgccaagcgtaagaatctgcggcagatcgaggcgagcggagcttacaagcagagctattaccgcccgcccgccgacaaccgaatgcatggagagaaggccaagtcgcagctgcagttcaccatggccggcactcatttgcccgatccggcgatcaagccgcgacgtcgtcctcgcgaagagcaactggtgacggaggaggatctcataaacgagcgtaagttggaatatttcttaagcggaataaagcggaattatacattgagttggcatgctcctacagttttggaccaaatcaacgagcgtgctgagtggttg

SEQ ID NO: 10952 - DNA, 4654 bp, DROSOPHILA
tccagcactagcaacgctgcgttcgcgtgaataaataattaattaattgctgaaaaaatggattagctggcgaaacatgcatccgaccaagtgcaacagcaaccgtgcgcagtactcagtaatcgggcgtttgtgagcgtaagcgccatgaattgtgtgtctaaaaaaaagtaatggtttagcaaaaacaacaacgctaaagcccaaaagtgctaataaaaagtacacacatacgcactcacacaaacgcgcgcgcgagcaaaggtgaaaattataaattaataaatacgcgatccgatagcatatcaaattagcgaaatatgctcgtttctcgtgctgatcgaatcaaaactgtgaattgcaacagaaaataatttcaaggtttgcagcaggcgaatagaaggcgaaaagcaacgcaaccaaataaccacaaagaagccgtaacaaatacaataccataaactatagtaagaactatccccaaaaaacaagaagcaactaacaacgagatgaagtacgcaactggaactgacaacgcgatgacctccggcatcagcggccaaaccaataactctaacagtgcatccaacgagatgcagccaaccacatcaacgcctactgcagcccacaaggaggccacatcaacggccacgacgacggcgacatacgccaatggcaatcccaattctaacgccaatcccagccagagccagccgtccaatgcgctgttttgcgagcaggtgaccacagtgacaaatctcttcgagaagtggaacgactgcgagcgaaccgtcgtgatgtacgcgctgctcaagcggctgcgctacccgagcctcaagtttctacagtattctatcgacagcaacctgacccagaacctgggcacctcccagaccaatctgagcagcgtggttattgacatcaatgccaacaatccggtgtacctgcagaatctactcaacgcctacaagacgttccagccatgtgacctgctcgacgccatgtcctcctcgtcgtccgacaaggactcgatgccatgctacggcagtgacttccagatcaccacatcggcgcagtgtgacgagcggaagctgtatgcccgcaaggaggacattctgcatgaagtactgaacatgctgcctctgctgaagccgggcaatgaggaggccaagcttatctacctgacccttataccagttgccgtcaaggacaccatgcagcaaattgtgcccacggagttggtgcagcagatcttctcgtacctactcatccatccagctatcaccagcgaggacagacgttcgctcaacatttggctgcgtcacttggaggatcatatccaagcggctgcggcgggcctgacaaatcgcagttacttcctgcagccctcgccgcaactggtcgctggtggtagctcaacaggcagtggtagctgttcctcttcggcgaccagctcttcgacagcatcctgttcgtcggtggcctcatcctcgttgtgccccgcaagcggcagccgttcctcacgcaccaacgactggcaaacgatcgccccgcccagcaagcaattgcaaaacaaattggccggtgattggcgtggcaatggaggcggcagctccagcgggtcgatcaatccactctgtgataatcttaatggtattaccctgaacgaattagcttctagtcagaacagtctcggcctgtcgctggagggcagctcttccctggtcaacggtgtggtcgctggtgcaggctctatgttgggaatcgctggtggcgacgatcatgacacgtcatttagcaagaatggcacggagattctcgattttgacccggtgacggcggacatgggtgaggcctgtagtctggccagcagtagcctttgtggacgtaacggtggaaatcctgttgaggatcgatcgcaacctccgccgaatcttcagcagcaattgcttcagcctcctccctatgcctcgatccttatgggaaacgtgggcgatcagtttggagagatcaaccggtggagcctggacagcaagattgcagccctgaagacgcggcgctctaacagcctcaccacgcaaacgatctctagctgttccagctcgtctaactcatcggtgatcacggtcaatgacaactgctccaattcaacggagaatctggcacagtttgccaacaagccccgtagtttttccttatcgattgagcatcagcgcggcgccttgatgaacagcggttccgatactcgtctggatgaattcaagcccaattatattaagttccacacgcgcaacgtgggcatgtcgggaatcggactctggctaaaatccttgcgtctgcacaagtacatcgagctgttcaagaacatgacgtacgaggaaatgctcttgatcaccgaggactttctgcagagtgttggcgtcaccaagggcgcctcccacaagcttgccctttgcattgataagctgaaggaacgggccaatattcttaaccgggtagaacaagaactgctatcgggtcaaatggagctgagcacggcggttgaggagctaacaaatattgtgctgacaccaatgaagccactggagtctccaggaccaccggaggaaaacattggtctgcgttttcttaaggtcattgacattgtgaccaatacgttgcagcaggatccgtatgctgtccaagacgacgagactttgggtgtgcttatgtggattctagaccgctctatccacaacgaggcatttatgaatcacgccagtcaactcaaggacctgaagtttaagttgtccaaaatgaagatctccatggttcccaaaatgcatcacgtcaagccagccggcgtcgggccaaacaatgggaacattaacaagccaagatggaatggtaagactcgcaaatgcgatactaaaaatggcagcaacgataggattaacaaccgcaaaaactccaacgacatgctaaacttttcgctaaattgcctgccacacccgctgccccatcattcgcagcaggctccgccgcctctgccacagtttgactacaacggctatggcggcggtccatcccatcagccgcagtacaagagctcctcgtacccaagcttcatgggtaatcctcagcagcagccaccaccgccgccgtctagtaagtcgcatcatcatccccagcagatgcaacagatgttgcagcaacacaaccactttccagcgctgcctcagcagacgccaccacaatcgcatcgccggtcgctgaataatcttattctggtggccggaggtccgcagcaaccgcagcaattgatctttaagcccggtcagggagtgctcaccaacaacggatctaacgacaacctggtattggaacgcaatcagcagtcgcagcagcagcagcagcagagaaaacttagcggaggagtgtccagtgcggagcaacaaccaaagaagaccatggccgctgttgtgatggttagtaatccacaagaacaacattttacgctattctaaaccccaatcacaacatcaactatttcattcactatcaacaacgtcgccaaatgaaagaaataccccgatctgaacgacgacgaaaaatggtttatctagtaaaaaattataaaatgaactctgcatcgtgaccatgagactgactaagattacttttcgcaactataaaaactagaaggaagaaagctggatggagagggaattgaaaagtgagaattgagaaacgagagctgataattgtttgcgcgaatcaaaactaggcttgctgaatgaagtagtagtcacataatgaatatgtttatatatacacgtacacataatttattttaaattaaaaggaacatatttgctgaaccgtaactgcaccagaggaaatcgcaacggcggaaactaccactagactaaactttaacagaaaagagtttcaatgtttcactgtttgtgtttgagaatcggaaccacatattgtattttgcatatttaagcgtaagccaaatccatgtattgcataccgatcatgatcaccattgtcattgattagattatctctactattactattatgtttgctttagtcaattgtttataatgtaaatggcaagccaatcactcgatatgttatgttttagttgtttttttaaaaattatatatatttatatatacaaatgtatgtcgctaagcttaggttcaaacaaaaaacgacgatgggccaagctggaaaaaagaaggcagccaaaaaatatttaccttaagagcgtaaaaacgtgtagtctaattgtaaatgtataaaaacgaacaaatgcatgtgtaaaaatcttggttggaaatgtttttgttttctaatttctcgtcgatatttccaagatttgtttgtttacaacaaccgcaacactgtaaatcgcagatgcttttatttaataataaaaacctattgtacggccagttgggatacaaagataatcgaaacctaattgtcaaactttagcgagttcaaaacgatccacaaactaaatggtttattgtaaaagtgcaactactcgtagacgaatgtgcataagtcagttaaatgttcgcaaaattatcataatgcgagcataaaccaagcgtgtacctacccacacatatacacacatacaatacctacata

SEQ ID NO: 10953 - protein, 998 aa, DROSOPHILA; identical to SEQ ID NO: 10842

SEQ ID NO: 10954 - DNA, 2498 bp, DROSOPHILA
attatcgttcatatttgctccgccaaagattctgctggacggctgtttaggaacgagaatgaaaactgcttatacacatagacttattattacaagagttgataaacaatacttacatcattacctatgctatcattataaatgataaaaataaattattaattaatgaacaatatctctacacaaccacaagatggagaacatcggcagtaacaataacgaaatgagaattgagaagaggacaagcgcattagcattaagcttaagcaattactaccataccgtgtacaacttgtttttggtcttttgcgatacattatcacatttaactgtgtaggaacagttactccaatattatgtacggattaatatatttatttaaacaactatcggttgattacgcgacatgtccatgtagctagaatatgaaattaaatatccattacggggtaaagagagatggaggaaaaaataaaattaaatgcatcatatatttttgaatatattatgattatggtattgtgtaattatgtaaatgcagactatataacattgtttataataatttttaacaattctactgaaacggcaataaattcgaaaatacaaactaactaaaagtgaaagcaacttgcctgctgcaaaccaagcgcctaaatgtatgcatattgtatatttattttaactggcttaagagggcatcacttagtttctaaagcaataccctttcgataacaattcatttaagacaacttgccaacttgtggcgagaagggaaacaagaagacgaacgtggagacggtgatttttatgtgaacatttattactaactgataagctttgattaaacttaggaaagccgttatactatgcatatacacatatatataaatatatatatgaactatatatagtatatatgaatgctcgtgtgagcaaccaaacaattacgatatgaatcattaaatacttccgaaagcattaaatccctgcagtttgtctaatcctccgccttgaacttaaacgaggtatccgtctccatcagcatattttccaaacgtaattccaactggcgtcgcttcagatccacctttaccaccgatgccacaatgcgatcgccaacgctcagctgcgaattattcatgttactgttgtgtatgaggccattgcgctccactccaacgtccacgaaggcgccaaactgggttacgttggtcacggcacctgtgtgtcggaatagtttcaataagtacatatatgaaatgactatcatagtctccacttgccagtgaccacctcgcccatgctaagatcatccagcctagttagaccttgtttgaacagtggcctcttgtccagatctgctcgataatcctgaagtaattcgcgctgcagggcaaccaacaggaactccaactgaaaggaaatttattttaaattatttgaacattgcaataggcctgtttagtatagattgagtggcacttactcgctccatgggcagcttgtgctgcttggcaatgcgatcgagattaggctgggatgaggcaaactgcttgatgctagctataaaggcagccttgcccacatccgacagctttaagtcacattctccgacaatactgaaagcacaaaaagtatttggttttagagttaagttttcaaattttccattataatgattgccaagctaaagcaggaatatgcggagcgctggcattatcctccaattgtgccgccagccaagcttcgatatgttgcatgtggaaaggtagcattctacggccacaacgataagccgaaatacaagccctgctggcagcatccgctcaatgtgcaggatcaaacccgctttggagtttgctgggagtatccgccggagcggtacaagcgtcgtccgcttccgccaccgtgccggggatcgaccattcccatccatttgctgaagccaaccttcaagcattgtgagaatatctactcccgctacgattttaagcttgagcagtgtgtgcacgagcaaactctagtagttgaccagaaaatgaaggccctgaagaatgagctggagcaggccaaaccatttcagattgagagggttaaggagatgcgttaccatggagtgcgttatcgcattttagccagctcgaccggatgcactaagacctatcccgagtacataagccggatgaccgaagagcgggccctttgcgagtttcagagagcctacaatatcgtcaatcagtcaaagtaagtctattaaaaatacacagccactgctaatttaaaactttttagcaccgatttgagcaatttatacctggacatgagtgagtcgaaaaaggagctagatcaacgcgtagccaggttggaccggtctttaggaagtacattcttgaaagagctagattcggtgctgcaaataatcgaggacttaaacacgtatttctttggcgtgatcgtgaagctaaagacgtgggcggagctgatggaccctatga

SEQ ID NO: 10955 - DNA, 318 bp, DROSOPHILA
atggagcgattggagttcctgttggttgccctgcagcgcgaattacttcaggattatcgagcagatctggacaagaggccactgttcaaacaaggtgccgtgaccaacgtaacccagtttggcgccttcgtggacgttggagtggagcgcaatggcctcatacacaacagtaacatgaataattcgcagctgagcgttggcgatcgcattgtggcatcggtggtaaaggtggatctgaagcgacgccagttggaattacgtttggaaaatatgctgatggagacggatacctcgtttaagttcaaggcggaggattag

SEQ ID NO: 10956 - protein, 105 aa, DROSOPHILA
MERLEFLLVALQRELLQDYRADLDKRPLFKQGAVTNVTQFGAFVDVGVERNGLIHNSNMNNSQLSVGDRIVASVVKVDLKRRQLELRLENMLMETDTSFKFKAED

SEQ ID NO: 10957 - DNA, 2537 bp, DROSOPHILA
tggttatctatggacgcgatgcccgcaccggtccgcgctccctgaagcacctgttttcgggacagtaccgcaatccggaggccaatcgcctaaccggggtttacgagctagcactgcgcagagcatccgaagcaggtagtccaggtagcaattctcaatgtagttgtactcgtactcagtccgcttgcactcgcttgtcgaatcttcagagctgtcccccacttactctttctcttggtgcctttgcaggtgtacaaaggcgtcaacgtcgagtgctggacaccagctctacttatgtgcgcggcgaggagaatcttcatggctggaggccaaggggtgactccctgatcttcgaccaccagtgggagctggagaaactcaccagacttgaagaggttggacgcatgcggcacttgcttctgctgcgcgaacgtctgggcatggacaccaacccaaatccgaccaccaagaccgagaaggatgtatgcaatctagctgctcgggcagccacatcacccgtacatatggtcattccacaatcgccgcagactccggtcaaggacccacagcaaatcattccagaacgcgaatacaaccaacgggagcaggatctcatgcttaaatgcttaaagttggtgcagggtaagttaatactgagacttatcaagcgttccagtcactctcttctaaattcatttaaggacgctatactaagagcgaggccaacgatacgcaaactcagtcggatgtttcgcctagcgatgagggatgcgccgacatgaccgtcagctgcatctccagcaattccatggagtgagtagtcgtttagccacccgtataaacacaccacccacaccagcaccacccatcttagttagcttgcatccattcggctttcttggtttattagaacaaacgaaattggcacgacaccacagcacacccacagcatatatcagtccaccacactaacccaaatcaccttatcacatcctccacctcacaaaaataccctgtatatcccgttcttactctgaacgatccccttgggacagtcggagcgcagagtacatgcgctatgtggaatattgtagacataaccacgcttacagcgacaaggcggtccgcaaagcggtacacagtatttggagcggtattcgcatgtctccggacaaacgccagcacatcccacatatgtggagttgtgacagcagccgaacttgaagggctgcttgatatacttctcctcagggagcgggttccgcttgagggctatttcttcacctattggatgaacgatgtggtatctatgctccaggctatcaaattcgtcaaaaacctttttatgcgggttctccatgaactcgtcatcgtctcgcaaagcatcgaaatgatccaaggttcgagcggtgcgaaaagtcatgccattagttactgttaccggaagttcattgggccaggtcaactcagactccaaggttggctcggcaatgtcatccggccaggtaatctggtcctctgcagaatcttctgccatcagtacatgtttttgaaagagaattccaataagctgtacgacaaaataaaccttcggccatgccatcataggaaaattataataataaactgagattaaaactgtatcacattaaataaatcaggactgtgtcagaattgctgtgaaatggcaatttgttagggtcaccaagcaccaatcactattgtttataagtcattcgcagctagagatttgactagattacttcttttagttgcaaacattagtttattgtctttttaaaacacagaaatattttgaggcttttactgaaaaacgcgatgagtttcaacaaccagttgctttatgtctagaggacaatcagttttaaggatgcatagttgcagattttcgttaaagacatagtcaggtttgcatacgcaatttacaccgcaatatttgggacacttgagcgatttgaaggcacaggtttcggggcaaactccagcacacctcaccatggtggcattctcgccgcaaaatcccgaaaacggattccatatgtacttcatgcggcccggatccgggtccacatcatggttcaggatatgatcctcgtcgatgccagttgtcatgaccgaatccatcagcaaggccggcagcagcagaaagcagagggaattgaaccaaaccatcatgcaaaacaaaagcaactgaagctattagcaatcacttccacttgtttcccagcctttactgcttctgctgccagctgcttccctgtaattgcccaccattcgatcatcgcagtgcaaaaactaacgataaacacacaccatcattcattttcctaataactcgagatactcaaaaacgaaacttccaatactttatttgtttgttttcctttcggttttcttttacacaattagaaacaacaaatttgtaattcgacgcaggtaattttctgttctatccaaagaacctataaatctaaaccaactcttgagcgaggcgtttgactaacaacctttaattt

SEQ ID NO: 10958 - DNA, 537 bp, DROSOPHILA
atggcagaagattctgcagaggaccagattacctggccggatgacattgccgagccaaccttggagtctgagttgacctggcccaatgaacttccggtaacagtaactaatggcatgacttttcgcaccgctcgaaccttggatcatttcgatgctttgcgagacgatgacgagttcatggagaacccgcataaaaaggtttttgacgaatttgatagcctggagcatagataccacatcgttcatccaataggtgaagaaatagccctcaagcggaacccgctccctgaggagaagtatatcaagcagcccttcaagttcggctgctgtcacaactccacatatgtgggatgtgctggcgtttgtccggagacatgcgaataccgctccaaatactgtgtaccgctttgcggaccgccttgtcgctgtaagcgtggttatgtctacaatattccacatagcgcatgtactctgcgctccgactgtcccaaggggatcgttcagagtaagaacgggatatacagggtatttttgtga

SEQ ID NO: 10959 - protein, 178 aa, DROSOPHILA
MAEDSAEDQITWPDDIAEPTLESELTWPNELPVTVTNGMTFRTARTLDHFDALRDDDEFMENPHKKVFDEFDSLEHRYHIVHPIGEEIALKRNPLPEEKYIKQPFKFGCCHNSTYVGCAGVCPETCEYRSKYCVPLCGPPCRCKRGYVYNIPHSACTLRSDCPKGIVQSKNGIYRVFL

SEQ ID NO: 10960 - DNA, 3932 bp, DROSOPHILA
tccacctctcccactgccctacctcccgcccgctggccagttccattctgcccagcctgcagttcgtcccacagccggatcgtttcccatgcccgccggcttccccgtcaatttccagaccgctcccatccagcagcagcgacgcgctcgtccgcgtgtcaggattcccaagcgtcccattgtgaccaaaaactttttcatccactcggcgcccgaggagtctgaggatgaggtccaggacgagctgaaccagttggcccagcagccccgtaaccactacaatgtgctgttcgtcaagacgccggctcagaccaatcgcgcggcggctcttaacttggccaagacccttaagcaggagaagaccgtggtctatgtgctggccaagaagacgaccgcctccgatctgcaggatgccattgccgaggcgccacagcacatcaataagccggaggtgttcttcatcaagtaccgcactccagaggaagctctgaatgcccagcggcagattcagtcacagtacgatactttgggaggaagttcgaccatcaccgacgagggtgtggcccccatcacctcggtggtgggatccctggatcctccagaggaggaggaggaggaacagcaacagcagcaacattcagagggacaatttgcggagaacggtgccggaaactctggcgtcggtcccatcggcaatcattatttgcccgcgaaccagttctaagtattcttcattgctcgtcacatccagatctagttagctgtcatcaacaccacttaggtttaagtgcttgccaatgttacccaaatccgtattaaaatataattgttaaaaaaaaaaccattgaattttaactagatgacgattttaagaagtgattaatagtactttaataagtcccactaaatgggaatgaatttagctttccaaactgaacgaacgtattattggaataagaggaatttttttggatccaaagtatgttctaggaaaacacattcaatacttgcacttaagctctggcggcttgtcttttgaagctggacatgtttcaagtacatccttcatttcagcaaaggactgcgcaagcgccttggcgatcttttggtgatcagttgcctgacaatgtcgccatgcggatatggccaaaatgatgtcatgttcacggggattgtagcaacaggcatatccatcttctacagaaggtccatatcccatgaaggcatcatatttggtggccacctgcgaagtggacattcgaaagtgcgtggactttacatatcctggcgaagagaagaactccggaacaggtaggcagttctccaccgccattagtttaagtccaaagaggtgacgatcgacaccctttcccagaagcgccagcttcgcatacatctgatggcacatcactgcctcgcgaatcttactagcccgctcctgagctgatgcactcacatcatccatggcgtggcaaaaagccagggattcattggagcacgaacggatggtttcggttcggccgccatcgaagatgcgcaaatgcgccgattcatattgagcagctggctcatagtgcaatttaaagaatgccaactgcaatgccatctgaacaaagctatctggaccaagtcgctgtttcttgatgaaatccttgccgtagcaatcgaacttaagaaccttcatttgcaggtcctggacaagtttgtccacgtttttttgcgcgattatcaaccattgctccacgcatttgcttacatcacagaactttattttcttcgctggaataaagttttccgatccgcattccccataactagggtcatccttcatcttcttcactacatagtccatcatcattgcgatcggttggccctcggctggtgagtgctcataggtgaatccaacgtgtccatttgggtttaccaccaattgaattgtcttatccatccagcggttggcactgttgcacttgctgccctttccatggatcagcgtaaggatcaattcttcggcatctcgaccttcttttggactggtacactcgtcgagggacactgtgaacatagcattctgaatggttttcagggcaactctattacggggcgtatttgacaagtgttcgtatgcctcggcccagttgtcccgcgaatcggtggtcaagattccataaggaactcccggttccttttcctttgccattatttcctccagttgaacagccagacatggtgcaattataagctttccttccttgtcgtatattttcagttgataaaagtgattccggtagataaccaccacataatcagagcacggattgtagacgatatcgtcggtaaaccttctcggtatccggcatgtgccgaaaacctttccaaactgactgttgtccagctcgttcttgcccattttcacaatcggaatctttttggcgtgcaccaagtcattgaactcacccaaaccgaagataaccctagacgtgtagtccacaaattcgtggacactttcaaatttctgtttgggaaaggtcatgccgggactggagaagcaagtcactggcgaccgaaactgtaagtaggcaaccttcagccagcgatgggctaaccagttcttctcctgttcaccagtttcttcgaggagcttttgtagcttagcgccctccttcctctggaattcgttagtaatcttctcttgctttttgaactcctcgggtgtcagcaatggttgtacggtaatcatgaagcggttgaggatttcttcaagaggtaagacatgatactttagaaggtttggctgatcggatttaggcttatccttggcagtgctatagctggcaattggcatttttttgccgaacgtatatcgagtctgttgcagagccgatatccttgcgaaattccaaaggacctttccattgtcacggaacttcatgtcggccttggcggttctcaagaattaccctaaaaagtgcaatgcgcactttacttgtgttccaaatatatgtataatttttacgaatttttacaaaaatagccacattgttacagtaaatttccagtttgcattgatcagttacattagttaaaataatttaatacaaactatacattttaatgtaatcagcactatacgttcttctaaaaatgtgtaaaaattatcgttagatatgcttcattttatagctttcatttatattttcagagtttgaaagatttttataatgttattataatgtctatcttgtcactaatcctggagagcaatcatttcctcctcgatatcctcagagctgtccgttttggatagacttaggtgagtgcgtataaagtcgtgataatatgaaattgaagcgtgagcatctgtagaatatagtaaatgagctttaatatgtatttaacgcatattaaattattattacctggatatcctttagcacatggcagtccccagttgaccagagccaccagcttgccattgtgcaccagaggaccaccggaatctccatgacacgctccgcgtcccttgtcattgaaggtgcaaacgtggccaatgtccacccgagtgctattgtcgtgggcagctcgacactgctcgaagggcacatagttgacctccagactctgcagacgggcgggaacatctccgcccaaggagagggttccccaaccggttaaaaggagtcgggatcctggaaccaaggcctcgtgatccagttccaccggttgagtggcattatcaaacacaatcgattcattcagatgcagtaaagctatatcgttgcgatacttgcgtggtgcatagttactatgctccacaatcctgtcgggatagtaatacttggatccattttgatgcagatcctgtgtgcctgttaggacccgaaatgccgtcgcctgtctgcctcttgtacagtgagccgccgttataatcc

SEQ ID NO: 10961 - DNA, 1932 bp, DROSOPHILA
atgaagttccgtgacaatggaaaggtcctttggaatttcgcaaggatatcggctctgcaacagactcgatatacgttcggcaaaaaaatgccaattgccagctatagcactgccaaggataagcctaaatccgatcagccaaaccttctaaagtatcatgtcttacctcttgaagaaatcctcaaccgcttcatgattaccgtacaaccattgctgacacccgaggagttcaaaaagcaagagaagattactaacgaattccagaggaaggagggcgctaagctacaaaagctcctcgaagaaactggtgaacaggagaagaactggttagcccatcgctggctgaaggttgcctacttacagtttcggtcgccagtgacttgcttctccagtcccggcatgacctttcccaaacagaaatttgaaagtgtccacgaatttgtggactacacgtctagggttatcttcggtttgggtgagttcaatgacttggtgcacgccaaaaagattccgattgtgaaaatgggcaagaacgagctggacaacagtcagtttggaaaggttttcggcacatgccggataccgagaaggtttaccgacgatatcgtctacaatccgtgctctgattatgtggtggttatctaccggaatcacttttatcaactgaaaatatacgacaaggaaggaaagcttataattgcaccatgtctggctgttcaactggaggaaataatggcaaaggaaaaggaaccgggagttccttatggaatcttgaccaccgattcgcgggacaactgggccgaggcatacgaacacttgtcaaatacgccccgtaatagagttgccctgaaaaccattcagaatgctatgttcacagtgtccctcgacgagtgtaccagtccaaaagaaggtcgagatgccgaagaattgatccttacgctgatccatggaaagggcagcaagtgcaacagtgccaaccgctggatggataagacaattcaattggtggtaaacccaaatggacacgttggattcacctatgagcactcaccagccgagggccaaccgatcgcaatgatgatggactatgtagtgaagaagatgaaggatgaccctagttatggggaatgcggatcggaaaactttattccagcgaagaaaataaagttctgtgatgtaagcaaatgcgtggagcaatggttgataatcgcgcaaaaaaacgtggacaaacttgtccaggacctgcaaatgaaggttcttaagttcgattgctacggcaaggatttcatcaagaaacagcgacttggtccagatagctttgttcagatggcattgcagttggcattctttaaattgcactatgagccagctgctcaatatgaatcggcgcatttgcgcatcttcgatggcggccgaaccgaaaccatccgttcgtgctccaatgaatccctggctttttgccacgccatggatgatgtgagtgcatcagctcaggagcgggctagtaagattcgcgaggcagtgatgtgccatcagatgtatgcgaagctggcgcttctgggaaagggtgtcgatcgtcacctctttggacttaaactaatggcggtggagaactgcctacctgttccggagttcttctcttcgccaggatatgtaaagtccacgcactttcgaatgtccacttcgcaggtggccaccaaatatgatgccttcatgggatatggaccttctgtagaagatggatatgcctgttgctacaatccccgtgaacatgacatcattttggccatatccgcatggcgacattgtcaggcaactgatcaccaaaagatcgccaaggcgcttgcgcagtcctttgctgaaatgaaggatgtacttgaaacatgtccagcttcaaaagacaagccgccagagcttaagtgcaagtattga

SEQ ID NO: 10962 - protein, 643 aa, DROSOPHILA
MKFRDNGKVLWNFARISALQQTRYTFGKKMPIASYSTAKDKPKSDQPNLLKYHVLPLEEILNRFMITVQPLLTPEEFKKQEKITNEFQRKEGAKLQKLLEETGEQEKNWLAHRWLKVAYLQFRSPVTCFSSPGMTFPKQKFESVHEFVDYTSRVIFGLGEFNDLVHAKKIPIVKMGKNELDNSQFGKVFGTCRIPRRFTDDIVYNPCSDYVVVIYRNHFYQLKIYDKEGKLIIAPCLAVQLEEIMAKEKEPGVPYGILTTDSRDNWAEAYEHLSNTPRNRVALKTIQNAMFTVSLDECTSPKEGRDAEELILTLIHGKGSKCNSANRWMDKTIQLVVNPNGHVGFTYEHSPAEGQPIAMMMDYVVKKMKDDPSYGECGSENFIPAKKIKFCDVSKCVEQWLIIAQKNVDKLVQDLQMKVLKFDCYGKDFIKKQRLGPDSFVQMALQLAFFKLHYEPAAQYESAHLRIFDGGRTETIRSCSNESLAFCHAMDDVSASAQERASKIREAVMCHQMYAKLALLGKGVDRHLFGLKLMAVENCLPVPEFFSSPGYVKSTHFRMSTSQVATKYDAFMGYGPSVEDGYACCYNPREHDIILAISAWRHCQATDHQKIAKALAQSFAEMKDVLETCPASKDKPPELKCKY

SEQ ID NO: 10963 - DNA, 3251 bp, DROSOPHILA
acttaacaggagagtcaaaatcgatctattacaagattaatagagaaaaagctgtcttcgtcaagaagtttaaatgaattgccaatttttagccatattgaggatgctgtcccatatctcaaagccggcggatttgcttttcattgcgaagtggtggacgcttatccggtgatttcagaatattttgatgccaacgagatctgtgatctgcgtgaagtctccggtctgatggaggtcgaaattttgaattggattttacacaagaacagccagtataccgagattttcaaaacagcgtaagtattgagtcattcgcatggttttggtttgattctgtctttgcttaactggccaaaaagaactgtttttttttaacccggtcttattccacatcagtatatttcccaaacattccttgggaagtaagatagttttataattattttataatagttatataattgtaataaactctatattttcttttgtagtatgtgtaatgcccaggaaaaaggttttgtagagcgcattcttcgacggcggcaaattaaaaagccagcctgtcaatcattatacaccgtttaccctgtaagcttgtcaggagtgctacctggatttgttattttaatttgtaagagtattaacaaattttcctagaacttaaatttgtatacatgtttttatttaataggcggatttggagcatcgcttctacttttgtgcttggaaaaagtatatgcacattttggaccacgaaaattttgcggtttttaaatttttattttgtgtttcctttatgatgatttttttgatttgttttattttataatttttgtaataaggaaaagtgtattggatatggcttctggttcatcccagtttatgttccattccacgcgttccaaaaataaacgcgtagttcaaaatataaacaaaagtaaactccgaatgcagccctgtgctcaatttttcaacttcctgtcacgctgtgtgtgtgttctttctttcctttgattctgttgccgaagcaaggtaagtttttggggttgttacattttaagcatcggttaagtgaaaataaacatacaaatacatacttaaagtagtccttaacacttgtaaactcttacgagtgaaatacatgacaattgttgattgaacaatgagaatgattgcagtgcacatgtaaaattgacaagcaatcaaaattgctaaaagatacccgtgaacaaaaaaaatattgtgacatttaaatttatacattaaggtaagtgaatttccgcgtgattagttatctgtggatggccacagaggcttccccaggaaacaaatttcgcacacccccaaccgtccacatgttaataaccacatgaatgtatttcagatctggtctacagaattaacaattaacaatgccgcagaatgagtatatggaacgccatcgcaagctgtatggccggcgattggattacgaggaacggaaacgcaagaaggaagcgcgtcttcccaaggaccgagcacgaaaggctcgcaagttgcgcggcatcaaggccaaactctttaataaggagcgacgcaatgaaaagattcagattaagaagaagatccaggcccacgaagagaagaaggtcaaaaagcaggaggagaaggtcgaggatggagccctgccgcattatctgctcgacagaggcatccagtccagcgccaaggtcctgtccaatatgatcaagcagaagcgcaaggagaaggcaggcaagtgggacgtgcccattcccaaagtacgcgctcagtcagatgctgaggtcttcaaagtactaaagaccggaaagacaaagcgaaaggcatggaagcgcatggtcacaaaagtcacattcgtcggtgagaacttcacacgcaagccaccaaagttcgagcgtttcattcgacccatgggtctgcgcatgaagaaggctcacgttacgcatccagaactgaaagccaccttcaatctgcccatcattggcgtcaagaagaaccccagctcgcccatgttcacttccttgggtgtaattacaaagggtactgtgatcgaagtcaacatctctgagctgggtttggtaacgcaaacgggaaaagttgtctggggcaaatacgctcaggtcacgaacaatccagaaaacgatggtgttatcaatgcagtgctgcttgtctaaccccgaaaatgtcgctacctaatttaagagtttgatttaataaacaaacatatacaataacatgaacaatcgtttgattctcttagcttattatactattagctgtagcaatgccatatatataaacacacatatctataccaacatctttttgtttcttgcagtttggtgactggaatacaagatgcagatcttcgttaagaccctcacgggcaagaccatcactcttgaggtcgaaccgtcggatactatcgaaaatgtcaaagccaagattcaggacaaagaaggaattcctccagatcagcagcgtctgatcttcgctggcaagcagctggaagatggccgcaccctctctgactataacattcagaaggagtccactttgcacttggtgctccgcctgcgtggtggtgccaagaagcgcaagaagaagaactactccactcccaagaaaatcaagcacaagaggaagaaggtcaagctagctgtcctgaaatactacaaggtacacacaacaatctaccgacaccataccgaaaacattctgatctgttcttggaattcttgagtcttggtcttgtgctcattggcttaagatttggatatcagagtgactttaccagtgccctatattgaatgaacatgtgtacgatctcagtatttaatcactttctatgctctttcctttccataggttgacgagaacggcaagatccaccgtctccgtcgcgagtgccctggtgagaactgcggcgccggcgtcttcatggctgcccacgaagatcgtcactactgcggcaagtgcaacctgacctttgtcttcagcaaaccagaggaaaagtaattttgctacataagatcatgtacgtttccagaaatcaaataaaggtagtaattgaataataaattcaatcgctgaaattttcctttttttttattgttagttagcactagcgtggttagtaattgtttagcaaaacactaaagtttcatttagggtgtatggtttatttgtgaaaatattgaatacattttgtatactcgatttttactcgacct

SEQ ID NO: 10964 - DNA, 871 bp, DROSOPHILA
tttctttcctttgattctgttgccgaagcaagatgccgcagaatgagtatatggaacgccatcgcaagctgtatggccggcgattggattacgaggaacggaaacgcaagaaggaagcgcgtcttcccaaggaccgagcacgaaaggctcgcaagttgcgcggcatcaaggccaaactctttaataaggagcgacgcaatgaaaagattcagattaagaagaagatccaggcccacgaagagaagaaggtcaaaaagcaggaggagaaggtcgaggatggagccctgccgcattatctgctcgacagaggcatccagtccagcgccaaggtcctgtccaatatgatcaagcagaagcgcaaggagaaggcaggcaagtgggacgtgcccattcccaaagtacgcgctcagtcagatgctgaggtcttcaaagtactaaagaccggaaagacaaagcgaaaggcatggaagcgcatggtcacaaaagtcacattcgtcggtgagaacttcacacgcaagccaccaaagttcgagcgtttcattcgacccatgggtctgcgcatgaagaaggctcacgttacgcatccagaactgaaagccaccttcaatctgcccatcattggcgtcaagaagaaccccagctcgcccatgttcacttccttgggtgtaattacaaagggtactgtgatcgaagtcaacatctctgagctgggtttggtaacgcaaacgggaaaagttgtctggggcaaatacgctcaggtcacgaacaatccagaaaacgatggtgttatcaatgcagtgctgcttgtctaaccccgaaaatgtcgctacctaatttaagagtttgatttaataaacaaacatatacaata

SEQ ID NO: 10965 - protein, 253 aa, DROSOPHILA
MERHRKLYGRRLDYEERKRKKEARLPKDRARKARKLRGIKAKLFNKERRNEKIQIKKKIQAHEEKKVKKQEEKVEDGALPHYLLDRGIQSSAKVLSNMIKQKRKEKAGKWDVPIPKVRAQSDAEVFKVLKTGKTKRKAWKRMVTKVTFVGENFTRKPPKFERFIRPMGLRMKKAHVTHPELKATFNLPIIGVKKNPSSPMFTSLGVITKGTVIEVNISELGLVTQTGKVVWGKYAQVTNNPENDGVINAVLLV

SEQ ID NO: 10966 - DNA, 4338 bp, DROSOPHILA
tgtataatagtaagtcgattagtcgcgatcaatgccatcaaggggatgctactcttccgattgtgattcgtcaataaatgtatttttactttgtgttgaaaataaataatcaatgatatttttagaaaatttttaaatttaaatatgtaaatttaatatgtaaatttaatatgtatcctgcagcaggcgaaatgacgatctttctcgtgcaatcaaattacaaaagttctcgatttacggcaccaggcgcgcaaaaagatcaccgcgtgccaaacagtcagctgatcagtctaataagcgctttcttagtgatgcccgcgtgcctcttaattcgggaacccacccatgtaataccagggactttcgtgcctatcgtgctaattcgtgacacgaacatcaagaacatctaggccgctcatcactggtgtgcgctctgtttaaaattaacggttgtgccgctttcctattggtcaattggtaactggaaagatcggaagggctgccagcagcagcttgctagggattctgttggcctagtgtctgggacccgacagttgtcattttgactgggaaaaatgttctccgtccgacgtaaattttgtcagaaatttgtgaatatcagtggctggacaccaggcaaacaaaaattgccacatagggcagtaatcataaagtaactaacggtttctttccatctttggctttggtcgaatggggtgactggaaaggcgtaaggcgcagccatctttaaaaggatcagctgttttagttagtttgagcggacagctggcacctgttaccgtttctgttcgcctggtgtctgaaatcagaaaacttagcaatttgacactgaaaagggttgccacatttaattgcagcccgaaaatgtccctgaaaatgtcgtacacggtgcatgtattcgctaaatgtctagtgaagacacagaccgacaagtattttgcaccttccccagcctggtcacatagcaaaaagtgaaatcaaataacagtttttaccaattaaaaaacttgttttgcggacaaactacgcgagcagctgaaaacgagcagaagcatccaaaacgggtttcggtaattagcatgcacatcagtgaccgatgatctgcattgacgtatttgccgtgtttgacatttatgtagtcttgtctccactcgtctaagggtgaagcactaatccggatcacatgatggcctccagtggtggcgcctgttcccctttcgcctatgtggcctgggcgctgtttgccttgttgctgacgcacggcggagacaatgttgtggacgcccggcgtaaccagggcaaccagcggaagacctcctcctcgtcaagctcctccaactacggtcacgtgacgcagcccagctacaacacgaatggccacgccgccgggaactctcatgcagatgtggccaaactgagttaccccaactacaactcgcagccgaatcgaccaatggccgcgggctcatcagggtccccaggctccgcccctcagccaggttggaatgtgccgcagggtccgccgcccgcctactccgcttccaaccccgccggaggagcccgacccaacatgcacgagccgccgccagcctaccatgcccccaactacggagcagctcctcccaactatggagccgccaccggatcgaatgtccatcagccgcagtactctggagtgccagctggagccacctactacccggctgcaggacccggcagtggctattcccccaatatccccgctggcgctacatactatccgtccgccggccatgttcccatgggcggtggctatcacccagctgctgctccgcctccgggggccacctactaccaggcgggatctgctttgccgcccggagccacctattattctgcaccaccacaacagtcctcctctggcttgggcttcggtaagacgtctaacacgcagtgtatcacgatcccctgcagcaatcttctgttgctgactcatatttgctttaagtgctcacataaatcgtgtaaacgcttgttgtttaagtgacacacctgtttttgcgcttcaatgtttaatttcttcgcaggaactggactgcttgctggcggcttgggaggtgccctgctgggtcacgccctcactccctcgggaggcagttcctcctcgcagccggttgccgcagctccagctgctggtcaggatcgcataatcatcattaacaacggcgtgccagtgaatgccagtgatggcaccactgtgataaatgcagcaggtgtggctgctgccccgggagcagttccagcggccccagttccctcttccaacaccacccaagatgcccaacagccagccgtacccatggcaccaatgccctttaatccagagacctctaacatgaccgcgccggacccagctgctcccccaccgcctggaggcattatttgtgtgcccaccaaggtaaacgaaacggatccggctgacagcaccaagatgatagaggtggagaagattgcctgctacccggcacccccgccaccagctgcttccgccggcgagggtccagcaccactggcgcccatggccgctgatcaaccaggatcgcagcaggtgcagcaagtgcagcaggcacaggatgtcgccgctccaatccaggcatccgttcgctcccacaccggcggagctcgggccttggaaggattgaccatgcggacccttctgctcgtgcttatgagcggagtggtggccaagcggctcgctggcttttagagaccatgcttctggaacgttccactgtgcacccactcaattacccgactacctactgtaccttcctccccagctgttgtggccttggcgcgcatatttgcgctgaccaacatcgataattccaggcgctaattggacaaaaactcttgaattatgccgtaccatctccgactacagtatttgtggataaacaagctggcttcccagtcaaaaagcccccttttccaatttggccttcaattgtgattgttgcggtgtgcatgggccccgtaaccgtaaccgggcccggacccatcccagtgtgctcgaaatcaaagcaaacgctcgaatatctctgcaactacatacatacatatatatatatatatatacatttatatagccctatgtgcaaacccaactcaaaagccttctgaagaaagacaacctgaatgtaagttcccactaaaagtgtgtatttttctagacttgttagcgtaattgttgcttgtttttgtattgctgtgagcaaacgtatttgttgcactcttcaattgttgaataaaataaaagctttcgcctacacctacaacacccgccacgtatgagtttcatttcacatggccggtgcccacgatgcacacgcctaaacgaaatgggaagctgactagttaatggtccgcttgcataacgatgagcacaccagtggtccggactattctagaccccctgctttcgtaaccacagacggactaacgtactgcgatttgcagctagttaaatctgtaaactctcggatgccctgaaagtagacagctgacaagagcaccccccatacatcttaattattcgattggatgcaatccaactgactggctttatataaatctactttccgtctttctaagtttcaagtagtgttcattatgtggatgaccagataatataaacaattaaattatgcacatagtattcaatagtattcatcactctttcaacaaagagcaccaaccgatcacggaaaaaagcgagacggggatatcggatttgttggattggataaatgtctaaatatataaagtacatgcccacaaccaaatgtctttgaaggcaaatcgttttcaatgattatagccgcatcttctcaagcgaaataaattgaataggtcttttctcccagatagatttgtactaacaataaaaatgacttgggggtcgtaaggttcacacacaattgttttattgaggctagcccgaagttttctttttttcatgagttcacatctttctgttagcttataaaaacacgccgcttgagggcgtgaaatgtataataaaaaccaatgtaaacctagtgattccactgaagggatcagctacatctttactcggcatcgtcgtcctcatcgtcgttggagctgattctgaagtagcgcagctcgtacgagtccttttcgttggccaccacacggatccagtcgcgcagactgttcttcttcaggtacttcttggtcaagtacttgaggtatgccttggaaaagtgaacgtcggagctgacaatgagcttcagcttggagcgctcgaaggtgacg

SEQ ID NO: 10967 - DNA, 2072 bp, DROSOPHILA
aaataacagtttttaccaattaaaaaacttgttttgcggacaaactacgcgagcagctgaaaacgagcagaagcatccaaaacgggtttcgtcttgtctccactcgtctaagggtgaagcactaatccggatcacatgatggcctccagtggtggcgcctgttcccctttcgcctatgtggcctgggcgctgtttgccttgttgctgacgcacggcggagacaatgttgtggacgcccggcgtaaccagggcaaccagcggaagacctcctcctcgtcaagctcctccaactacggtcacgtgacgcagcccagctacaacacgaatggccacgccgccgggaactctcatgcagatgtggccaaactgagttaccccaactacaactcgcagccgaatcgaccaatggccgcgggctcatcagggtccccaggctccgcccctcagccaggttggaatgtgccgcagggtccgccgcccgcctactccgcttccaaccccgccggaggagcccgacccaacatgcacgagccgccgccagcctaccatgcccccaactacggagcagctcctcccaactatggagccgccaccggatcgaatgtccatcagccgcagtactctggagtgccagctggagccacctactacccggctgcaggacccggcagtggctattcccccaatatccccgctggcgctacatactatccgtccgccggccatgttcccatgggcggtggctatcacccagctgctgctccgcctccgggggccacctactaccaggcgggatctgctttgccgcccggagccacctattattctgcaccaccacaacagtcctcctctggcttgggcttcggaactggactgcttgctggcggcttgggaggtgccctgctgggtcacgccctcactccctcgggaggcagttcctcctcgcagccggttgccgcagctccagctgctggtcaggatcgcataatcatcattaacaacggcgtgccagtgaatgccagtgatggcaccactgtgataaatgcagcaggtgtggctgctgccccgggagcagttccagcggccccagttccctcttccaacaccacccaagatgcccaacagccagccgtacccatggcaccaatgccctttaatccagagacctctaacatgaccgcgccggacccagctgctcccccaccgcctggaggcattatttgtgtgcccaccaaggtaaacgaaacggatccggctgacagcaccaagatgatagaggtggagaagattgcctgctacccggcacccccgccaccagctgcttccgccggcgagggtccagcaccactggcgcccatggccgctgatcaaccaggatcgcagcaggtgcagcaagtgcagcaggcacaggatgtcgccgctccaatccaggcatccgttcgctcccacaccggcggagctcgggccttggaaggattgaccatgcggacccttctgctcgtgcttatgagcggagtggtggccaagcggctcgctggcttttagccgactacctactgtaccttcctccccagctgttgtggccttggcgcgcatatttgcgctgaccaacatcgataattccaggcgctaattggacaaaaactcttgaattatgccgtaccatctccgactacagtatttgtggataaacaagctggcttcccagtcaaaaagcccccttttccaatttggccttcaattgtgattgttgcggtgtgcatgggccccgtaaccgtaaccgggcccggacccatcccagtgtgctcgaaatcaaagcaaacgctcgaatatctctgcaactacatacatacatatatatatatatatatacatttatatagccctatgtgcaaacccaactcaaaagccttctgaagaaagacaacctgaatgtaagttcccactaaaagtgtgtatttttctagacttgttagcgtaattgttgcttgtttttgtattgctgtgagcaaacgtatttgttgcactcttcaattgttgaataaaataaaagctttcgcctacacctacaa

SEQ ID NO: 10968 - protein, 469 aa, DROSOPHILA
MMASSGGACSPFAYVAWALFALLLTHGGDNVVDARRNQGNQRKTSSSSSSSNYGHVTQPSYNTNGHAAGNSHADVAKLSYPNYNSQPNRPMAAGSSGSPGSAPQPGWNVPQGPPPAYSASNPAGGARPNMHEPPPAYHAPNYGAAPPNYGAATGSNVHQPQYSGVPAGATYYPAAGPGSGYSPNIPAGATYYPSAGHVPMGGGYHPAAAPPPGATYYQAGSALPPGATYYSAPPQQSSSGLGFGTGLLAGGLGGALLGHALTPSGGSSSSQPVAAAPAAGQDRIIIINNGVPVNASDGTTVINAAGVAAAPGAVPAAPVPSSNTTQDAQQPAVPMAPMPFNPETSNMTAPDPAAPPPPGGIICVPTKVNETDPADSTKMIEVEKIACYPAPPPPAASAGEGPAPLAPMAADQPGSQQVQQVQQAQDVAAPIQASVRSHTGGARALEGLTMRTLLLVLMSGVVAKRLAGF

SEQ ID NO: 10969 - DNA, 2477 bp, DROSOPHILA
ttcggtcgggtgctgcgcgtccgtttggcccgttcgctgcgcaccggtaacagcaagggctacgccttcgtggagttcgagtacccggaggtggccaaggtggctgccgacaccatggacaactacctgatgttccagaaggtggtgaaggccacctacattccaccagagaagcagacactcaacttcttcaggacttccttgaagaaggttgtcaataaggtgcgttcaaagggaaatacatctaatgtccgtttgttattcatagttgtacttcacttgcaggccggcaaggaaatctatgtctcggatttaaccaaagccacacagcgcagcgtgaaaaagcagaataactgggatgagtccgcctgccagaagcgcaccgtggccaatctcaacaagatcaagaagctgcaggagaagtacaaggatctgggcatcgacttctccaacttactggtggaaccagtaaagaaagcagcaggctccgctgaggcatctacaagccaggcagccgccaagaaagccggtaagaaacaaaaaacggccgcgaagaaagaaccaacgctggaggatttgctgggcaacaccatcaacgaggactccgatgatgaggactacgttgatgcatccgatgatgagtccgatctggaggctgaggaggagcaagcggacagtgagcagaccagcgatgacagcgacgaagaggaggatttatcaccgccgcccaagcagaaaaagactaagctggctgataaactgaaacgcaagcccggcactggtggtgtgcagaagaagaaaatagctccgccggctaagagcaacaagaatgccgccacccagaagttgcagctggccgcagccaagtcgctggccaaacccttgcccaagggaaaggccaagaaatccaagtagtagcttaaaatacatttactatagttgttaagtaagcgaaaacattttgtaagatgaattgtgttaaaatatgtccttgtacaaactaaaatggcgttttggccgagctgccttgctgctcctccagtttgatgcgcttgcacttcatgcgtcgattttggaaccacaccttcacctggcgttcggtcagctccagcgccactgcgatttcgtagcgacgcaagcgagtcaaatagttggaatagcagaactccgcttccagctgcttgagctgcgtttttgaaaatgctgtgcgttccttgcgattcgagctgattgcccggagtttggacctttggcttggaagttcttgaccagtaggtgcctcattttgtaaccattgatcgttcgcttcgttgcaccaattagtttctagtttattgtaatccgcgtaggaagaagacgcactgtggtcatatacatagctgcagtccgtatagccctccgtttggttcagccacgatttcgtaatatcctcgtagcaataggattcttggtagacgttcgcgtgggagttcttcattgccgatgtctttgcttctaggtctaaactattactgaaatctcagattcggcggagctgctttttaaacaaggcgcagagtgtgccaggccaatctgctttttcacttagtcgcaaatgatgtgctgctgatatgataattgtgcgcaacatctggacctcgggtatgagtggttatgacacccgcagatcggcttgttgtctttgcctacgaactgttgtcacaacaaacccgaatccgattcccagccccttccccaggcgtccggtcagaaacggaagtggacgcatgagtcaagtgctttgtgccaccaactgcggagctataaaattttaatagacaaccgtcggcgagtcgtaagacccagtcggagatttatctgaaagtcgcaattgcacgcgcttttaaagtcgatgcggcggattacgagtgaccattgagtgtatattcctagataatccatgacaaagtggagttttatataataattaatggggaaataagtgcgtgtcacagaaatggttaagggataaaatagttcaataaaataagtcttacgggggttttagaaattagaaaagaaatcaaaaaattttgatatcctattatgaaaccaattataaaatggacacagcaaaaacgtaaattctagcttctgcttatttttcttggggcttaggtatacccttttttatttgagtttttattaaataatataccggtatatgaaaattaaccggttccggttttaaattatccgcatttattttcaaactgaataagtgttgggtaatcttttttggttaaggcataggcacatttcaagtgttgccagactatgacattccaaagggcattcagtgatatctgttgtccttcgctgtgtagttattgtttggctagatttattcatatatttcttttaattttcctttgtcagctaataaatctcatttaatctagaaaaagtatacaagaggtttaaatatatctatcgat

SEQ ID NO: 10970 - DNA, 477 bp, DROSOPHILA
atgaagaactcccacgcgaacgtctaccaagaatcctattgctacgaggatattacgaaatcgtggctgaaccaaacggagggctatacggactgcagctatgtatatgaccacagtgcgtcttcttcctacgcggattacaataaactagaaactaattggtgcaacgaagcgaacgatcaatggttacaaaatgaggcacctactggtcaagaacttccaagccaaaggtccaaactccgggcaatcagctcgaatcgcaaggaacgcacagcattttcaaaaacgcagctcaagcagctggaagcggagttctgctattccaactatttgactcgcttgcgtcgctacgaaatcgcagtggcgctggagctgaccgaacgccaggtgaaggtgtggttccaaaatcgacgcatgaagtgcaagcgcatcaaactggaggagcagcaaggcagctcggccaaaacgccattttag

SEQ ID NO: 10971 - protein, 158 aa, DROSOPHILA
MKNSHANVYQESYCYEDITKSWLNQTEGYTDCSYVYDHSASSSYADYNKLETNWCNEANDQWLQNEAPTGQELPSQRSKLRAISSNRKERTAFSKTQLKQLEAEFCYSNYLTRLRRYEIAVALELTERQVKVWFQNRRMKCKRIKLEEQQGSSAKTPF

SEQ ID NO: 10972 - DNA, 2761 bp, DROSOPHILA
cacatgttaataaccacatgaatgtatttcagatctggtctacagaattaacaattaacaatgccgcagaatgagtatatggaacgccatcgcaagctgtatggccggcgattggattacgaggaacggaaacgcaagaaggaagcgcgtcttcccaaggaccgagcacgaaaggctcgcaagttgcgcggcatcaaggccaaactctttaataaggagcgacgcaatgaaaagattcagattaagaagaagatccaggcccacgaagagaagaaggtcaaaaagcaggaggagaaggtcgaggatggagccctgccgcattatctgctcgacagaggcatccagtccagcgccaaggtcctgtccaatatgatcaagcagaagcgcaaggagaaggcaggcaagtgggacgtgcccattcccaaagtacgcgctcagtcagatgctgaggtcttcaaagtactaaagaccggaaagacaaagcgaaaggcatggaagcgcatggtcacaaaagtcacattcgtcggtgagaacttcacacgcaagccaccaaagttcgagcgtttcattcgacccatgggtctgcgcatgaagaaggctcacgttacgcatccagaactgaaagccaccttcaatctgcccatcattggcgtcaagaagaaccccagctcgcccatgttcacttccttgggtgtaattacaaagggtactgtgatcgaagtcaacatctctgagctgggtttggtaacgcaaacgggaaaagttgtctggggcaaatacgctcaggtcacgaacaatccagaaaacgatggtgttatcaatgcagtgctgcttgtctaaccccgaaaatgtcgctacctaatttaagagtttgatttaataaacaaacatatacaataacatgaacaatcgtttgattctcttagcttattatactattagctgtagcaatgccatatatataaacacacatatctataccaacatctttttgtttcttgcagtttggtgactggaatacaagatgcagatcttcgttaagaccctcacgggcaagaccatcactcttgaggtcgaaccgtcggatactatcgaaaatgtcaaagccaagattcaggacaaagaaggaattcctccagatcagcagcgtctgatcttcgctggcaagcagctggaagatggccgcaccctctctgactataacattcagaaggagtccactttgcacttggtgctccgcctgcgtggtggtgccaagaagcgcaagaagaagaactactccactcccaagaaaatcaagcacaagaggaagaaggtcaagctagctgtcctgaaatactacaaggtacacacaacaatctaccgacaccataccgaaaacattctgatctgttcttggaattcttgagtcttggtcttgtgctcattggcttaagatttggatatcagagtgactttaccagtgccctatattgaatgaacatgtgtacgatctcagtatttaatcactttctatgctctttcctttccataggttgacgagaacggcaagatccaccgtctccgtcgcgagtgccctggtgagaactgcggcgccggcgtcttcatggctgcccacgaagatcgtcactactgcggcaagtgcaacctgacctttgtcttcagcaaaccagaggaaaagtaattttgctacataagatcatgtacgtttccagaaatcaaataaaggtagtaattgaataataaattcaatcgctgaaattttcctttttttttattgttagttagcactagcgtggttagtaattgtttagcaaaacactaaagtttcatttagggtgtatggtttatttgtgaaaatattgaatacattttgtatactcgatttttactcgaccttgagaaatgcaatttgtttatggttaaccactcaaacgttaactatgtcgacgttaaggcttttggacaagaaagtcagtatatcggtggcttcctcgattctcttcgatgtcggcttgccagcgccatggcccgccttctggtagacgcgcaacagaacgggatttttctggaattccgagtcgcgaacagcttcctggagggccgcaatgaacttgagcgaatgcaaagggctgacacgatcgtcgtggtcggcggtcaggatcaaagtcgatgggtattccgtttcggcgcccttcggagtgtgcacattatgcagcggcgagaacttgtacaggttgtcaaagtgctccttctccgatgggtttccataatccgagcaccaagcgtggccaatggtgaacttgtggaagcgcaacatatccatgacactatgaaatcaatatatttctcacttggtcacaacaaacaggctatctacttacccaacttgagccacagcagctccaaacaaatccggacgttggttgatacacgagccgaccaaaaggcctccgttggagccaccttggatggccaaacgatccttggtcgtgtacttattctcgatcaagtactcggcagctgcttggaagtcatcgaacacgttctgcttgttcagcaggcgaccgccgttgtgccacttctcgccatattcgccaccacctcgcagattcggataggcgagcacaccatcgaatgtgtcgatgaacataagcctgcagagattgaaggatgtgttcacatatatacatgctaacttttaaaaagtatttctcaacatacccagagagtccgaaggaaggcagcatgctgatgttga

SEQ ID NO: 10973 - DNA, 572 bp, DROSOPHILA
gcagtttggtgactggaatacaagatgcagatcttcgttaagaccctcacgggcaagaccatcactcttgaggtcgaaccgtcggatactatcgaaaatgtcaaagccaagattcaggacaaagaaggaattcctccagatcagcagcgtctgatcttcgctggcaagcagctggaagatggccgcaccctctctgactataacattcagaaggagtccactttgcacttggtgctccgcctgcgtggtggtgccaagaagcgcaagaagaagaactactccactcccaagaaaatcaagcacaagaggaagaaggtcaagctagctgtcctgaaatactacaaggttgacgagaacggcaagatccaccgtctccgtcgcgagtgccctggtgagaactgcggcgccggcgtcttcatggctgcccacgaagatcgtcactactgcggcaagtgcaacctgacctttgtcttcagcaaaccagaggaaaagtaattttgctacataagatcatgtacgtttccagaaatcaaataaaggtagtaattgaataataaattcaatcgctgaaa

SEQ ID NO: 10974 - protein, 156 aa, DROSOPHILA
MQIFVKTLTGKTITLEVEPSDTIENVKAKIQDKEGIPPDQQRLIFAGKQLEDGRTLSDYNIQKESTLHLVLRLRGGAKKRKKKNYSTPKKIKHKRKKVKLAVLKYYKVDENGKIHRLRRECPGENCGAGVFMAAHEDRHYCGKCNLTFVFSKPEEK

SEQ ID NO: 10975 - DNA, 4783 bp, DROSOPHILA
gcagcgggcaccagtggttctgtgaccatatcgctgcatccgctggtcataatgaacatctccgagcactggacacgctttcgtgcacagcacggtgagccgcgacaggtgtacggagcactgattggcaagcagaagggccgcaacattgagattatgaactcgttcgaactgaagacggacgttattggcgatgaaacagtgatcaacaaggactactacaacaagaaggaacaacagtacaagcaggtgggtgtccaagcctctacatacgctgctttaccagctgttactcttttttccccaggtgttcagtgatctcgacttcataggctggtacacaaccggcgacaatcccactgccgatgacattaagatccaaagacagatagccgccatcaacgagtgccccatcatgctacagctgaatccgctctcccgcagcgtcgaccaccttcccctgaagctattcgagtccctaatcgatctggtggacggcgaggccaccatgctgttcgtgcccctcacctacacactggccaccgaggaggcggagcgcattggtgtggatcatgtggcgcgcatgacctcgaacgagtccggcgagaagagcgtggtggcggagcatttggtggcccaggacagtgccattaagatgctaaatacacgcatcaagatcgtgctgcagtacatacgcgatgtggaggccggaaagctgcgggccaaccaagagattctgcgagaagcctacgctctctgccaccgactgcccgtcatgcaggtgcccgccttccaggaggaattctacacgcagtgcaacgatgtgggactgattagctacctgggcacgctgaccaagggctgcaatgatatgcaccactttgtgaacaagtttaatatgctgtacgaccgccagggatccgcgcgccgcatgcgaggtctctactattgatatatgcaaacaatctattaaagcttcggagataaatacacataatcgtacgatgggtgaatgcggttttatttcagctgccgctgggcaggctacatacgtatacgggtggcatcaagcgatatcactttcttcctgagcttccagctcctcttgcttcgtaaattcaattcagatgcacagacaacatttcctagacactaaattaggtaatttcgcagcggaattagtggttgtagtcgtccagcttgatgctgggggcatactgctgcaagaactccacctccagcggatgcatctccttggcgggaatgatgagcgagtgcagcggtccgcccaaatcggtcgagcgcatctcaagcagcgtgccaacggcaatctgctgcgactcctggccaacacgggccagtccaacgcacagtgactgctcgttgagcactgtgttcttctccagcgagtccttcttctccacaatggacagcaactgatgagccgcctccgccacggtcatgaaacgcggtggcatgtactccttgcgtttgcgcatcaaggactccggcgtgggctccttcaccttgatgtccagcaggcacagcgtgtgcatgttgtgcaggcgattcagcttgatcttgtcgtagaagctgtccggcttccatgtctcgtcccagtacggaatcgaaacggtctcgccgaatttgtacaattgcaggccgcagcagccgacggcgttcatgatcgatgcattgtggatgaccttgtaggggatgttcttctccttggcgcgcagtatgaagtctgtgtgggtggtggcgccaaaggggtcgcccaccacgagcagcgcaacatcggattcgcccgcacccgccaggatctcatccgcaccctgctccaccagatcgcggtcggctagcagcagtggtcgtccatagaactcttgctgcgaacaaagtggagatgcaattagcattgggggtgctcccagaacgaaggccattccagatacctaccatatcctcaaggctgcagcccagaatcgaggtgtacatctccagatagacgcgactgcattgcttcactatctccagacccttgaccgtgatgtccttcaggtcgccaaggccgaggccgattaggtagaacatgctgggcgactggtgcgactgctcggccactgcaactcctgccaaatgttattaaaatcgctttttaaatgcagtcaacacgtgccgtcgcgcgttgtgtgaccgccgccagagcgccaagaaatactcacattgcgacaatgggctaaaaaagcctgtgcagcaatggcgcgtattttgaatttgaaggccatttcatttaattgggaaataaacactaaaaactttggtccactacttaagaaatgatatatttggtttgcttttttgatctcagctgtatgatacctatgttactcttagactgtaataataagtaaactacttaacataactacactccagcaattattggaactctgaatttgtttgctcggaaatcttgaagctgcaaagttggggtctgtggatgaaaaatatcatttaattaacgtacttacgtacttacaacaatattacgccatttcaacttacgttgttgaggcgccccgaaccacgcaataagctatgaatcgttcaatctgcaaagcaatctttatctttaccgattcccttattataaatgcataggcactcaccatcatttcaaagtcgccataggcggcggagtgatccatgcgcacctgcaggaagtacttgtgtatctcggcacccagattgtccttccaatcaggacactcctcgcgtatacgtctgcaattgatgatcatgctgaaagtgcggatgagcataaacaaatctgcctggcgtccactgtttgccaactggcgccagttgaccgttttggccatttcaaaagccttgagagcctgcatatatatgggtttagattttaaagtgctgatggaatcagttttaggttcatacatattccttctggtccagttcaactggttctcccgtgtaccgtcccattatggtgagtagcagggccatagctacatcgttgccaagatggcaggattctaccatggcgggaatcgcggcctgcaggtccagcactctttccaggcgctccatacccacgccagtgataaggttttcgtacaacccactggccatgtagaacatctaaagggaataagatgtaattgatcggaaatgttaggatagcagaaaggggaactacctcctccgagtccagggactctgccaggtgacacaccacatccaccatcatgtagcgctccttcatcagcagaacgttgtccctttggtacgtcatcatcataatggagagggtaaacagatcgagcagctgctgcaaattgagttccagcttcccggctaaggtagccatcatgcgattcagcaactaagttaatataaacaaattagtaatagttattaggaaataaacagaataataacctgtttgccgtctgtggtttctgcagcgtaaggaaacaaatgcttgatggacgacttccggagaaaggacatgatggattcgtggtcatagcctaggcgcatttcatccacttccacgagggaattattcaacgatgaatcagatagattcattttgtattggcggtaaaaaatgcgcaaagcaaataaatagaaataataaactgaaagagtgaccaggcaccaaggggtgggtcaaatagcctaacgcctagttaagcgctgtatcgcatgaacgtaaacggtcataccattattgttgctccacgtgcggcgatttttattcatttactactttaataatcaattttagtgaattgacactaattaaaatgccgcctgttaagaagcccaaggcgcagaagatcgagaagcaaagcacgcccaaaaagcccatcgatgcagccaagaatgtggtttccggacaggtgagcggctaccaaaaacaaatgctcctccgttgggttggataaccgtaaactgcgtccattttagctaaagaaaaaggtgaccaaggccaggccgcagaagccaaagggtccagaacgcggcgtggtcattgtgaagcacctgcctcacggattcttcgagcagcagctgcgccagtacttccgacagttcggtcgggtgctgcgcgtccgtttggcccgttcgctgcgcaccggtaacagcaagggctacgccttcgtggagttcgagtacccggaggtggccaaggtggctgccgacaccatggacaactacctgatgttccagaaggtggtgaaggccacctacattccaccagagaagcagacactcaacttcttcaggacttccttgaagaaggttgtcaataaggtgcgttcaaagggaaatacatctaatgtccgtttgttattcatagttgtacttcacttgcaggccggcaaggaaatctatgtctcggatttaaccaaagccacacagcgcagcgtgaaaaagcagaataactgggatgagtccgcctgccagaagcgcaccgtggccaatctcaacaagatcaagaagctgcaggagaagtacaaggatctgggcatcgacttctccaacttactggtggaaccagtaaagaaagcagcaggctccgctgaggcatctacaagccaggcagccgccaagaaagccggtaagaaacaaaaaacggccgcgaagaaagaaccaacgctggaggatttgctgggcaacaccatcaacgaggactccgatgatgaggactacgttgatgcatccgatgatgagtccgatctggaggctgagg

SEQ ID NO: 10976 - DNA, 2020 bp, DROSOPHILA
aatcgccgcacgtggagcaacaataatggtatgaccgtttacgttcatgcgatacagcgcttaactaggcgttaggctatttgacccaccccttggtgcctggtcactctttcagtttattatttctatttatttgctttgcgcattttttaccgccaatacaaaatgaatctatctgattcatcgttgaataattccctcgtggaagtggatgaaatgcgcctaggctatgaccacgaatccatcatgtcctttctccggaagtcgtccatcaagcatttgtttccttacgctgcagaaaccacagacggcaaacagatgatggctaccttagccgggaagctggaactcaatttgcagcagctgctcgatctgtttaccctctccattatgatgatgacgtaccaaagggacaacgttctgctgatgaaggagcgctacatgatggtggatgtggtgtgtcacctggcagagtccctggactcggaggagatgttctacatggccagtgggttgtacgaaaaccttatcactggcgtgggtatggagcgcctggaaagagtgctggacctgcaggccgcgattcccgccatggtagaatcctgccatcttggcaacgatgtagctatggccctgctactcaccataatgggacggtacacgggagaaccagttgaactggaccagaaggaatatgctctcaaggcttttgaaatggccaaaacggtcaactggcgccagttggcaaacagtggacgccaggcagatttgtttatgctcatccgcactttcagcatgatcatcaattgcagacgtatacgcgaggagtgtcctgattggaaggacaatctgggtgccgagatacacaagtacttcctgcaggtgcgcatggatcactccgccgcctatggcgactttgaaatgatgcttattgcgtggttcggggcgcctcaacaacgagttgcagtggccgagcagtcgcaccagtcgcccagcatgttctacctaatcggcctcggccttggcgacctgaaggacatcacggtcaagggtctggagatagtgaagcaatgcagtcgcgtctatctggagatgtacacctcgattctgggctgcagccttgaggatatgcaagagttctatggacgaccactgctgctagccgaccgcgatctggtggagcagggtgcggatgagatcctggcgggtgcgggcgaatccgatgttgcgctgctcgtggtgggcgacccctttggcgccaccacccacacagacttcatactgcgcgccaaggagaagaacatcccctacaaggtcatccacaatgcatcgatcatgaacgccgtcggctgctgcggcctgcaattgtacaaattcggcgagaccgtttcgattccgtactgggacgagacatggaagccggacagcttctacgacaagatcaagctgaatcgcctgcacaacatgcacacgctgtgcctgctggacatcaaggtgaaggagcccacgccggagtccttgatgcgcaaacgcaaggagtacatgccaccgcgtttcatgaccgtggcggaggcggctcatcagttgctgtccattgtggagaagaaggactcgctggagaagaacacagtgctcaacgagcagtcactgtgcgttggactggcccgtgttggccaggagtcgcagcagattgccgttggcacgctgcttgagatgcgctcgaccgatttgggcggaccgctgcactcgctcatcattcccgccaaggagatgcatccgctggaggtggagttcttgcagcagtatgcccccagcatcaagctggacgactacaaccactaattccgctgcgaaattacctaatttagtgtctaggaaatgttgtctgtgcatctgaattgaatttacgaagcaagaggagctggaagctcaggaagaaagtgatatcgcttgatgccacccgtatacgtatgtagcctgcccagcggcagctgaaataaaaccgcattcacccatcgta

SEQ ID NO: 10977 - protein, 558 aa, DROSOPHILA
MNLSDSSLNNSLVEVDEMRLGYDHESIMSFLRKSSIKHLFPYAAETTDGKQMMATLAGKLELNLQQLLDLFTLSIMMMTYQRDNVLLMKERYMMVDVVCHLAESLDSEEMFYMASGLYENLITGVGMERLERVLDLQAAIPAMVESCHLGNDVAMALLLTIMGRYTGEPVELDQKEYALKAFEMAKTVNWRQLANSGRQADLFMLIRTFSMIINCRRIREECPDWKDNLGAEIHKYFLQVRMDHSAAYGDFEMMLIAWFGAPQQRVAVAEQSHQSPSMFYLIGLGLGDLKDITVKGLEIVKQCSRVYLEMYTSILGCSLEDMQEFYGRPLLLADRDLVEQGADEILAGAGESDVALLVVGDPFGATTHTDFILRAKEKNIPYKVIHNASIMNAVGCCGLQLYKFGETVSIPYWDETWKPDSFYDKIKLNRLHNMHTLCLLDIKVKEPTPESLMRKRKEYMPPRFMTVAEAAHQLLSIVEKKDSLEKNTVLNEQSLCVGLARVGQESQQIAVGTLLEMRSTDLGGPLHSLIIPAKEMHPLEVEFLQQYAPSIKLDDYNH

SEQ ID NO: 10978 - DNA, 7344 bp, DROSOPHILA
ggttatatgagcaggcgaggggttccgattccagcgtcgatatcaaacagctatacagtgtatcctccacccagggagctgcagtggctctggactggccgcgggaacatcttctgttggcctgctttgccaatggcagcgttcgccagtgggatttaagcaggcagatggctctggattgggagtgagtctctctaaacactaaacgaaacatttcccggcattaatcttaaatattatttaattaacttctccagatacaccctgcccgcaacggttagctcagagcctacggcaatggtgacccttggtctggatgacttcgtcgtgggcactaacgatggtggcgtctatcgctgctggaacaccggccggcaaaccgcagccatcaagcagatcaaattgttggccctacggcgacatcgattcatggtttccaccctcctccgtaccgaaatggagggcaacctgttcgtcctgagctgcgatctcagtggacaggccttttatcacgatatgcggcttgtggatgaggtgataacatgacaaacaaacgagctgaacactatttattttctcttaaataatgaacaggacatggctcagttgatagtacaaattccacttccctttaaaaacgtaatcgcctgtagtcgggatggcaacatcatcttttgcccagccaatgatgggtcactggaatactatagggtgagcgatggagcccatgcccatgtcaagggaggacttcgcggcaagggaagccttatccgtagtagcgacaatgggtgagctaataacgaaggaaatcaataaaacaacaaatttgaataataattatcttacagacgctggttaattgcaggcctctatggcgacgagttccagatattctacgtagaacactaaatagtcgtattgaattttgttctcagttttgaaataatcgcttgtatttgcatgactgcttatgttaatatgtacggttttatcttctcttaggtttggtatatacacaattttattttaaaatttctcagatctctaacaaataccacatgtaaatatagactatgtattgtataaacaagacattttatctgtgtagaattttgaacaaaatgcaaaaacgtaaagccatttcgaaaatttggcgtaaaataagactgcattctctgtgggaatctcgttaaaaccgcgttttcacatacgattcacaaaataaaatgttccttttacaactatagatcatttcatagtgttatcaagctgtatgtgaacatataaaaagaaatatgctgtgtgtagaaaagtgctagaatgacataattacaaaatggcaataaatgaatacactaaacttttataaccatttgcctacagtaaaataaattatacaattaacattaacgagatatatgcgatatataaatatataatagaactgcacacaattttgctaaatctctcacgtccgaacgtccgatcctatctgtcctaatcacgcgattccactctaatccatttcagtccactttgcatccactcgttcaacttttcacttaagcttagattgcaatctgcattttgcacatagttcacataataataactagaagcagcgctcgcccaacttctgattggctgataaattcagttgaagagcaccgtattgggatcttcgttatccatctgcttcacatggcgcagcacatctttctttgtaattacgcccagtaggcgactgcaatggaatttggattagataacttgaaactggttaaactgcttctggccacaaactcacccgttgtgtgttaccaatgtttggcgcagtcccagctttcggaacatgtccactaccgtctccattggcgtttgatctgtaactgtgatcggtgccatatccaggatctttttcagcttcagcggctggggtcccagattttgaataggctgggatgatgtgaataatactatggagctgctgctaatgccctcgattagacgcttggcattgcctataaaatttgtaatatttaattatgcaacatgatctcgaaacaagttgtgactgacctatggccaagttaagatccctgcgcaatacaaagcccactaaatattgattctcccgcgacaccaccaccggatagccattgtgttccgtttctttaagaaggttctcaacatcgtccaccgtcatggagtcttgggtaatgacattcaaagtttcattccgcctaaaatgaagtttttgttagatgatcttgaggaaaaaaaggttttctttatacatactttggttgcatcacatctgcggccagtgttgtatgcgcaaactcttctttgctgtctaggaacggataaccattcagcgcaatgtgcgcatcgtagataccttgcctgcccagagcatcacccacccacttggaggccatggcggcagccatcaggggcacaatataccgcactccgcctgttagctcgaacattatcactaccagggagacggtcattcgagtgacacctcccagcacagctgctgctcccacaaccgcatacagtccgggtgtgataagattgctgtccgcacactcaccggtaaagaaccaaatattgggatagctgtaggcaaactgctccacaccgattccaacaatgcgacccatgatggcgccaaggagcagggacggaataaacagaccagcgggcactttcatgccaaacgtgaagatggtcagggccagtttaagtataaaggtgagcataagcagccaaatggagctgtacacaccaggacctggctccgtaacttcaatgaaactgttgcccgacgtgatgttcatgcgcttgtaatcactataaggaaatatgtagttattataaaaaaaaaataaaaaataattattattgaaaaaacgtaccataacggattggtgacatctccgggtgagcacttgctaaccaataggaatattagctcgttcatgttcattcgggtaaatggattggggtagcaaatgatggcagtgaccagggtaacgaagagcacttccattactggatactgtccgagcttgctgaacttcctgtagcggcaccaccacaaattggccttgatgaagaatgtgccaataacaccctacaataaatattatgttaataaattgtagagcttcaaaattagttcagatttacccccataattccgaggaaaacaaaaggaataagttcgaaaaagatccagggcttgttatactccacgaaaaagagcacggaatgctcgttgccaaacggcgtcagtgatcgtaaaacgaatgcggcaatcaatgcacaaaagaatgaacgccacaatgtcttcaatggaaaatagtatgacacttcctccagcgaaaagagaactccaccgattggtgctccgaaggccaccgagacgcctgccgctgctgctgccgaaagaatctcacgcttcttggcctcatttcgaccatattttgggaaaacatgtgagaatatgtttccaatacaactggcaatgtggaccatgggtccttccttgcccaaagtgaggccagcggatacagacagcatcagacccaccgatttgatcagcagcgtccactttcctagatagccgcgtataatgaagccagacaagatggtctttatctcgggaataccagatccgcaggcgtagggcgcaaacattcgcacaagggaggcgctgagcgaagcaaaaagcaaagcccacagcacataccagatgtaagcgacgatatatggtccggtgccatttcgatccaaaccaaagatctctggccaggttttccactgaaaataaatgcggttttagtgccttatcaggaagaaaatgtagtttcactcaccgtcgagcagttgccttcttcaaatactgactgtttggccggatagcagcattgttccctgttaaaccaaaaggcgggtggacaaatgccatgctttagatccgacatccaactagctccaatgtccaccatgcccgccacacagcctgcggcaattccgacgagtaaaacacatagccagccagatccggcatcaatggaaccctttaagtaaaatgattgataagtatggtgtgttttgaatcataaacgatcttatacctttatcagatcccacaaggagtcctgtcgcttcttgactatgtagcgatgtcgcatccgatcacgggcaatgtcccgctgccaatcaatggtgtgaaaatcttcgtactgcccaatgccaggaatatcatcttgcacgtccgaggaaccatagaaggatagtgctcctatagcaataataaataatacaataaacattacggatttgacacagtaagctccgaatcatgttgtcgtagtagcattacacgtgattacgctaattctaatggtttggtgtcaaagtccaaagagaaccagagccttataaccgcaaaaatttatagtatttttctcgtgtttcattcaggtatcgagacgaagaacgtttacgttttcttaaacagattcctcgaataaagttcttacagatattactcgttctagcgtattgtaaacattgattgctattatcatcagatatacgatagtatttacccaacaactataattgattctttttcgtttaaataaataattcccaatagaaatgccagctggttgtttagacaactcagtgattatattgctaaattagcatcacgtgtgtaaatggtgattgtattaatatacgtatgtacatatatcatgaagttaactggtgtctccacaatacatgtctgtatgctaatgattgtacatattaattgaattgccagcgaatgagtacagctgtgagccgaatattcggaaccggcaatgcggcgaggtgacgtcgccttactcaaatgttcgtgatcttgattaacaccacagacagcaacattggatgttttacgcaatggatctctccgaactcaccgtccataggatcgccgaaggcactgtgagttggcacatgctggtgcattgtccgctgattgtggtgattgccgccgccgttgccgccagagtgtccgaaatctcgttcggtgtccgattcggtggccgtttcccggtgatagccactgctgcttcctcctcctccgccgccgccgatcacatcgcctggactggagcggggtgtgatgtcaatcatatcctcgtcgtcggtgcccgccgccgtcagcgaggtggtcagtttggtgtgctgcgccagcggatggtcacgaaaagttccgtctaggtcgccgtcgccgccggctccgtttgtgtggccgttcgactgaaaaaacgaaataagcaaaaaagctataagataaggtttgtgaatttggagagctagctagcctctaccgctttgtttatgcatacgcattgataagattaagatctcagacacagcgacaccgttcaaataatacatacatctgtacgttgaattacaattgaaagcatttccgcccccttgtgccagatttttttgtgttatcaggggattcgcccttatccgggaagcttcagcagcctattcaaattaaatgccaaccgaaagttggcaagcatttgcttagaatttggataaaggagacttctgtgctgggcttagtgtcattttttggaaaccgaatatggcaaatccagtgaagtaaggatttcaaatagttatagatagataatatcactttttagaggaaagtaaagaagtaaagaagaactgtgacaagatatttatccaaaacagacaatgcataactgcaatattaagtatttttccatcatatttatctaaaattaagccacacttcaagtttttaaacagacatttgttctgttgttctgtgaaaggggggaaatcccagtgggttttatggtgggctacctttttcatgaccgtttggtaggcggttatgtagctgttgccctccgcggcggcctccctgctgcccttcagcggaaacttctccatcctgcgatcaggcgatcctacgtggacaatttctttggatagctatccaatattttggattccctttttgcgttgcagtccagcaaagcggcgcagcagcagcgcagttgcagcgcagcgagcgcacgtcactaagtacaaacacacacacgcacaaacaactgttcgtggggcgaatcggcaatgcaatcactttctttccatttcactcgaatcgcggatgtgaactcgatctcatatgcattgggatgacggtcgaacaagtatttgatcgattatatagtacacattacttttgtgaagtgcttacttttgtgtgcgaataatttatttgcgaaccgtcagtgtgaccagaccgggcgagctaatgaaatacagaacgtagtgtatcgaacaagaatcgattgcaaaagtagtcgatatcattcgcgataggtacgatatcccgacgcgatcactttgttcaatgaaaaaaatgcagacgcgcgaattacttgcaaactcaacaccaaacaagtttcaatttcgcctaaaagagaatcatattgttcacatacgctaaagtacaaggctaacgccatgtccgttcaagacgtactatggatcgtactcacggtgcagttgagttttggtcttgcgtattttgaaaacaatcaaaggacgcaggactatgatgtcgataaaaatggttctgtacaccacaaaaactgggtgcgtaacgaaatgatggacagcttgggcttgtactggctcaaatggtggataaacgccaacgaaaatagcatttactttgaagtaactgttcacacacgaggctttgccggcctgggtttctccaaggatggccggctggccagagcggatatggttttgatgtgggtggatgacgccacaggacatccgaacgtcttggactgccatggggcgctgcatccttcaagcggaccgccgctgcaggacgatactcaaaactacgatgtcctagatggcaaacaaaatgggacgcacacaatcctgaagtttaaacgcaaaattgagacctgtgacccattcgatattccactctccgtaagttttcttcgcaatcaattaaatatgaaaataatataaatttacattgcaggctgatacgtttaaggtactgtggtccattggggaaaatgatcctattcatggaaacttggattggcaaggtcagagcagaggcgtgaaagctttgcaattgttttcgccaatgtttacgaaaaatagtcactcgatcgaaggcatccaaaaatgggacataactgtgaacaacgtaacaattgatcggtcaatggatacact

SEQ ID NO: 10979 - DNA, 3452 bp, DROSOPHILA
ttattcgcacacaaaagtaagcacttcacaaaagtaatgtgtactatataatcgatcaaatacttgttcgaccgtcatcccaatgcatatgagatcgagttcacatccgcgattcgagtgaaatggaaagaaagtgattgcattgccgattcgccccacgaacagttgtttgtgcgtgtgtgtgtttgtacttagtgacgtgcgctcgctgcgctgcaactgcgctgctgctgcgccgctttgctggactgcaacgcaaaaagggaatccaaaatattggatagctatccaaagaaattgtccacgtaggatcgcctgatcgcaggatggagaagtttccgctgaagggcagcagggaggccgccgcggagggcaacagctacataaccgcctaccaaacggtcatgaaaaatcgaacggccacacaaacggagccggcggcgacggcgacctagacggaacttttcgtgaccatccgctggcgcagcacaccaaactgaccacctcgctgacggcggcgggcaccgacgacgaggatatgattgacatcacaccccgctccagtccaggcgatgtgatcggcggcggcggaggaggaggaagcagcagtggctatcaccgggaaacggccaccgaatcggacaccgaacgagatttcggacactctggcggcaacggcggcggcaatcaccacaatcagcggacaatgcaccagcatgtgccaactcacagtgccttcggcgatcctatggacggagcactatccttctatggttcctcggacgtgcaagatgatattcctggcattgggcagtacgaagattttcacaccattgattggcagcgggacattgcccgtgatcggatgcgacatcgctacatagtcaagaagcgacaggactccttgtgggatctgataaagggttccattgatgccggatctggctggctatgtgttttactcgtcggaattgccgcaggctgtgtggcgggcatggtggacattggagctagttggatgtcggatctaaagcatggcatttgtccacccgccttttggtttaacagggaacaatgctgctatccggccaaacagtcagtatttgaagaaggcaactgctcgacgtggaaaacctggccagagatctttggtttggatcgaaatggcaccggaccatatatcgtcgcttacatctggtatgtgctgtgggctttgctttttgcttcgctcagcgcctcccttgtgcgaatgtttgcgccctacgcctgcggatctggtattcccgagataaagaccatcttgtctggcttcattatacgcggctatctaggaaagtggacgctgctgatcaaatcggtgggtctgatgctgtctgtatccgctggcctcactttgggcaaggaaggacccatggtccacattgccagttgtattggaaacatattctcacatgttttcccaaaatatggtcgaaatgaggccaagaagcgtgagattctttcggcagcagcagcggcaggcgtctcggtggccttcggagcaccaatcggtggagttctcttttcgctggaggaagtgtcatactattttccattgaagacattgtggcgttcattcttttgtgcattgattgccgcattcgttttacgatcactgacgccgtttggcaacgagcattccgtgctctttttcgtggagtataacaagccctggatctttttcgaacttattccttttgttttcctcggaattatggggggtgttattggcacattcttcatcaaggccaatttgtggtggtgccgctacaggaagttcagcaagctcggacagtatccagtaatggaagtgctcttcgttaccctggtcactgccatcatttgctaccccaatccatttacccgaatgaacatgaacgagctaatattcctattggttagcaagtgctcacccggagatgtcaccaatccgttatgtgattacaagcgcatgaacatcacgtcgggcaacagtttcattgaagttacggagccaggtcctggtgtgtacagctccatttggctgcttatgctcacctttatacttaaactggccctgaccatcttcacgtttggcatgaaagtgcccgctggtctgtttattccgtccctgctccttggcgccatcatgggtcgcattgttggaatcggtgtggagcagtttgcctacagctatcccaatatttggttctttaccgtgataatgttcgagctaacaggcggagtgcggtatattgtgcccctgatggctgccgccatggcctccaagtgggtgggtgatgctctgggcaggcaaggtatctacgatgcgcacattgcgctgaatggttatccgttcctagacagcaaagaagagtttgcgcatacaacactggccgcagatgtgatgcaaccaaagcggaatgaaactttgaatgtcattacccaagactccatgacggtggacgatgttgagaaccttcttaaagaaacggaacacaatggctatccggtggtggtgtcgcgggagaatcaatatttagtgggctttgtattgcgcagggatcttaacttggccataggcaatgccaagcgtctaatcgagggcattagcagcagctccatagtattattcacatcatcccagcctattcaaaatctgggaccccagccgctgaagctgaaaaagatcctggatatggcaccgatcacagttacagatcaaacgccaatggagacggtagtggacatgttccgaaagctgggactgcgccaaacattggtaacacacaacggtcgcctactgggcgtaattacaaagaaagatgtgctgcgccatgtgaagcagatggataacgaagatcccaatacggtgctcttcaactgaagtggatgcaaagtggactgaaatggattagagtggaatcgcgtgattaggacagataggatcggacgttcggacgtgagagatttagcaaaattgtgtgcagttctattatatatttatatatcgcatatatctcgttaatgttaattgtataatttattttactgtaggcaaatggttataaaagtttagtgtattcatttattgccattttgtaattatgtcattctagcacttttctacacacagcatatttctttttatatgttcacatacagcttgataacactatgaaatgatctatagttgtaaaaggaacattttattttgtgaatcgtatgtgaaaacgcggttttaacgagattcccacagagaatgcagtcttattttacgccaaattttcgaaatggctttacgtttttgcattttgttcaaaattctacacagataaaatgtcttgtttatacaatacatagtctatatttacatgtggtatttgttagagatctgagaaattttaaaataaaattgtgtatataccaaacct

SEQ ID NO: 10980 - protein, 732 aa, DROSOPHILA
MHQHVPTHSAFGDPMDGALSFYGSSDVQDDIPGIGQYEDFHTIDWQRDIARDRMRHRYIVKKRQDSLWDLIKGSIDAGSGWLCVLLVGIAAGCVAGMVDIGASWMSDLKHGICPPAFWFNREQCCYPAKQSVFEEGNCSTWKTWPEIFGLDRNGTGPYIVAYIWYVLWALLFASLSASLVRMFAPYACGSGIPEIKTILSGFIIRGYLGKWTLLIKSVGLMLSVSAGLTLGKEGPMVHIASCIGNIFSHVFPKYGRNEAKKREILSAAAAAGVSVAFGAPIGGVLFSLEEVSYYFPLKTLWRSFFCALIAAFVLRSLTPFGNEHSVLFFVEYNKPWIFFELIPFVFLGIMGGVIGTFFIKANLWWCRYRKFSKLGQYPVMEVLFVTLVTAIICYPNPFTRMNMNELIFLLVSKCSPGDVTNPLCDYKRMNITSGNSFIEVTEPGPGVYSSIWLLMLTFILKLALTIFTFGMKVPAGLFIPSLLLGAIMGRIVGIGVEQFAYSYPNIWFFTVIMFELTGGVRYIVPLMAAAMASKWVGDALGRQGIYDAHIALNGYPFLDSKEEFAHTTLAADVMQPKRNETLNVITQDSMTVDDVENLLKETEHNGYPVVVSRENQYLVGFVLRRDLNLAIGNAKRLIEGISSSSIVLFTSSQPIQNLGPQPLKLKKILDMAPITVTDQTPMETVVDMFRKLGLRQTLVTHNGRLLGVITKKDVLRHVKQMDNEDPNTVLFN

SEQ ID NO: 10981 - DNA, 2736 bp, DROSOPHILA
cggcagtcggagcaccgaaacgcaattggatttggcatatcctgaacgcttcagtgcgctgtgaacatactccccaacggccacaatcacgtcgggttggaggagcttcagttgttcctccagggtgtgcaggcacaggtctcctagctgatttttgtaagctcctctgatttcactgggcgttatgttcctgccatctgcgccaaagaaagctagcggacagaaattgtggacgaaacactgctgggagaaggtctgcatgctgccagccagtcggaggaacagctcccacaaacgcacaccactgggctcctcaatccgacaatccaagccagcgactggacgtttgggatgcacgactggaggttggtccaccgaaccagccagctgcattaacaactttactgtgcgcacattgccaaagggaatctgaagcagagcgcgtcaatgtatcaatatgttcggataatctacaagattaagctcttactccggtttgggccattccattgggccctggattcatgccaacaaataccagcttcttgggaccgtccatatagcgacgtaaatagtcgcagtgcagctgggatgcatatactatcgggttgtagatgaacggtgtgctctcaggaggattcagtttttccagcgcctcatttaacttgacttcggtttcgtagaatttaagccacagcggcttatcaaagaattccgatgtactgccctgccttgcggatgtcttagtgggctccccaatctccagattgcatttttgctggttcagtttgcgcttcagcataacgtttgcttcagcggaacaggacaacaaatcgcaggatttaaaagctgcattggatttggttttaatcagctgttccacatagaagactcagtatgaccatatacgaccttgaagtttttaaattgaacacgagacagattggtttaaaataagcaattaaaaaaaaatcctattacagtttaatttataaatacattcgatggactaacattgcgttttattaaaaatcttgataaatagcgagttttatatatgtatatttaaggtttaaaaattagcgctctatttttgattacgcgtaaactcatctagacgcttctcattctcccgaacgaagctcgatttgaaggctttgcaggttttctctatgctgcctttaacgacggttccaagaatttccagaaattgtgatacctgcaagaattatacacaagtttaggatgccagctggattcgggagtcatggggaacatacggttaaattcctttcgggacacgatagcttggcgaactcgcattggggtgcatgtttcacgtgctccttccacggatcatcttcgggctcccagccatccagggtctttccgcacacaaaacaagtggcagtgtcgttttcccgcttggtgcccgtccaatagaatcccgcctcggccatctgtggtgcatggaatatagatgcagttaatatagatggtcatttgggtattcaaaaaatctcagcgacttgcttaccttcgaaatgctgcaggatgcggtctccggaaagggccaactcttgtagctctccacgcgatgctgttccaggaggttcagcttgcgaaagacctccagcttttcaccgcccaagctggctgcaacttcgtttaccactggcgattccatatccttttaataaacagttttaaagcgaaatacttattttgggttttttatcgcaaacagcgcgtcgttgttgctgtgccttcaaaaacagggttgccatataaaaccaaaataatcgatagtttgtaagcccggttattatcgatatccgagtaagaatttaaaaatataatagaatgttttatgccactcatagagacttctacagtacggataaaactcttaaaatgttcctttgctccattaaaacggttacttttaaacaatgtttaatgtaacgtgagcgccaggctttgaatgcgcaggtgtggcagcactgtcccactgttatggccaacagtcgtctgttacagcagctgtttcagttattgtcataccccagttgtgtacacactgttttgacgttaagatttttgctgactttttatttataaacagaaacacggaaaaacatggtgtaaaccgtgatccaaacaccaacacacaccgcccacgtttttgttgttttgcactttgcaattgcgaacagcgagtatcgcctccggtactccatagattaggcacccaagttttacgctgcatagaaattgattcgaagagaagaaggaaaggcaaccaagcggagatacagagagagaaaaagaaagtgttcggacggccttgggctgaaaaacgggagcagcgataagcaacccaattaagtagcccaggctggtgggttcagtaggtcactgccgcaccgttttcgcaagggggcagtggcccaaggacatccgggaggaggccatacaccatccaccacccacccatctacacccactgcaaaggatatagagccagccacccatcaattggcaatgagacggtgcgctggcaatgcgctcacttgaaggcagccgtcgtcgacaggtcgagcagctgcatctggttctggaagccaaggatcaggatcaggagctcaatacccgacaagagcaggagcagtcagtcgcacggccatcgatggccaacgaacgcaagcagagcagtcccaaggtggagctaacaaa

SEQ ID NO: 10982 - DNA, 598 bp, DROSOPHILA
aaaaaacccaaaataagtatttcgctttaaaactgtttattaaaaggatatggaatcgccagtggtaaacgaagttgcagccagcttgggcggtgaaaagctggaggtctttcgcaagctgaacctcctggaacagcatcgcgtggagagctacaagagttggccctttccggagaccgcatcctgcagcatttcgaagatggccgaggcgggattctattggacgggcaccaagcgggaaaacgacactgccacttgttttgtgtgcggaaagaccctggatggctgggagcccgaagatgatccgtggaaggagcacgtgaaacatgcaccccaatgcgagttcgccaagctatcgtgtcccgaaaggaatttaaccgtatcacaatttctggaaattcttggaaccgtcgttaaaggcagcatagagaaaacctgcaaagccttcaaatcgagcttcgttcgggagaatgagaagcgtctagatgagtttacgcgtaatcaaaaatagagcgctaatttttaaaccttaaatatacatatataaaactcgctatttatcaagatttttaataaaacgcaatgttagtccatcgaa

SEQ ID NO: 10983 - protein, 153 aa, DROSOPHILA
MESPVVNEVAASLGGEKLEVFRKLNLLEQHRVESYKSWPFPETASCSISKMAEAGFYWTGTKRENDTATCFVCGKTLDGWEPEDDPWKEHVKHAPQCEFAKLSCPERNLTVSQFLEILGTVVKGSIEKTCKAFKSSFVRENEKRLDEFTRNQK

SEQ ID NO: 10984 - DNA, 3630 bp, DROSOPHILA
tccacgtaggtgatcttctcctcgggcagatcctcctccatgagggcggcctcctctgccgcctcctgggcacgtcgttgcttcagccctgcggctggggagcgaatcagggacatgttgcgctgcacatccttgacgtccatctgaatctcgacctggcgacccttgcgcagtcgctccatgacaaagtggctggtgcgtttctccttaatctccgtcacccgcttgatggcctccagacccttctgccaggtctcgcggctgtatttcatgggcacgttgcggcgcttctcgaactcgaaactgggatcgatggccagctccttgccggcggccttgcggtacgccttcgtccatcctaccttgcggggattcttcttgcgcttaaaggccttgtgacacttgcctcggcagaacttgaagacctgcgacggaatatggcgaagcaatataaacatcggagcacatgtaaacaggaaagcaaatcgttcttaccttgcagtcatttcgcacgaattgcaccccgtggcccgggtatattttgctagagcaaaaatagcacgtttgaatgcgcattttcgcaatttacgacggataaattacgaaaacaaaacaaatgcgcaagctgctagcacgtgtgctgctgaagaagaagaaatatgaaaatgtatcggcagtcagcagtgcgaccagtcactgcttatcgataacactggctaacatggaaaatagctagatgtagacaaaaaatatccaagcaagaaatacgtataaattgcaagtgactgcgataccagttgacagttgtattgttttgataatttcaattaccttcggtctttgtccaaatcatgtttttcccagtatgtttacattaacttaaactgaattgttgcacctgtttctcgataacatcgcatgcgctcgccagtttgcaccagctgttgcgccagctgatcgcccgctcatgcgctggtcacaccgccagcatccaaacaaacagagcagcagaccaagaaaatcggacacatcaccgcgaacgagatcttgctgacgtgcgaccagatgcagagccctgccttcgcgtaccgggaacacgcagaacactcgccgcgcgccatgtacatgcgcgactggcgatcggccctgcggacgcccacgtaccggattgggaatcggacggtgcgctttaactatcacttcgcccttctgattgtttgcgccttcgtactcgtcctactcttctactttgcgcgccagggatcgcactcctcctccgacggctactggctgcgccgcagttacacggatgcccggagtctggacaatggtggtccagtggtccaggcctacaatgccacatatccgctcacgtcacccatggtgctgcgtggcggtgtgataaactaccggatagccatgattgccgatctggacaccagttccaaggtgagcaagggcgatgggagcagcacgtggcgtagctacctgaagaagggctaccttacctacacggtggccaggtcagagatccagattagctgggatgacggggcgccgatagtcctggaatcagcatttgcccttaagggccgcggaatggagctatctgagctagtcaccttcaacgggcgcctgctcaccttcgacgaccgaacgggtttgatatacgagattgtgaatgacaagcccattccctgggtgatcctgctcgatggagacggacacagtgccaagggcttcaaggccgaatgggccacagtgaaagagcaaacgctgtatgtgggctccatgggcaaggagtggacgacaagtgcgggtgatttcgagaacaataaccccatgtacgtaaaggccatcactccgtccggcgaggtgaggtcgctcaactgggtggacaatttcaagcagttgcgcctgcagtcgatgcaaataacctggccgggctacatgatccacgagagtggaacctggtcagaggaaaggaatcgctggtttttcctgcctaggcggtgttcgaaagagaagtgagtaagcgtgtcagcctttaaatccttaactcatcgatctatctttgaaagatacaacgaaaccaaggacgagcacatgggctgcaatgtcctggtctccgccgacgaaagcttcaccaacgttgagactgtacggctcgatcctgaaaatacaacgcccacgcatggtttctctagctttaagttcttgcccggcaccgatgactcaataatcgtggctcttaagtcggaggagttgaatggcaagacggccaccttcatcacagccttcgatattgcgggcaagacactgctgcccgaaacgaggatcgagacggactacaagtatgagggattcgagttcatttagctcgccattccaagctaccgcactccactctacttcgatccaggtgcttcagttttaaacgtgtacatattgtattattgtcccatacggtaagctttatatttatagtcacctagattagtccagagatgctcatctgcctcatgaaccgtgactccttgtcccgtcttgtaccatagcacaaaaaaaaattttagtttatttttattaaaattgaaatataaaacgtacaaagccggtggcaaactcagaaaagccctgcatcacgtttctttaatcttcgcatccaatccggccaccataagatcggctttatcgatgcgaccctcgctggcgcgaacttccagtcgatcggcattgtggttgacattccagagttcgggcaaaaagcggggctgcattgtgtgcagaaagtgctgccgccataagcgctccagctccaccaggccgccgaaatgatcgcgatattgctgcaccacccgctcgccatgctgacagtagtcggagttttctacgcgatattccacgctggctgcttgccgcaggagatcttctgtgatgtccgtttgatcggagtagtaatcgaggagagtcttttccatttcggccttctttgcagcgggtattttcgcgccatgatgaagtagtgccttgccagcggattggactcgtctggaaataataaaatgcaattcagattcattgagaactctatggagattaattttatcatatatcagggtatgttttggaaagttaggtgataaaaaagaggcaaaatatgtctggtaagataactgataaggcaatctacattcctcgcaatgtataatttacttttacttttaacttagttctgaaaatgtatggcatacttacttgagctgcggatcatcatggtacttgacagatccgtcttcctgcttgaaaggagcttcgcactgcacggccagtttgctgcgaacccttagatccgagatgttgcttagctggtggcaggttgggcacaggagcagcacatcgtcggaggtgtgagatttcatgaccaatgggaaatgctttctgtattcccgcggtaccacgttcttccgaatgtacgcatcccggtcaccacacaccacgcactggtttttcttgattgtttgatagaagcgccccacatctccgaccgctcgacccgctggctcgaagttaaggcggacagtgaagggctcttcgcttatatgcgtgcccagattttgattgagatac

SEQ ID NO: 10985 - DNA, 1576 bp, DROSOPHILA
cagagcagcagaccaagaaaatcggacacatcaccgcgaacgagatcttgctgacgtgcgaccagatgcagagccctgccttcgcgtaccgggaacacgcagaacactcgccgcgcgccatgtacatgcgcgactggcgatcggccctgcggacgcccacgtaccggattgggaatcggacggtgcgctttaactatcacttcgcccttctgattgtttgcgccttcgtactcgtcctactcttctactttgcgcgccagggatcgcactcctcctccgacggctactggctgcgccgcagttacacggatgcccggagtctggacaatggtggtccagtggtccaggcctacaatgccacatatccgctcacgtcacccatggtgctgcgtggcggtgtgataaactaccggatagccatgattgccgatctggacaccagttccaaggtgagcaagggcgatgggagcagcacgtggcgtagctacctgaagaagggctaccttacctacacggtggccaggtcagagatccagattagctgggatgacggggcgccgatagtcctggaatcagcatttgcccttaagggccgcggaatggagctatctgagctagtcaccttcaacgggcgcctgctcaccttcgacgaccgaacgggtttgatatacgagattgtgaatgacaagcccattccctgggtgatcctgctcgatggagacggacacagtgccaagggcttcaaggccgaatgggccacagtgaaagagcaaacgctgtatgtgggctccatgggcaaggagtggacgacaagtgcgggtgatttcgagaacaataaccccatgtacgtaaaggccatcactccgtccggcgaggtgaggtcgctcaactgggtggacaatttcaagcagttgcgcctgcagtcgatgcaaataacctggccgggctacatgatccacgagagtggaacctggtcagaggaaaggaatcgctggtttttcctgcctaggcggtgttcgaaagagaaatacaacgaaaccaaggacgagcacatgggctgcaatgtcctggtctccgccgacgaaagcttcaccaacgttgagactgtacggctcgatcctgaaaatacaacgcccacgcatggtttctctagctttaagttcttgcccggcaccgatgactcaataatcgtggctcttaagtcggaggagttgaatggcaagacggccaccttcatcacagccttcgatattgcgggcaagacactgctgcccgaaacgaggatcgagacggactacaagtatgagggattcgagttcatttagctcgccattccaagctaccgcactccactctacttcgatccaggtgcttcagttttaaacgtgtacatattgtattattgtcccatacggtaagctttatatttatagtcacctagattagtccagagatgctcatctgcctcatgaaccgtgactccttgtcccgtcttgtaccatagcacaaaaaaaaattttagtttatttttattaaaattgaaatataaaacgtacaaagccggtggcaaactcag

SEQ ID NO: 10986 - protein, 419 aa, DROSOPHILA
MQSPAFAYREHAEHSPRAMYMRDWRSALRTPTYRIGNRTVRFNYHFALLIVCAFVLVLLFYFARQGSHSSSDGYWLRRSYTDARSLDNGGPVVQAYNATYPLTSPMVLRGGVINYRIAMIADLDTSSKVSKGDGSSTWRSYLKKGYLTYTVARSEIQISWDDGAPIVLESAFALKGRGMELSELVTFNGRLLTFDDRTGLIYEIVNDKPIPWVILLDGDGHSAKGFKAEWATVKEQTLYVGSMGKEWTTSAGDFENNNPMYVKAITPSGEVRSLNWVDNFKQLRLQSMQITWPGYMIHESGTWSEERNRWFFLPRRCSKEKYNETKDEHMGCNVLVSADESFTNVETVRLDPENTTPTHGFSSFKFLPGTDDSIIVALKSEELNGKTATFITAFDIAGKTLLPETRIETDYKYEGFEFI

SEQ ID NO: 10987 - DNA, 3302 bp, DROSOPHILA
tgaacacaaatgattacaggaaatgcttgaatatgcaatgttttcaaggccaattgcattaattcattatttctttaaatgaaaagtaattcatttaaaagtataatatattattgcgtcaaaaggaaaaaacttttaaatgtattgaaaacaagatcattcaaactataaagaaatagtatggggtacatgatcctgataaagtgatctattaattaaaaatgtcagacttttttgacaaatatacgatacataaaaacagatttatatgaaaaattcccataaaagcaaagttgagatctttttcagtatattgacactaggagtgtcagttctcacttccgttaatttcccattcataagataaagaataaggctcattgtttttttacgatatttttgtagaaaaaattctagatttatttgtaaattgtgtttgtatttatggtttcgttattagctagtttttcacttgtttaatgcctactttacataccacacgtatataaaatctaaagaaaacacattcgcatgcgtacctacacttatttacacaactaacgcttcttctgcctgtttacttaacttagttcagtttcagttttggccgaaagacatacgacttctttcatttgggtccgcccgacacgatggcgaacttcaaacggagcgagcgatgatgatgacgatggcggcaaaaagcaatttcaactgtttgaacatttacatttacatttacataatatgtgtatctgtgtctcgaaaacctcatttgctcaaatatctattcgtctcgtttctgattttcttttttttttcgtgcttcacgtctatttggcggcggattacttaagaaattagtcaacaaggttgcacatagaacatgggtggctctcagtgggtgtttctacccgcccttttgtacgagtattgaaggggttttgtgtgttgagggtggtgtgtgtgggtgggtggcggtgggtgtttgtgctcctccctcttacaaggccttctgcttctcctgctgcagctgaattgccttgttgaggtccttggcacatccatcattattgttatccgccgacagagccttctccttggcagcagcctgcttcttcttgtaggacttctggtagaagtcgttgaacaggaagtagaagaacaccgcgttgggcagggtaaagcacaccgaccacctgggatacccacaatccgtgtacaacagctgcgtctggtggatgaaggcgcagcagaactggatctgtaagaataatcgtaaaatcgggagaccattaagagctatcgataaggaagaatgaggtgctatctatttctgaatctatctgttttgtacttatactaatctagataattttaaaatgaaatggttgtagagctctagtatctcacaacaaaataaaactatatatcacttttaagtgcagccctaaaatcaaagaatacatttgaatattttccacttaagtgctttcctatttagttctaagatgaagtcattagcaaagcaagtaataaacctcttataacccctcaaattgaaatactacagatatctatggatagcgtataaagcgttcttaccatctgcaggttggtgatgtacttcttccaccacagatacttctgcatctggggtccgaaggcggagaggaagtagtaggagtacatgataatgtgcacgaaggagttgatccagccaatgaaggtgccatgtccgccgggatagtacttgctggtgccccagctgatcatgggcatcaccgtgtgatggtagacatgcaggaaggtcacctgtcggtcattcttgcgcagcacaaagaaaatggtgtccagcagctcggtaatcttggccagatagtagacatagacgacgcgcgcctcacgatacgccttgggtgtgcgggaccaatcaaccggctggcaccgccagctgtagtactgccagatgaccacgccctcgtagaccatccaaacactgagggctacctggaagaaattgtagacgagcagggtgcgttccagcttgaagggtttgcgatccttcatgaacttgggtccccaggacagcacgaagaagagatagaaggccaggatgcccagcaggggcagtggcgacttgatcaggaaccagtcattggtgcggggatctgcgtgggaatatcagggatttgatcagcatctatatgcggcacaggtagttcccctccccatccaactcacctgccagatcggtgaacagaaaattccaatagtccacctgtgttgcgttgacggctgccatttttaaattctcctcgttggactcttgctcccacaaatacgattatatagcgacgatcgtttcgatgtgaaattcaaaaatctgcttagcctgcgtcgcaacgaacgagttttgcgaaatctaaatggaattgggaagatcggaagggagtctggatgagggaaagatcttttcgagttttcgtagttaagttatgttaatgcgattctcgagcaactaatgccaaagctatagcttcagctacagcttttgccattgcttttgctgttgctgttgccgagcccagaaatctaaataaaattaaaataataatcaaacgaaggcgaaggagaatagcaaatagcaaatgtgtgacggtgacggtgaaatgccgtgaaattatcatgtaacagtaacagtaaattatattcattattatgaattaaacaaccgcagcgcacaacagcccgcaacaaattggtggccacctcaaaacttcaactccatatggcccataccatggttggttggttgcctcacgacccgagatacaagacccaagtaaattgggcagtgcctcagtgcctcacgtgtggaacgcataaaacccactcgcacacccagctaaattatatttgtgttgtgcagtttgtttggttttgagctgttgcttgccactctcttacggatctcggggatcttctacagaagtcgtttagtccaaagtgggacagagtgaagtggtactcccggtgattaatcatcgccaagaacttgctcctccaaagggggcatttgagaaccatcgagctatcaagcacccatgctaaattccaagcattcacgttcgttgacttgaagtcgactcacacttgaacttggctaaggccgattaagaccacaaaataatcgaatagcattatgatttcttgcgtcgttttcgaggctattctgatcggcttcttggtctgcgaagtgaggaacaaattgaaataaaaaaaaaaacgactgaggagatatt

SEQ ID NO: 10988 - DNA, 888 bp, DROSOPHILA
atggcagccgtcaacgcaacacaggtggactattggaattttctgttcaccgatctggcagatccccgcaccaatgactggttcctgatcaagtcgccactgcccctgctgggcatcctggccttctatctcttcttcgtgctgtcctggggacccaagttcatgaaggatcgcaaacccttcaagctggaacgcaccctgctcgtctacaatttcttccaggtagccctcagtgtttggatggtctacgagggcgtggtcatctggcagtactacagctggcggtgccagccggttgattggtcccgcacacccaaggcgtatcgtgaggcgcgcgtcgtctatgtctactatctggccaagattaccgagctgctggacaccattttctttgtgctgcgcaagaatgaccgacaggtgaccttcctgcatgtctaccatcacacggtgatgcccatgatcagctggggcaccagcaagtactatcccggcggacatggcaccttcattggctggatcaactccttcgtgcacattatcatgtactcctactacttcctctccgccttcggaccccagatgcagaagtatctgtggtggaagaagtacatcaccaacctgcagatgatccagttctgctgcgccttcatccaccagacgcagctgttgtacacggattgtgggtatcccaggtggtcggtgtgctttaccctgcccaacgcggtgttcttctacttcctgttcaacgacttctaccagaagtcctacaagaagaagcaggctgctgccaaggagaaggctctgtcggcggataacaataatgatggatgtgccaaggacctcaacaaggcaattcagctgcagcaggagaagcagaaggccttgtaa

SEQ ID NO: 10989 - protein, 295 aa, DROSOPHILA
MAAVNATQVDYWNFLFTDLADPRTNDWFLIKSPLPLLGILAFYLFFVLSWGPKFMKDRKPFKLERTLLVYNFFQVALSVWMVYEGVVIWQYYSWRCQPVDWSRTPKAYREARVVYVYYLAKITELLDTIFFVLRKNDRQVTFLHVYHHTVMPMISWGTSKYYPGGHGTFIGWINSFVHIIMYSYYFLSAFGPQMQKYLWWKKYITNLQMIQFCCAFIHQTQLLYTDCGYPRWSVCFTLPNAVFFYFLFNDFYQKSYKKKQAAAKEKALSADNNNDGCAKDLNKAIQLQQEKQKAL

SEQ ID NO: 10990 - DNA, 6155 bp, DROSOPHILA
tcgttgctgatcgccttcatgttgtaactggcgggcaggaaatagcccagcagaaggtatcgattgttgaagctaaacacggccggtccactcgggtacaggttatcccaaattccgtgaagtattgtgcacttgtcctcattgccgatatacagctcgaagggacccgttcgcatgttgctgttccaggtggccttcattctgacggacaggcagcagccatcctttccgctgttaaagtgatagatgcccaccccatgacgttgtcccttgaaccagtcacccgaatagttgtccccattcacatacttgtaccggcccttgccgtgcttcaagttctttcgccagttgccctcgtacacggatccgtccggatagatgaagatgccgcgcccacaacgcttcccgcagcgatactgtccgtagtatcgtgaaccatccttgaacacgtacaccccgatgccgtgacggcgacccttcctgtagttcccatcatactgatctccgttgggcaggatggcccaacctctaccttgtctctgtccggcagcatttcgaccgcctatgtagagctgggattgaggattattatagatatttgttttaattgagctccttgcttactaaaaactgttactactagagaatgttcgtattaaagttactccactaaaaatttatttcttttgaggaaggaagatgcactactaagaaactcatccattttggaacttacgcctatattgggtcccaaatcctcctcttcctcgggcgccgacagatcctcctcggacatttcggtcatggccatggtgatgattttgagttaactaactcctttcggttctttttattgccgagtgaagtagatttttacttacgaattacgttcgggaaatattttgtgtaggcattaaataaatgtattctgtttgtatagttaacttagcaaaggcttactacaataaatatcagaatcgaagaatgatgaaatcgagggctacgttttcgcatagaagtagttggccagtggatatcgtatggtcagggcaatcagtgtacacagcacctggaatcccatcagcatctgggtgaccactcgctcgtggacaggtccgaaaacgactaggacaaagttaatgagcgtaaagttgttggtcctaacaactccgtccgctttggtatgccagcttattagtcgcaagttccgcagtactgtgaccatcaggcgacccggagcgttgagatcctccaggcgaaactccgtggtgctgatgtggagcagatccgtcttgctgtcgtacttgggcagccggtgacgcggacatggcacaaagtggaacagctgcggcgtggagtacaggaaattcaggatctgcggcaggaagaagagcagcagcgtcttgctgaagtggcccaggattccaaccacggcgaaagtcatgccggcaaagtagcagtaggtgtccccaacaaacacctgcgatggatatctgcgaaataagtaagatagaaaatatattacaaacgaaaagttagttagaagtaaaaaaaatattaggaattaacaacaaaattacgcatgacagaaaaattaacattattatccgaactttattacataaaagttttattttttgtgaatatgataattattaaatttaagctgacgaaaagagattataacgtatttttaagtttcaaataacatccttaataattcgataacagtaacaaccagtgttgtaaggcccatcgatgcgaaacagccagatttacaactgcagcggcgaacagctgactgaggacatttgcgtcagctgtgcgggggagttgaggggtgccgtaaaatttttgggcgtgtttgccagcagaagaaaagcgtgaaaagtacgaaaaatcgaaacggaatgagcaggatgaactgcagaaagtgaaccagtgaccatggtgagaagcacattcctggccacctacaaccagacaccggtagccggcgttggacggctggccatcaccaagaagctggtgctctggttggtgctggtgctgcaggtgggcttcatcggctgcatatggctgctgcagatgagccgtggccaggagtcgcagcagcgcagtgcaatggaccaacttggcggacgggtcaacttcgtggccagcggtgaagcccctatggagaagatggcacttgtgggcggaacccactgtccgcatctgcaggagaatgtcaaccgctacgacaaggacttttatcaaatgaaaccggaacgactgaacgaatcccacctgcccgactacaatgtgcccgcctatgtggacgcggagatgggtctaaccccaaacctctggtgctatcgcgaggggaccatcaacgagagccagcggctcaacgatgtggactatctgatggcgccgcctcaatgcagatgtgaaagtggctggcacggcagagattgcggccagccggagatcatatggcgagccctgatgacgtccaatcgggccagtaaacgaggcggtagcacaccgcttcaactggtcgaggccagttcttcttcactgcaccgcctgttctatatgcttgaattgggcgcctgggaccacctaagtctggagctcttggagctgcaaattcgagcgctcatcgaggttgtggactactttctcatatactatgtgagcaacggcagcaaggagcggagtctggagagcatgctgggcagccaaacgagctatacgctactacgctgctcctccgagagcaactgcaccagctcaatggcctacagtcactttaggcggcagctgtggcagcagtgtggtgtccaaatgcaggcacaggacctgctgctgcacggggacagtggaacggtctacgcgccagcagcactcaagtttctgaagtactatgccaaggatgtgctgccgctgaaatttcgtttgaagtacaatgtatatggattctactggcagcatccgaagaagaccctcctaaatggggtgataagttccttggggcacctgcacagtgcccaactggatgctcaccgcctgcaccggctggcgagcagcacactgggtgatctcaaccactacggcggctggaactgcgagctgtgcctgcctcccgagcagattgtgctcctgctgcagagctccagtccccgcaagctgccagtaaaactacccaacgatacccgcaatgcccacatcgatgccaactacatgcagcaactgatagccaatggagttcacatcgatggcaccacgcagctgcaccgcttgcgggagcagagcgagaagtatttcgctccggaggaggcgctccagcacagcagccagtacggccagctgctggtgaacctatacgatgtggacgtcctggaagatctgcaggacgaagactaactacgcctgccgaagtttgacttgggcatggcagcctatcgaaccagcataaacctacgaatatatatatttatatgtgcctgcttttgaatccccatcaaagtctaacaatctcataatcatcatatcatactctgcctaatccactcatgcgaatgcccttctgtgtttttggccaggtgaattccaaatttagtatctcagcagacaggacagacagacccgccatctgtgataagaaaaaccagaactaaacaatgaatttatgagaggaagtcgatgcaaccaactgagagaagtctcaaatttgctggaaaaagttgtgaaatgggttgatcgcaatttagcattatttttaagacataacacacacgatctgtatgaaaaagctttttagacttactttaaatattaataccaattatcagaaggcaagcaaatttaagcttagttttggttacaattttgaagcaattttgaatttgtgttattactttattactaacgtaccctaattataattagacgaaaatttgttgaccttccagatcaattcagtatttataaaaataaaaatcaattggattactcacttgttgaacttccatagcgctagggtggtggccaggaaaggcagcatgaagtaaatggagaatatatgcgaatccacctggtgaccgagcaacagttcaatggcattgaagaccagaatggagcctgcaataataaaggattgtcccacctccaggccattgatgcccgccaggatgttgatggcatttgtgcagaataccgccaacatgcccatgaagacgtagtacaaggcaccttgaagaaatcaaaataggtttcatctcttgattttcatttctggaaaaccttagctacctatattcaaggaggtcccaatcagattccttgcaaagttgggcataatgaccgtcgtggagttatagtttacgtagtacaccattagcagcggcaacgtggcgatggtgggcaacaggagcttgtggcgccatcgcaggtcgagaacgtcatcggcgaagcccaagaagatcatgcagcaaatggaaagaagggcggcaatcaattccacgaactgtgtggggaataacagccgataaggtggagcacaaagacatctatcaattagatagctaccttatcatgtggaaaggtatctggtttgcctccagtaatcgcatccgtggcagctgcctcgtcgaaggcgaagggaatcggtatgaacagaaacaaggacaccaggaacacacagccaataagcacaccaaaggattcaggtctagagtttaggaagcgttttagttagaaaacctacaaaacaaaggagagcgaacttacacctgcggcttgtccttcttgcacagatcgttgccaaagagattggccttgatgaacatctcgcggaagcggggtatcatccggactgtcatgcagtaggcggcgcccgaaatggccgcattgatggctatggcgactcccgacatggtcggccttgaaaatccaccttccgctgcactaattcaattagctggtgcagctctgtgcgcagcaaatttgccggagtcacgcgtacggagtgcgctgtttcaattgggatagtgggaggccgcggaaaaccagccgatcactcgatcatggtgcagaaatcaattacgccgacaaaaaaaagtacacgcaattgaaactcaaattgctgataacaacaaactcagctgttcggcggctagtgtgcccgtactttcgactgttagacaaaccaaacagctgattttagtttactaatttaaattattcatatataaaataccacaaatgaatttaattttattttgacctaccttagtgaaaatagtttttaatttgtatagtcggcaataatcttaatttaatttcgcttacatatcaaagttagaaaatgttatagtatttctaaaatcaagagatcgttaaaaatttaaagactgaaagtaaaaacactttactagatgaaaaaggcttaactttatttaatatcaatgattacaacacttggaccaactccgttattacacatatagataaagatatctacaacgaaatagataaaatatgttgcgaatacttgttcttttcgagcttcctttgtcaatttggattcggtaaagattgctacctatccctgaagaaggggaagaccttttgcagctccgccttcgacttgcaggcctccacctgcggcagggtctccaccagattgagcagataaatctgcagctgctggcggcgttcctccacgaagaccaggttcatgttgccgaaatgcttctttggtggaaactccacggcactgaccaccggatgggtcttaagcagtgacttgtgcagcttgtagaactcgctgtagcgtctgaaaaacgtccagtgctccaaacgctgcctcatcgtgatgtgaacttcgtaagtgtagtgggaaccagatcgttgtgtctttgccagctttacatgcggaatggttatcaggaaattggagcacagcgatgagctggggtcgatgccggtctcttcaaactgtttggttagccttcggataagcaggcgattttgaagactaagctccgccacacgggtttccagcagagcgcatctttcgtttagctggttgacatgctcttccagcgcagcttgctgttggctgttagccaagcaattggcagaggaggaggacttgctccactgcg

SEQ ID NO: 10991 - DNA, 1373 bp, DROSOPHILA
aacagctgagtttgttgttatcagcaatttgagtttcaattgcgtgtacttttttttgtcggcgtaattgatttctgcaccatgatcgagtgatcggctggttttccgcggcctcccactatcccaattgaaacagcgcactccgtacgcgtgactccggcaaatttgctgcgcacagagctgcaccagctaattgaattagtgcagcggaaggtggattttcaaggccgaccatgtcgggagtcgccatagccatcaatgcggccatttcgggcgccgcctactgcatgacagtccggatgataccccgcttccgcgagatgttcatcaaggccaatctctttggcaacgatctgtgcaagaaggacaagccgcaggtacctgaatcctttggtgtgcttattggctgtgtgttcctggtgtccttgtttctgttcataccgattcccttcgccttcgacgaggcagctgccacggatgcgattactggaggcaaaccagatacctttccacatgataagttcgtggaattgattgccgcccttctttccatttgctgcatgatcttcttgggcttcgccgatgacgttctcgacctgcgatggcgccacaagctcctgttgcccaccatcgccacgttgccgctgctaatggtgtactacgtaaactataactccacgacggtcattatgcccaactttgcaaggaatctgattgggacctccttgaatataggtgccttgtactacgtcttcatgggcatgttggcggtattctgcacaaatgccatcaacatcctggcgggcatcaatggcctggaggtgggacaatcctttattattgcaggctccattctggtcttcaatgccattgaactgttgctcggtcaccaggtgtttgttggggacacctactgctactttgccggcatgactttcgccgtggttggaatcctgggccacttcagcaagacgctgctgctcttcttcctgccgcagatcctgaatttcctgtactccacgccgcagctgttccactttgtgccatgtccgcgtcaccggctgcccaagtacgacagcaagacggatctgctccacatcagcaccacggagtttcgcctggaggatctcaacgctccgggtcgcctgatggtcacagtactgcggaacttgcgactaataagctggcataccaaagcggacggagttgttaggaccaacaactttacgctcattaactttgtcctagtcgttttcggacctgtccacgagcgagtggtcacccagatgctgatgggattccaggtgctgtgtacactgattgccctgaccatacgatatccactggccaactacttctatgcgaaaacgtag

SEQ ID NO: 10992 - protein, 379 aa, DROSOPHILA
MSGVAIAINAAISGAAYCMTVRMIPRFREMFIKANLFGNDLCKKDKPQVPESFGVLIGCVFLVSLFLFIPIPFAFDEAAATDAITGGKPDTFPHDKFVELIAALLSICCMIFLGFADDVLDLRWRHKLLLPTIATLPLLMVYYVNYNSTTVIMPNFARNLIGTSLNIGALYYVFMGMLAVFCTNAINILAGINGLEVGQSFIIAGSILVFNAIELLLGHQVFVGDTYCYFAGMTFAVVGILGHFSKTLLLFFLPQILNFLYSTPQLFHFVPCPRHRLPKYDSKTDLLHISTTEFRLEDLNAPGRLMVTVLRNLRLISWHTKADGVVRTNNFTLINFVLVVFGPVHERVVTQMLMGFQVLCTLIALTIRYPLANYFYAKT

SEQ ID NO: 10993 - DNA, 3109 bp, DROSOPHILA
agtagtcacataatgaatatgtttatatatacacgtacacataatttattttaaattaaaaggaacatatttgctgaaccgtaactgcaccagaggaaatcgcaacggcggaaactaccactagactaaactttaacagaaaagagtttcaatgtttcactgtttgtgtttgagaatcggaaccacatattgtattttgcatatttaagcgtaagccaaatccatgtattgcataccgatcatgatcaccattgtcattgattagattatctctactattactattatgtttgctttagtcaattgtttataatgtaaatggcaagccaatcactcgatatgttatgttttagttgtttttttaaaaattatatatatttatatatacaaatgtatgtcgctaagcttaggttcaaacaaaaaacgacgatgggccaagctggaaaaaagaaggcagccaaaaaatatttaccttaagagcgtaaaaacgtgtagtctaattgtaaatgtataaaaacgaacaaatgcatgtgtaaaaatcttggttggaaatgtttttgttttctaatttctcgtcgatatttccaagatttgtttgtttacaacaaccgcaacactgtaaatcgcagatgcttttatttaataataaaaacctattgtacggccagttgggatacaaagataatcgaaacctaattgtcaaactttagcgagttcaaaacgatccacaaactaaatggtttattgtaaaagtgcaactactcgtagacgaatgtgcataagtcagttaaatgttcgcaaaattatcataatgcgagcataaaccaagcgtgtacctacccacacatatacacacatacaatacctacatatatttattttcaataaattatttcgagatttaaaaatacccatgctgtttacctaacaacccaggttgccatgcgtctccacttttgttgtccggcgaaaaacaacttcataccgaggctagccttcaaacacaccaaacgaaattatcgaagcgattttctatagtatatacaagccttacttttccggagcaaaaattattagctttacagaatgagccgacatcgcttcaacaacgtgcagatcaaggcattgcccggtggtctgatggcccaccacgaaccggatgcggatggcggacagcccggttcgcagaagctgcccatgtggcccagtgaacgcattcctcctggcggtgctggagccttccactcggccaaggtgcaatatagcaaggagacagctgatctgatccgatgtaagtgcgttttgggcatgccaaatatctaaggaataagaggataagaggaccatccataaagataatcgtgtacattttccgcttcgttataacctcccttgttagtgcttgtcaaggagtccaagatgtcgatgttggtacgcaagcagatcgatgagagcctgcgcaatggggagccattgccattgcccgaaccgccgcgtcccaataccaacaacgatccggacaaggaaacactggccattttggatcgggcacgcaatgccaagcgtaagaatctgcggcagatcgaggcgagcggagcttacaagcagagctattaccgcccgcccgccgacaaccgaatgcatggagagaaggccaagtcgcagctgcagttcaccatggccggcactcatttgcccgatccggcgatcaagccgcgacgtcgtcctcgcgaagagcaactggtgacggaggaggatctcataaacgagcgtaagttggaatatttcttaagcggaataaagcggaattatacattgagttggcatgctcctacagttttggaccaaatcaacgagcgtgctgagtggttgacggaaatggagtccatgggccagggtaagaagtatcgtccagagattcgagatcagattgccgaacgtctgcgtcgcattcaggcgctggagtccaagatgaagatgaagtccaatggcggcttccgtttcgtggactaaatgtgttatcctgtttttaaagtttcatgatttcatgattgagacgacgagtaaaccaaataaataaattccaagattcatttgaatttaatgggaatttatggtaacactcgattaataaatagctttattcaacttattcgcattcgtataatttggatttcgttaaattttcatttgatctggcacatatttaatacacactcattataacaatgcaagaagcccaaacgcaagcactttagaccttagatttttggcaaaatgagtataaagtacaatgttgaaaattcaagtggtttaattaaaagtaccgaataaattactggattattagtttatgtgtatatagaatatacggctgtatatatctggacctacgcactacattttgtatatatatatatatatgcacgcatctgtaagttcaaagagtaatgcacctccattcaaaaatagacttttgtgacctcagtttgtgctcaacctcggattcagggggtggttgtgtttagcacgacggcatgtggcaacgaaattcgctggctgcttctgcaaaccgattccggatcaagtagccgctaatcacctcagccacctcgtgtggacggtcctcgtgcacggcgtgaccgcagcgggccaagacctgcatctggaagcgaccctgcatctggccaacagtcagggtgcggtccagtccatcgatgctggcgaggagtagttgcttgggcaggcgcaagttaaggaacttatcgctcagccccgaaaaccagcccacccagtacttctccgacttggacagatcaatgcgccaggtgtaactgagaagcaatcaatgaataatttgtgttttaactaaaataaaataaattggactacgtactttttggccgcttcggttgtcgatttggtcgtgttgggcttcttgaaatccgcgccagctgcggcactttctgaggagccatcggcggcgtcatcgcccggcggtgacgattcttcatcctccgaaatgctaaacggattgggaaacatactgttgtggtgggcctcctccaatacatcatctggtaatggcagatcattcgttgccagtttg

SEQ ID NO: 10994 - DNA, 935 bp, DROSOPHILA
aacacaccaaacgaaattatcgaagcgattttctatagtatatacaagccttacttttccggagcaaaaattattagctttacagaatgagccgacatcgcttcaacaacgtgcagatcaaggcattgcccggtggtctgatggcccaccacgaaccggatgcggatggcggacagcccggttcgcagaagctgcccatgtggcccagtgaacgcattcctcctggcggtgctggagccttccactcggccaaggtgcaatatagcaaggagacagctgatctgatccgattgcttgtcaaggagtccaagatgtcgatgttggtacgcaagcagatcgatgagagcctgcgcaatggggagccattgccattgcccgaaccgccgcgtcccaataccaacaacgatccggacaaggaaacactggccattttggatcgggcacgcaatgccaagcgtaagaatctgcggcagatcgaggcgagcggagcttacaagcagagctattaccgcccgcccgccgacaaccgaatgcatggagagaaggccaagtcgcagctgcagttcaccatggccggcactcatttgcccgatccggcgatcaagccgcgacgtcgtcctcgcgaagagcaactggtgacggaggaggatctcataaacgagcttttggaccaaatcaacgagcgtgctgagtggttgacggaaatggagtccatgggccagggtaagaagtatcgtccagagattcgagatcagattgccgaacgtctgcgtcgcattcaggcgctggagtccaagatgaagatgaagtccaatggcggcttccgtttcgtggactaaatgtgttatcctgtttttaaagtttcatgatttcatgattgagacgacgagtaaaccaaataaataaattccaagattcatttgaatttaatggga

SEQ ID NO: 10995 - protein, 250 aa, DROSOPHILA
MSRHRFNNVQIKALPGGLMAHHEPDADGGQPGSQKLPMWPSERIPPGGAGAFHSAKVQYSKETADLIRLLVKESKMSMLVRKQIDESLRNGEPLPLPEPPRPNTNNDPDKETLAILDRARNAKRKNLRQIEASGAYKQSYYRPPADNRMHGEKAKSQLQFTMAGTHLPDPAIKPRRRPREEQLVTEEDLINELLDQINERAEWLTEMESMGQGKKYRPEIRDQIAERLRRIQALESKMKMKSNGGFRFVD

SEQ ID NO: 10996 - DNA, 8373 bp, DROSOPHILA
tgtgattcattcggcgtatcccaaagtattgttcctcaatcgcgataagcaataagctttatctccggcatttggcattcaaaatttatggcttgcaaaatgcttttggcctcggctaagttcactctgctcagccctcaagtgcaatcaaataattgtaatctctttcaaattgcagttaagttctacttccacttcttattcccaaccacccacgcccacttgattatgctgatgagcacgtagctgcagcacaaaatgcacttctggttgcccccaaagaagagtgcttggcaaactgagtttttcggcaatcttaattagagtagataatgctgatggctttgggtgcttttccggtttggatttatttgcccaattcgattataagtacgagtaagtgttggtcagcgaagcgcggggcaaagtaatgcttaattcgaaaacttttccaagtgcgtgacagttgaaccagattgaaaatgaacaactctttaaaaaactcatttccttacggttttttgaatactatgtccttggaatagttttgtaattactactgaaacttaactcttgaaacaatttggtgataacataagtgctttaaccagcactagaatattttcccaaagaagtgatctcgtctgctgaaagcctccagtggaacgcacttgataaattgtttactttgaaattaattactctgctcattgttttcttggccgacggaagttgctgccattgtccgcaagggggcgctgtattagccacgttaaccgaactccattgtgctgcataaatcaagtttgcagcgcccttagcagcactttcaacacttttgcggcccagccagccggctcacatttatggtcagaacccacaccccacatattttttgtatggcccgccgatcgtggcaataaaattgcatttaattacacgagtgcagtggctcaagtgggcgaaaagcgggtgggaatgcctagctgggcgatgtgggatgccgagtagggttggccatcggggaattggcgttggtttggagccgggccagctcttcattgttgcgcgcatttttgagctcattaaactggctgcaattgttgccatgcgttgcgtgagtactctgctgcagtttctgcccttttgttggccggcaatcaatttgcagtcagcagtcagcagtcgacagtctgcagtttgcaaaagttgcagaaatgcaaaaacgaaattatatttgcggggcccaggcacatcattaaaatgcatcgacctgcagaacaaacgagtcgaacacctctcggcaaaaagcttcgcctgcatttgtgaggaatttcagaaaatctcccagcatttcgaagaggaaatggcccgagccgtagtccataatgtttataatcagtttgtggcaagcatgagttttcctccactcggtaaaaacaaactgtgaacaaagaaatgggcaattctggcagaggtgagtgcaatcaaaacaaacgagtagcctatgggtcttaagaaattttcaaataaaattcatatattcaaagcaatttgaagaagcaaacgtttaactatgtacttttcaattattctaagctgaattgcttagaacgtggcctgattggaagccctttaaaatggttaagctaacttattttatttaattacacatatttcaatttctactctttgtacgcaacctgtgtgatatcccagagaattttaagtagttctccccctcttttgtcaactttggtccatgttttgtttggctgattgacttttgcatgcaatttccatgtttttgcttaacgcctcaatgattgccaacaatggcggcagaagtggaaatccatcccgtagttttgccaagatggcgtgtggcagggccataaaacagcctaaactgcttaaacaaccgtcctatggcgattgtaaaaagggccagtcacacacagtcgcagcgactttttcttgggaatgcgctaaatgaatgcaataaaccaactagaagggtccccaactctttgtttatggccacacttcgctgaactttggtggcagcttcgatgccctgtctctttctgttgggctgtcttcgtctctttccaacttatcggtctccgatcgctggcaaatggcaacaatcagcgtctgggaattgcaactgcaataccaaaagctacacaaacttctgcttggactccagcttgtccgattttgttgctctcgagaagcgggagcaatcaacgcattgtcgacaggtggaaaacttcatggccaatgaattgcagttgccaagttttaaccctttcacatacccttttgtggggtattttcatttggggtttaagatctcataaatagtaaacggatctgtaagcagaaatattgtataatttttaaggatacttatagaaattgacgtacattttatcgatttcagcttatctgttccaacatcttatacgatcttccctgccaaggaagggtattcaaaatgctgctgttcgaaactatcgttgttttccactttatttcgttgctggtgtattttgcttggcctgaagctgattttgctgctgccgcagactgacagccgcagttttaacctttttttctctgtgtgttgacggccagtaatttgtgttgttgctgtttgttggttggctgtcggctgaagggaaacgccagcagcaacaacaatggccacaaacacacatgcaattttgtgcattaaaatttcacactgcgttcgcatgtttgtttgttggcttgttggtttgtttgtttgttagcttggttcggttgggttggtcgaatgccttttttttttttgttgcttttcggtcccttaacttttttggtttttggccaggggagagctcctttggcctgatgcatttactgtttaatttggcatgcattttgtagccaccttcgtcctttcccaacagtttctgctgatgtcgcccgccagaagcagctgacaacaaaatggcgatagtgtcatccaaccccttctccttagtcattgcacctggctgaaagcgaggacatcatcgtcatcgtctcctgttaacagccacgtttctggccctagtgggcgtggtcatgaccaactgggttgggcaaaaacaggttaaagaggcaaagggcgcctttaatttgccacaaatttaattaaggcatctcacctgcaatcaactcggatgtcgacgaatactggctaaaaggaaacggactgtcttcacaaattgacaaatatggttaagagaaatccttttacatcaagctcttgaaagattgccactcactggaattaatttcaataagcactaaataaatgggtatgcaaagaatgtgatatatttttcatatgccactatttttgaccacgcactttccgacatcagctacatatttttaataaaggactcagtgtactggttatttgagtatacaagttaataagtgacttcactttggtgataacctccccgtagtattgagtatatgtaaatattaataaaatcgcacgattagcccagacctcagttcattttatttatttgagtcgcgatgaaatcagctgcctttctcgtcataatctcagtatgccagtggctttgccgctttggagaatctagacttctggagccaaattgcggaattcggactatgccgtcctttcaccgaacgagaatcatcggcggcagtgatgctgagatcacttcccatccctggatggcctatctgtacaacgagtttcattatttctgcgctggcacactgataaccaatcgttagtatatttgacatcctcttcagcacaccactaataatctttagctcagaattcgtcctgacggccgcccattgcattgaagcgtctaaaaacttgtgagtaaatcgagctagaatccattcttaattggaaactgaactaattcctcttacagaacagttcgtttgggaggaagtggacttacacgaagtgacggatccatgtgccagatcacagctgaggactactctgtcagcatggccatcaagcataagtacttcactccttcgatcatgctaaacgacatcgccatgattcgccttgcgagaactgtgaaattttacggtagcttttatttcgcacccattaattagctccaaaataaaaaacatgatccacttcattgcaagatcacatcaggccgatctgcattatcctggacccggcggtgagactcttgctggaggacggtatgacgctcatggccaccggttggggattggctgacaaaagaatgcatccacatcttctccaggaagcccccatcacagtgatgaataggaatgtgtgtagcaaactgtatgacgtcgcgataacacagggtcaaatctgtgccggagacaaggagaccaacacttgcttgggcgactcgggcggaccacttggaggtgtagtcaactactatggagatcttcggttcgtccagtacgggataacaagcttcggtgatatcgaatgccgctcaccgagtatctatacagatctgagcacctactccggatggattaatatggttgtgagtcaatatagaaaataatttctattaattattaccattaggaatctattttgaaaataaatacatatttaatatttaattaattcgttaaaacaagagatcctttagtcgcttcgtatttcatatttaatgcgtttgaagaccatatctttttaggattaaaaagaactcagaaagaaatgagctttagatggtacattcattttccttcataaatatatatcatgttcgacttatatatcaagaggtagaagacatttggaaagtttcatgacgatacctttaaaaccaagaaactgttcttgatactggtcgagaatctattctgactaaaatcaatgtaccctttggtgagtataaactatgggcaaactatggggcaacctggggaaatagtgaaagtgattagatattagggtataaactgtgatctttggacaggattctgttactctgcgacactctacgtatttggcaaaacagaatataaattgaaaagcactcagatttcttcagaaggatttctgagaaatccgaatcaactgagttttaaataataaatactctggcttcccgataagtcccataattttacatataaacacactttcagtgaataaacaagttccccataatcgaagcatgataagcacggtggtggctatagatcccaacgaatcaccaatcagttgcaaaatgaatgtcgttgtggtaggactaacgtttttcctactcccgcttctgggatcgactcaatttcttgacatggcctgtgggattcgagctcatagccccagtgttccacgggtcaagaatggaactgtggccagcttgacttcgagtccctggatggcttttctccactcaacggacggaagattcatttgtggcggatctctgatcacgaatcgtaggtaaattgcacctattcgaccagccgtttgtaatcttggtattttcgtgcaggtctggtactaactgccgcgcattgcttccttgatagaacagagttgtaggttttgaactagtaaatcattaaaaatatagttcatataacataattttatcctgtagagtagctcggctaggagagtatgacagagaggagtatgagatgtgtcacgatagttactgtacctatagaatagaagctatggtggagagaggcttccggcatcgacattacaatccaatgacgatggcctacgatatagcaattcttcgtctgtacagaaaagtgcagtacacaggttgcacactatgtagactaaaaatatgccttttactaacactctatcctatacagataatataaggcccatctgtattgtaatagaccccagatggaggaagtacatcgactccttggacccattgactggcactggatggggcaagacggaatctgagggagacagtgccaagctcaggaccgtcgacttggctcgcaaacatccggaggtttgccggaggtatgccacactatccctgacggccaaccagttttgtgctggtaacgagagaagcaatctgtgcaacggcgattccggcggtccggttggggcattgatcccgtacggaaaatcgaaacgtttcgtccaggtgggaatcgctagcttcacaaacacacaatgcgtgatggttagcgtttttacagatgtgatgagctatgtcgactggattctcgcagtgcataactaccacaaataactactttcctgaaatgattcaatgaaaaaaataaacgactcatagctctttaatgagatttttaatttaataatttaatgcttgtatataaaaacttattgaaaacactttcagtttgaaacgcagccctaaaattgtcattctacaaaagcttgttttgcatttgcttcacatctaatgcaaatcccccatttttggtaatagcaaaacacttttcacaatcagtgggccataaaaaggaagttttccaacggaatgcattacgctaattaattcttgatatatggctagggagctgtggccaaaacgaggccacaaacctgcaactgggcgtaaaaaagagacggcggcaataaaggggaaaaaataacacaaaaaaatggagtttcatttgctccatttttttttttttttattcgtaaatttactggacagtttcttcttgagctctctgcaaattcgcaaaggcaattaaaatttagcagactttaaagctgcgctccagtgacagatgccgcggtaaaactttaatggcaaaaagggaaaaatatgaaaaagccagcaggcagggaggaaatgacgggggaaacagcgaaagtgaacagttgccagggtctgggcggtgtatcctggcacggattctgcatcttcagccttaagttttttattcatttttgagcgccacatgtgtccccatacacagagggcactccccattcacttgtcttaaagtttattcataagttaaagaatacgcattgaaatatttaaaaccatgaccaacgtttgtttaagtacttcgaagtggtatcctttgaaagatttgagatttaatctctatatatattacattatccctagtctgatttctggcagtgcatttatacacttgtggcaacgtatttccgacaggaaaccattcgcagccaccgccaaaatgtggcaacatcgccagagacaacagaggatgaaggaagcttacttcctattcctctatgtagacccgcgcctggaactccacatacacatcctcgcactcctcgtcctcctggtacttcgctaaccaactgctaaacgcactgagaactttcccacacacatactatactatatgccacattctgccgcagcgaaagtgcgcggaagtaataaaacatgcgtgaggcgcggaggctgcaactttgcgacgcttgttgcactcgctattgcaattgtctggaaagtgttgcgacattggtggtgcagcaggaagatggggtgctacagggggatgtgtggtgggaggggtgcccggtgggtggcagcatttgtgcttaagtgccgcaatatttgtagagcggcaaatattttccatgtaatttatgtctgcggttagacaagcatatggaagctaaatcataactatatgtcttaggatcagaacgctaaatcataactatacgtgttagaatcgtggaatctattatgcagttaaatgcaacaattataaaaattcagttgaatttaaaattcgcttttataaatttcgaatattcaaaaggaatcaaccttttttgaagacatatgtacctatgtatacaaaataaatcacacagttcttctggcatatccgctttagggcgaataattcaggacctttgaaatgggcatcttgcaaccgataattgccaatgaggcaactgtatcaggtgctattcagcatgatttgtgtttgccaaaataagagtaggaattaagtcatcgaaagtgaagttaatggctggccgcaagagtcaggcaggatacacctactggcgattcgacggaggaggatcctggacaacagctgccacacaggcacaccgagcacctcgatctcgatctaatttaggcgtattagttgccccgcaacaaagggcagggtgaattcgaataaaggcaagaacaatacttagacggaccttttgtgctccgacttgtttcgtttcgaggatccttgagcactgcgataaggcgctgctaatggcttcattaggctgtgcaggttcaagtgaaggttcatcttgaggttctcatctgtttgccacatgccggg

SEQ ID NO: 10997 - DNA, 1908 bp, DROSOPHILA
atgccgagtagggttggccatcggggaattggcgttggtttggagccgggccagctcttcattgttgcgcgcatttttgagctcattaaactggctgcaattgttgccatgcgttgcaagggtccccaactctttgtttatggccacacttcgctgaactttggtggcagcttcgatgccctgtctctttctgttgggctgtcttcgtctctttccaacttatcggtctccgatcgctggcaaatggcaacaatcagcgtctgggaattgcaactgcaataccaaaagctacacaaacttctgcttggactccagcttgtccgattttgttgctctcgagaagcgggagcaatcaacgcattgtcgacagtatgccagtggctttgccgctttggagaatctagacttctggagccaaattgcggaattcggactatgccgtcctttcaccgaacgagaatcatcggcggcagtgatgctgagatcacttcccatccctggatggcctatctgtacaacgagtttcattatttctgcgctggcacactgataaccaatcttcgtttgggaggaagtggacttacacgaagtgacggatccatgtgccagatcacagctgaggactactctgtcagcatggccatcaagcataagtacttcactccttcgatcatgctaaacgacatcgccatgattcgccttgcgagaactgtgaaattttacgatcacatcaggccgatctgcattatcctggacccggcggtgagactcttgctggaggacggtatgacgctcatggccaccggttggggattggctgacaaaagaatgcatccacatcttctccaggaagcccccatcacagtgatgaataggaatgtgtgtagcaaactgtatgacgtcgcgataacacagggtcaaatctgtgccggagacaaggagaccaacacttgcttgggcgactcgggcggaccacttggaggtgtagtcaactactatggagatcttcggttcgtccagtacgggataacaagcttcggtgatatcgaatgccgctcaccgagtatctatacagatctgagcacctactccggatggattaatatggtttgttccacgggtcaagaatggaactgtggccagcttgacttcgagtccctggatggcttttctccactcaacggacggaagattcatttgtggcggatctctgatcacgaatcagtagctcggctaggagagtatgacagagaggagtatgagatgtgtcacgatagttactgtacctatagaatagaagctatggtggagagaggcttccggcatcgacattacaatccaatgacgatggcctacgatatagcaattcttcgtctgtacagaaaagtgcagtacacagataatataaggcccatctgtattgtaatagaccccagatggaggaagtacatcgactccttggacccattgactggcactggatggggcaagacggaatctgagggagacagtgccaagctcaggaccgtcgacttggctcgcaaacatccggaggtttgccggaggtatgccacactatccctgacggccaaccagttttgtgctggtaacgagagaagcaatctgtgcaacggcgattccggcggtccggttggggcattgatcccgtacggaaaatcgaaacgtttcgtccagtctgatttctggcagtgcatttatacacttgtggcaacgtatttccgacaggaaaccattcgcagccaccgccaaaatgtggcaacatcgccagagacaacagaggatgaaggaagcttacttcctattcctctatgtagacccgcgcctggaactccacatacacatcctcgcactcctcgtcctcctggtacttcgctaaccaactgctaa

SEQ ID NO: 10998 - protein, 635 aa, DROSOPHILA
MPSRVGHRGIGVGLEPGQLFIVARIFELIKLAAIVAMRCKGPQLFVYGHTSLNFGGSFDALSLSVGLSSSLSNLSVSDRWQMATISVWELQLQYQKLHKLLLGLQLVRFCCSREAGAINALSTVCQWLCRFGESRLLEPNCGIRTMPSFHRTRIIGGSDAEITSHPWMAYLYNEFHYFCAGTLITNLRLGGSGLTRSDGSMCQITAEDYSVSMAIKHKYFTPSIMLNDIAMIRLARTVKFYDHIRPICIILDPAVRLLLEDGMTLMATGWGLADKRMHPHLLQEAPITVMNRNVCSKLYDVAITQGQICAGDKETNTCLGDSGGPLGGVVNYYGDLRFVQYGITSFGDIECRSPSIYTDLSTYSGWINMVCSTGQEWNCGQLDFESLDGFSPLNGRKIHLWRISDHESVARLGEYDREEYEMCHDSYCTYRIEAMVERGFRHRHYNPMTMAYDIAILRLYRKVQYTDNIRPICIVIDPRWRKYIDSLDPLTGTGWGKTESEGDSAKLRTVDLARKHPEVCRRYATLSLTANQFCAGNERSNLCNGDSGGPVGALIPYGKSKRFVQSDFWQCIYTLVATYFRQETIRSHRQNVATSPETTEDEGSLLPIPLCRPAPGTPHTHPRTPRPPGTSLTNC

SEQ ID NO: 10999 - DNA, 31449 bp, DROSOPHILA
tattttacagaatagaatatagaatatggcctctgataaatgtgttgccttttaaaaggctatcaatgcaaaagattttcaaaaaactattgtgaaatacattcacattttcttgaatccaataacatccatttttcggtgctagtgcttctaacatgaattctatattcgttatttcgatttatatacacaaaagattttgacaaattaatatgaaaacaaaggcatcgattgcttttttatatattatttcttttgtgtatatttatacatatatcatatatatacatgtgtgtgtaggtcctgcagagtcctgcttaagtgtgagtgtgtttggaagttgggagtgtgtagagcagggtagccggctttcgatcggctccaaattgccactcgttgtaaagtggcaattaacgccacatgacgctgtcaacaaatggccctggctaggcattacacacccacattcacattcacatctccacccacagcgaagcacgcagaccatcaaacactcccacacacactcacacacatatacacacacacacgtattgatgatatgtggagcacttacaacacttgttaagtgcattttgcaatgccccccttgctgtttttttttttgagtacaagaaataagttgagggtaggagagctcacggtgttcggccagggggcctcgaatgtactaatttttaaattattacctgagacacgacagcaacacgaatgcatttctcagaaaaacatacaggtgcgcccaggtgcaaaaaacttaggaaaggaataaaatccgataacaaagccattttccacccccttccacagccacgcccacctgtcatttcgagtcattagaaggctgggattttgggggtgagaaattgtatggtggggggggggggagagacttgccttctaattctgtacataagcctgacagggctgtcaggtgatttagcaggtcgtaactagtattattatgtaactcaaaaccatggctggtttagtagttaattgtggagcagttagtcggaaaataagtaagtggatacttgcaaaacaaagcagcaagaaataattttactctttcctgttctaccattatcattatcaatcttttcaaagcccgtaaagcctaaatcccttttttattatgtgaaaaatgactaaaagatgcaccgaacttttgtgaccaataaatggaattgaattaagtcagaaaacaattcacagcaatcgttacactgccaaaagaattgttagaatgtatgtatatataacatcagtatattagatctgccaatattagcgcatactcttcaaggcttttccttcttaccatttaactactttatgaccacactaaatgctgttatcccaatcatttttcaggctgcacggacggcgcctcgaagcgcttcttcacagacttcctgcaggacctgccaacgcccggaaccggaggacccactttcgacacgaccattggcacgaacatcacaggactcgttggcaagacggtgaagctgacctgccgcgttaagaatttgggcaatcgcacggtgagtacgcaccaaaatgttgggggcagggaggcggagcgtggggatgcggcaagtggaagctgtgcataataatttcaaagtacttgaccaaaaaaggaatgagagaataaaaaagtaaaagtttcgcagcgcaaacttgtcaaaaggcgttacgcttgacagggcggcgagtgctgctgctgctgttgcagtggctgttgcagcggcagctgcagctgtagcatgccacgccccccccccccaacgtctctttgcaccatcccccgcaacgccacctttctgggaggaggcgtggctgtagaaggcagctgtcgcctgtcgtttttggctgcggattttagcctggccctccgggctctgagtgaaaagttgtaagctgctacgcaacaccctccgccgtccgcttttcattatgaaaatgcagctggaaaatgcagttgcatttgctgcgctgttgttgctgttgcagctgttaaacaattagcaaattaaactttgaactttcaactctggcagccggcgagcgaaatcggaaaaacaatgcgagtaacaaagccgtggcgaatgttcttctgtttcgctccgttcagttcattttagttgaatttagtttgtcggtgctggtacaacgctgcgtatgagtgacgtggatgccgtggttgccgcaaacgagtcccccgccttttagcaagtttcctcctcaagtgtcgcgcggccataaaactttcaaaatttttacgctccgctggcttattaggtgagtggtaagtccagcaagttcgagtcctgccctgccctgcccctcggctcacctcctaaaagcctcaaaagcaaaaaaatacaaaaaaaaaaaaagaaaacaaaaaccaaaaaacaaaaagttttcgccgctcgcttcccgttttaatttcagtttgacaaagtgaatgaatgacttgaagctcgagtttcgctcacagctctcttattttatttctattttgggtagaaaaagcggtcccggttgcaaaactcggactgagtgtggtattctgtcaaacggcggttatgaacgcgtccagctaattacgagtcctcagcaaacaaccgccaattaagtacactttcctcgtaatatcaattattcctctgagaaactatcggattgcaccgttggaaaagaatattgtatagcctaggaagatatcacatcaaaaccgattcggttgctgtccaaatgtgtttctcatttctcctctagttgttgccaaaacttgctatatattattttcactacaaatcacactgagatgcattatgattagttggtgcgagcgctttcatttattttattcaaatttcagtcagcccaaatacaactaaaagcttacaccaatttgaagattttaaattattgcaagttttggggaaattgtaattttttattatataaaaatgcgtaaaatggccaaaaaagtttactttaggctaccaaaaaattataagggtctttgaattggcaaaaagctgcaaaaaaaagttgttcttttgcctgtatgtccatttttactcaagttatgattaaagaagccatcttagaattcaaaattttggtaatagtcttttttgtcattttccgtctaaaaataatcagttttttcttcataaaattggaaaaaatggtcctaaaatggaatgtcatacctcgttgagatcggtattcaatttccaatctatctggattctaactttaaaatataaattttttgccattttttgaaaaatttaatgatgttatcccttataaaaaatgcgaaaaattacccaaaaattattttactttaggctcccaaaaaacttatagcatcattagcattggtaattagcagtacaaaaatattattcttttagctatgtatcaatttttagtcaagttatgatcaaacaactgatcttataaatattgtatatcaattttttggccaaagcgcttgtcgcattttgagtctaaaaataataagcttttaaaattggaatacaaaatagtggtccaaaaatgaaatgccgagctctttatgaaattcctcatctacttggatgtcaattttaaaatttccatttttcttgccaaatgcaaaaaattagcaaaggtttgaattacggtcaacaaagagttgaatcgattactccttcattaagccgaaatatccttttcattacttagcagtatttacacttacaagtagtttatgctacctgactggcataaatcccgatttcatgggagacttgatattttctcttcccaaattttcacatagttatacatacatatgtactcgtataatgtgccaaaatcccaacgtgatgtatgcatttgtgcgttggtcatcgaagctgatgagctggctaaatactgtgtaattaatcactagccgagcagcctgccatttattactcgccagtcgcccattccttggatatcagttgatttcctcccagacgcctaattactcagaagatgttagttcatgaattatacccgccacagagtgtacaacttccattttcagagaggtcctgtggcgtgcagcttgcacatgtcccttaatggcaacaattttccatgcgatttaacaattttcgaaagcgtttttatgccaaacaataaatggcgccatcaagtatgcggcgcagttttttcgcttccttccgatgagaaaggttctcgcatcaaataatttatacagcttcttagagaataatttatcgaatatgttcgattattgtcgttaaatacttctatcatattcgctacaaaatatctaagatgcagagctcacaaagttgaattccttttgagcaacaactgaagttgtcgctctaagatgtcctaattaacatatgtacaccatcatttaagaaacctcgcataataccaagggaaatcggcatattttcaacgcatcctttgtagtaggccaattcctgcgaggctcagtattcgaaatgcctcggaaaacgggcgacattaaaatttctctttgcaattcattagcaaacgcgatttggcggctgccgagtgtttattaacaaagcctccacttaactttgcgtgggtggtttttgatgggtggtgtctggttggctgggtggttgggtggtttgatttgtggcgccaactgaaggagcatgtcatttgtggtcttcgagaggcggcgaccgcaagtcagggcttcttcgacaccgcagaatgccaatggctgcagatggggaattacacggtggagcagctggaggaggtgaagacggggtctttaatgggtgctccaaattctcaatgcatgtagttcattagtgtgtaattgtgagggtgtgtgagtgtacgtacgtgtgtgtatggaatgcgcatcgatttgcatcaattgaattgtcaatgccctgagcaatgaccgcagccacagaaggaacaacgacaacgacatcgtgaccatgatgactgaggagcccagtggccaggttacagtgaccaaaaccacagcactaccaagtttccttctggttaccagctggttttttttcggaatggaaatatggcaattaaaacaggcagagagcaattaaaaacagattacaaggaaaattatagcaccgaaacctttctcatactcaaggatataatactaatatgaaccttagaactaaccatgttgttataattacattttatattaattacttgctccttctttttcatttgttgttgtactataggagaagataattccaatatattggctttaaagtccactgtgcacaggggtttccttttttgggtgctggtgggtgcgatgtggccctcgttcatttctgtgcaactgcaattgaaattgttgcggttgattttacaagtaaattgtcactgccagttgtaacacaaccgagttccactttccactttccacgaacccaaaaaccccctggactcagcctttggccaccgaaacaattgaaaatgcaatttagcgtgtgaggtttcgctgcgcctcgtccttttccgtttggtttgttggttgttccgctgggtccttcgatccttttttctcgatttttctcgtttggtacccccatatccaatctttggccttttgttttccgaatggacaccgcagcgggtccatcacctgcgccctccaattttcccctgccttcctctgaggtggcaggaacagcgattttgatgcgttttcgtttcgctttcatatgtgggaaaaaaggaccaactgtaggtcaggtcaggggacacaggaaaacagaatggaactttcgggctataataaatgtatattaaacatcataagataatacgatttttttttagagttttttcgggctcaaaattaatctttcaaactactcttaagtttttagcattttcaaagatatagctttgaaatatttttctgttccctgtgaaaaagttgtctttgtttttgcacttttttttcctatttttttcgccaaagtcagagcttttttccacgcaaagaaaaaatttaaaaaatagcgtttatacttttcgttctttcttttaggcagctgtatatttgtgggcgtgtttgtgtgtgtgtgcgattgccacgcccactcgctttttgcttgccttgactgtctgtctgtttgtttaacggttcaggactaaaagcagctccacgagccacagaatcctaaagagtaataaaggagaactttttgctttgcgcgaaaaaaaaatatatattaaaaagtgtcaaccgaatgacctcgcttttcactctgcccgccaaaaattcactatccccccatctctttgtgccaaaaggagaattcgtagtgcattcattaaattagttttaattttcgctaagaaaaaaaaaaccgggcattcattaaaaaatcacttttctggggttgcgaaagttttggggcggctcttctaaggggaaatcgctttaaacacgtcaattgccacgcccatttgaccacgcccgatgggtcgccgcccctaaatcagatatcaaaatgtatgtttgcatagcgaaaagaaatcacattctccttccgttgtaagcgtgtgttgtcatcgcattatataaggagtcgtcagtgggcgaaagtaggcgtggcaccctgctggctaaaagcaaatcaatcaaaggaaatgtttaatatttttcgctatccgcttcacggggcgcgttgacataaaatacatctgaggggaaaggctgaactgaactgaactgaactgaactgggaaagtcaaaaggagaaagtcgaaaagctgagcgactatcatggcagccggaaaatcgaaaaagaagtcgggaaaaacgcaggcggcaacaacaattgtctgcctttgtgtcagctgtcaattttccagcatttacttagctggcaggggcaacgcggtgaaaatgtcgtggaaaatgtctctgcacatgcgggtacaaaggaaaatcagctaatgatcacaagtgtgcttaccctatcccatcagaaaatttctgtgccttcaatgaaaggtttacacgaggagatacctaggtgtgttgttccaattagttgcaattataaaatgaatatcacttattttgaaagtcagtcatggaaaatcttatcaaaactctatttatttctgataatataactttaactaaggcaacaaaagcatttgtacgaaaaatatgtttacctatgattttaacttgtgcttttctctagttctctgatattgagcccactgcacacagcaagataaataaaacaactaatgaatatgcaaatgttcaatacatttcccattttcctaatgtatttttcccgagaaagagcggcaaacaataaacccaataaaatataacaaattgctccggctgcggcaattagattcggttgtgagctgggctctttttttttttttttgacagggttgccaggtgacatatgtatgcagatacacatatagcacccatccgaatcgtttatcttcgtcaatggtttctgatttatgtgcccggcgattgcttcaccttgcgagtatatgtatcctgtatatcccatttcttcctttaggcactttcaccccgctaatgtgccgggtcaaaggttgagacgcggccattccggcatttaaatacaatttccctgccccgcagcttaaacaaaaaaaaaaagaaaacaaaaaaataaaataagcgaaattgcgttacgtgccaggttccaagacacgtggatgttgaagagatgaagggatgatggggcaagggcagtggtccccagcttattattattatttcatcttgctgttgttgttgcccaggcaatttcattcaatttcgcttacgaattttcgacgcccccggcaattgaagccggaaaacaagtcagcgaaagggggaaaggggcaaacaacaaggggataacaaccacctgccggaaagaaccgaacgccccattccaatcacctgaaacagtgtggggacagtcagaagacccgcccatcgtttagctcgttaggatcggacacttgcggtttatgaaaagctgttgccagcgcatcctggaacgtgtcctgcgagtgtcattagcagagcacgcggcaaatcaaacaattctggcatcctgctattctggttaaccataaattttcagccagcccgttgagcgatgtgccattgatggccttcttatgctaatttccgtgaaattttcatatttatatttcgttggaaactttttatgggccagcgccgcaaaagacaaagacaatttgggtgaccgatgagtcgtatgagtaatattttgcgtgtctctatgaaaaattcatgcgacttgcaatcgctcacctcgtttctcctttcttttgctatatatatatatactatataaatttccatcttcgcagccagctggctggcaatggaaaaacgtttttgcaacagaataataaattattcaaaatgcaaaacgttgcgtatgagtgatttaaggcaaatacaaatactatatgtatatgtatccacttacatagacacattcgcaaatatattcgcatcgaaaaatgcgtaaccatatgtgatatgtatgagctatattctgaacaggtaagaaggccacgcccatccatctatatccgcccactttgaaggctatttcgatatctttgcatatttattggctttcagcataccatgtgcaccacctccttttatgttagctttgtcttgcttactttttattagcatacttggcttcgaatcgaaatgggtaaactggatcgagggtcagcgggagtaaccgattggggaaagtgtggaatgtggggaaagtgccccaaatgaccactttctaaatggtctgtgcaaagagataatggtcctaaatattgagtgttcttctgtgcgttcttacattaaatttgagtcctgtcgtccaagtcaataaatccaattgcaatgtgtttgaaactgatttgaaattgaaacgtatattggtatcgaatgaaatctatccatttccatgtgatcattatctcctgcttttgaacacttggaactaaataaaggttttaatttccaatttccttgccaattacttactataactgatatccaattagtatttaatgctgcttgtgccgggttgtgccaatgatgttgaaatgttaatgttattcaatttcatcttaagttctcgtaagttctcgttattcccctaagcaataaatcctttaactattttgatagtttgaaatcaacagcttacaaagttctgatttccagtacaaagtgctcaagaagccaataggggaaaacgccacctatcgcaaatttatcgatgtcaagccgcccattgagttaagactcgcaatcaatcatccttaaacacatctctcgattcaggtccaatcgactgccagccatcttgccaatcaggctcaaacaaaatctccgggccccgggacttttccggcattttccctacgtgttttcccccttcacttttcccactttcatacgacagcagtcgtgcatcttatttattgctttattaagcagcaaagggcagacggaaaaaaaaaacagagacaacaatggcaaccggaaaccaaagcataagcccccaaataaacaatggcccccaactgaactgggtgttttggaaaactatctttgcttgggcgaactttaacgccttcaatcaaaagagagtgtacccttctagtttttacccttttctaatttacttacacttgagaagttttcaaatatgaaaatacaacccaaacttcagcttcattagggcggaagtaagctggaggaagttccaaaataaaaaaattatatcaacaatcaaagtaagggattattcataattccgtataggattgtcttaaatcatagagaaaacatgcaagcagcttaaataaatccagaaattgttgtgatcataatcaaatctgctgcttaaatgcagtttaaactatgtgacagatgatgcctattcacccaaatgacccgtgcaattttgattcgcaagaatgtggctacttaattgtataattccaattcaaagagcgaaagtcaaacgaaacgaagtggaatttgaaacagcaactgcacacgacaactggcgaaaaaggacgaaaaaggggcgagggtcgcaattataatgccagcaactgtcagtccgaatggcataaatcataaattacacgacgagcttgtcagcggcactcgtccttaaacacgcacgcacacacacacatacacacacacgtaatcgtagtcctttttgttttttgtttttcactttttaacttggccaagtcaaaggcaatgttgtcgtaaaacatttacacggcaaaaaatgaaatgagaggtaggtcggtataagaacctgcagacgcagtgcgcttgaaactaaaaaccgaaacaaccgcaaggatgtgccacaggatatctagaaaaggaaattcaggagtgaaaaaaaaggagagctctgtcgactgtcggcggcggcaaatgaaaactgtcataaaagttgagcacggcgttgggagtatttgttgcatttctcggcgagagggggctagaatgtagcaaaggaaagcaggaaaagaaagaacgaaggcgagtccttgcaggtgatttccgtttgtcgccagcggcaacttagctgtcagttcagacatcgtttttgtgcaaactttgtcaatgtcactccgcagtgcgcgtcgcctttttggctcgggtcttgggatcaagctaatcttggccagcaggcgatgggggattcggacgctggacgctggtcccggcgaaaggggcgtgccataaaaggacacccaggacattcgacgcgcgctaagcgaaacacgtacgccgacccactcatcgcagggcaaggtcgcctctcggtggtctcggctcgttgtcattccgttggagttccgccatccagcctcatctcacctttcacacaaatccaagttctcagcgaaaaacactcgcagaaaaagtactcaagctagtcgagacagctctatggtaatagttaagtaaccaagagttcgttataaggatttccaaaaccagtagttcattgtctttatttatattagatctttaccatttatcagttacattacaatatttctgaaaagtttccgtaatttgtaactactcttctttggttcattttgaacaatcattctatctaatgattttagaattgactcttgctattaatttaattgtatatatctcttaaggcgactactgtatcttaaaaatctctacattaagtgattaaaattatttcttttcgagtatgcaaataaatcccatcgatttcccttccgcaagattaatttagaataagataagtttttgcgctcgtgtacggtttcgttgtacttacacttgataggcttcacgtggaacgtgtttgtgtcctagtccgcgatgtcctggcaccgatgtccctgttgccatgtccccgtgtcctgctgtcctcgacaattgccgcgaagaagttttccccccagcgaaattccagggtgcccacccatttcgagcaaagaaaagcgctgaaaaacattagagcgaaagtttgctcttaacgaagcgttcaagtggaataagtggaacaaatgcgactttgcgcccacgctggcggcgagaggggcgtggccagcgcgaggcagctccaactcgatataatcagcattgtcgttgtaggcgaacaaaaggtgcgccccgagaaaaagtcctctgtaagataccaagccagatgagtgagtacactgcgagaaagagtaaaagaaactgatagattctcaagttcaattctttcaatagtatacctatgctaattccaaaattacattgatgcaacactatatcacccttcagtatatatagaattaaatttccaattaagaggtagttatttgttgttaagttcttttgattttaaaccaccgattctcacagtgtaccagtgcagcactgtcagcaacaataagattgtcaactaatgggtggaatggggcacgttcatgctgtgccgatacccccgggtgatacctattgatgttttcagtgaagttgattgtaaaataattgaacagcaggctgagcaaagtgccagcggcacatgagccccaacgacaattgctgcggatgggtggcattacatgttggacggtgaatccactggcgaacaatgggggagttgccccgggttcaggtactcgtacttacaaatgccacacgccgggaacatggtcagaagttgagtttatttcagttgttattcgaaatgattatgacatggttgggcgaaaattagaaaaattgttttaaactgcgccagcaatggcaacggtgtgcggtcaaagtttgacaatttgttatatgattgagaaatctggcaaaggcaaaatgttgggtacttttaatggtcagtaggatgtaattaatataaaatcgtttttgcacattttgtgaaagttcaatttgttggtgtgccatatttaagagttagtcacatttcggttttagtagatagcttcccacatttcccacatttaattagggcgttcattttttgtttttgccaaatatcatatatcatttggctacttgtttgattttgggaataagttgtgacgcaaagggcttgcccccagagagattgagacaaaggcaggacttcccggaacttagaacccaggacccagaccgccagataaccagataaccagatagccagatggccagatggccacccaccaagtgacgagccgaactgaatggcgaaaccaggtccctcaaggccattgtttgacaaggccaatctctctttaaaggcggcgaaggaggaacgtggggcaaactaatgagtgaacgtgttcgagcaaattggccctaacggcattcatcccgaaccataaacccatggcctaatcaaacccatccagccaccctcgtccccaaggtccttcctgggacgacatttattgaccaaattaaaagatgcataacaatagctttgtcatgctgctctgcttgtggagctgctggagctgtcttaaaacttggttgagcataactcataaaaagcaatcccccatctccatcgccttggaaagacatttactaactaaaagcgacgtcgtcaactaacaaacagtaatgaaaacttttaacagagcccccagacaacaggaaaatggagagaaaagaacactggatgaatgtgtgggggataccaaagggatggatgaacggatggatggatggatagatattgagaatggttatgggtatttctggatggactggatgcctgtatggctgggaactggaagcgtggggaaatacaaaataaattaaaagcaataatgtcattgaggcactgggtttgattggcatccaatggaatggggatggttgaccaacccgcccaccccccctccccactccaaacacccaacaccctgtcgtccttgcaaaagttttaatcttaaatcaaccaaacgacgacaaatgttcacaagcaatttcttgtgcttagcaaatatttacccaataaattccattaaaactaacaattggtttactttttagcttaaatgggcgttggcagcgggggcgaagagtgtgggttgggtgtggagtgccaactttcgacttgactccgtagttttgttgctgccgtgacaggagacagctaccgcagcagctgaaaattcgagctagtacactgcgagaaaaagagctgatgcatgcaaattgttatagaaaatatagatttaaaatcgtgctgccatgttaaaaagttataaagttaaagttataagttaatatccttaaatgaaagttagtcaatctaaaatactattcgatttctccgagtgcctgaagtaaatgaagaatgtgagctgaaagtgggtttcggcgggaaaaaaagtgagcggcgaaagcccttcggttggggtagccatgcgtaggtgtcgttgtaagtgccggaagtggctttttgcacagtttttcttctttcgtcccgccatcgttacttctcccgttagccgtttttttttttttttttttctttttcgacgggggcacaggatgcgcgacatgcataaaacaaagcgatgcgagccagagtgtaaataaataaacatgcagcggggaaaacccagacggaaaccgattgcggattgcggggggatcttaagggggctagtgggctttggagtcggagtactactgccttgtggctgcaaattggtttgcctttttttatccccgcgctcagcagttgtagcaaattttccaacatcagttgcggcgcccgtagaacaagtaaaaaaaaaaaatggaaagaaaaacaagaaaacagcagccgcaaaaaaaagaaaaacgaggaggtttcaattgccaaagtcaaataaacttgagctgagcaagcagttactgataagggtttatcaccaagttcgtgacggttttttactccattagattggtaaatagaatacggaattatgctagttagttttttaattacttaaaaaagcgatcctattcgttgcagatttgttgctctattttcaaagtagccttcacttgtagaattatttcataaatttacacagaagttcttaatatttcacgatcgcatttaggatctttgcagttcgtttctcgattgattgcagtttagaaaatatatatcgctttgtttgccaacttaaaactagtggaaagttttcaactttgacaacgaattggagccgaaactctgcgctgattcccactgcattttgcgaaatgaatgaaaagtgggcgctgaaaggggaacgagaacagcacaaggaaaatgccaataacagcggcgaataaagaaatgaaaatcgcattacaagggaaactaaggcgggatgcggggcatggcttttccccttcttcatcttctttctacacaggatctgtctgtaaccgggctttttgttatggcaaaaagatgtcgagttcgcatgcccttttctcaaaaaatactctttcataactactgaaatttgcaaaagttcttactaataattaataagttaattagttaaaaagaactctttagtttttagacggacagcaaccaagctgtgataattatatgcagggaatgaaaataaaaggttctatgtttgatttgaaaataaatacaaacaaacttagtaaaatttattcattttagttgccattctcccgcatcctccgttctgttctatatatattagcatatggcttggttagtgtatttttagattcgtcttccttaaaatgtatcctcatcctcttgtttttcgctggcacacatatcacggacaacagggacattaggaggtttcaggattccgcctttctgatgattggctgcctgggcaagggggattttcgaggtggggttttttgtttttttttgttttggtgttttatttttggggaatgggggaattccttagtcgaatcgggactgcggcatgtgcttcatatgtccccaaagccgcgctgacaagtttttttccacgacgctttgcagcgcggttgtttttctttgctccggcgacactttgttaccccagtcctgctgctcgatttttccttttagttctttttttttattttttatgtactagggaatccagtgggttttcctttttttttttttattttttaggtggctgggaagctgaaagtttgcgctgcgtgaaactttttagttggtttatattgcaccgagcttgggcgatggaaacgagcgcaaattatgagatgtccttgcttttgaatatgtaaggagctgtttcttttcactctcactctgtggactccatttcctcgatttcctctatttccagcgtattttctcagaccccccaaccccccgcctgccccctcgtcagcgcacatttttcactttccccaacctgtacggctgttttgccaagttgtttgcttagtttattgttgccattgttgctgcacgtgagaggttgctgattgggactacctggcaatacccggcgatacctggatacctggcaactgagctgggagtccgactgcagtcgaaatgaagtgccaatcagtgccaaaacaccccccaactgcggcacagggggtggcacaggtcgaccttccgcccgctggctgacacccacacatacaaaacagacaaaactcacaagtcatttcggcaatctccttcacggaaacggaagaaaaaagtctcttaagatttcccgggactaacaatcctctgaattgttgttgcctcacagagggatacatttgatgattgccatttacaaagcatatttttgttattattatatcttgttacacatttcctagcttcttggactaacaatttattattgtctgctctttccgagaagtacaattaatgcgactcggtttgaatttactgcaattgaagtgagcatttggtttttgtttaaaaaaaatgctagatactctgcctggttcttaaaaagtttttattttaatttgctcatttggtaaaatttgccgtttattgaatatcgtttgaattcggtgtagttttcaaatgcattctgttgagatggcttaaagcatatagtaaagccattttgaatgaaatttaattatatatataattcattttaccgtgtttaccgtcctgtaattgcattgaaagtttaaagccaaaaattttgctggcgatggatccattcccccaattctcgccaggattctccagctcatccgtttccgatggcacagaaaacctgactaatgacacttccgtgatgttggccagaaaattttgctaaataaattgagccctgctttcgcccggcaagatagtgcaaataataatcacattaaattagaaaattctgcactcataattttgctcatttctgctgctgctgctgttgctgctgctggattttcgcttcctgtcgttcgcctgccaggggccacgccccttttggcacacaaaagcaggcggaaggtggcgggaaagtgggcggaaaagcagtaggatgcccgtggatgccaaaaaagccagaggcatatttgaaatgactgtaaccggcaactgtttttatgccacgggtcgagaatctgggcttggattgcagattttaaggttttttggcgtgtgggtcacttcattttgagcgcctgcaaaaacagatgctactgctgttgcagttgagatgaatcggaatctgaatttgaatcagaatcaaaatccaaatcgtaaactgaatggaaatattgtagcagacaataatggcttcagatcatcatccagacacacaagtggggcacaaaaatagaccctcttacgatttttgaagtactgagcagcggaaatcatttttggagcaccataaattgcattgctagttcggatgagggggaattcgatggcggggatgcgaggacttggccaaatccggctgaattcaaaatgcaatcaaatttatgcataacaatatttggcgagctcaaggattggcaaagtatgtgagtgagttttcgccaattacagtggagaacaactgaaaggatagagattttgagaaaatgtaagccttgaatggcttgtatttggtgtaattcactttgaggttgccatcataaaattttccactcttacgcataaatatttgtagctttttgcctcttacgattaatgcaatttccgttctgaacctttcttttggattgaataaaaattggttatttttattagcagcttaagcgttttgctttgatattttaatagcattttaggagcaatgtttcactttgttcaagctctggtttttaaactatctattgatttacaattttccctttgccatatgacttcgggacttaccaaatgagctaaaagtacgctcttaaactgaatactgggtaacgtgttcattaggtaagctggctggatattatttcattatatattgctggaaatttatgttggcgctgctaaatgggccaaggcaatcgcaaaatcccccgatttccaattccattctcacacatttccttgccaaatcatttggcctgccgccaacacaatcggcaacaacgaaaacgttggtaaatgcaacaaaaatgcgcaatttgcaattgcacagagaaaacacagagggaatatctctatattgttggcagtaaagggggcctaaggatatgggtgcggggaaaggggaaattcaagggggggggggctgggcagggcagggcaaaatgtgcaatcctctttttggcgtgtggcatccgccgcataaaatcaaaattaatttgctaataatgttgtcgtaattatctaattgccttcacatagaatgcccagaatgcaacttggtgattggtggtgcgaattgtacaacaaattcattaacagacccaaaagccgcacaaaataattaccaactgtgcgtaatgactaaaccaaacatacttaaacagctaaaaaatacatgacgctctaaacatgccaaatttggggtcattagttcttttttcctgcgattgcgagtgcagtgcattttgaaaataggctactctgaaagtaattactttcacaattcaaacttttaaaattcatctgtctttaagcatcacaaacccagttgtccaaactgatatcaatcatattcaaatttcccctttttaatgctgctagatcctttttgctcattcgttggatttccaattcccagagcaaaacaaaattcaaacttcaaacggccatcgtgagtgggtaatgcataaaaccagcagctcggaacaaataatcatagagactaatatatgtccacccacacacatgcattgtagtgtgcatttgggagtgggattcgagtaaactgaattttgaaacaaaagtacaattaaatgccgcatcgaaagagggtaaatcggggagagttccttaaaataattacaactgccaggacatagaaaacgaatgtgcagttcgatgtgcagagagaaaaaaaattaaaagtaatttttgtaccttcggaataaatctgcagacctttgcagaatacctaggatattgagtttgtgtgattcatattggcaataaaatgtaatataagaatttgacaattgaaatagtttataattggttatatcacatgcatgtggcagtaatttcgtccagcgttttgatttggagtgtggccgaacaggaaatatgaaaattgcaagggaagaggaaaaggacgattgtcagagggacatctgctccagctgccgctccatttgccaatcatccgaaattttcgattccaattcgcatttaaacatgcagaagctgggcgtttgtgcatgtggcggtgcaacttggtcagccgcacacacataaatacgcacatatatgtatgtactatgagtatgtatgtatgtatgcatgcatgtatgtaaatgcgggcagtgggacaaagtcaacacaatccgaaatcccaaatcctcaatggcggcccgtatccacaggcacgcacttcggcatgcgattgtttcgcgccattgccacagaccacaggcgatgtcaacgttccgcagcccaaaatcctttttcccgcacccaaaattctatgcgtttgttgatttgtcaggaccgatgccagccaaaggccccacttcccattccattcgatttacccacgcccctgggcagcgagttaagcggcgcgtaattatggccaacagttaagagccgtcgagggggcagctgattcgccataaaactcaaagagcatagaggagcggcgagtcctgcgcttttcgtcctggactttttgagagtcgcacaaaaggcagcgtgccgctaagctcagcaaatccgacactgtaaccaaagcgggaaacctattttgagtctttgtagaaaatctttcagttagtataacatcatgtttgttttataattcatttggaatgtgaagaatttttaaactagccaatacaaatcaacgttcttccaactgcaacgaagctacttagagtttcttacggtgtaagcagtggtcccagccacattcgatttcaatttggcatttaaattgtttatcgtacgacggtctccagtggcttctgtgcgtgtttgcgtatgtgagtgtggcggaaaggatgtcctgtaatcgtgcaataaacacatactcgtacagtcagccacacacacacacacaccacacgcacatgcttacgcacacgcacagaagtcaaatcgatgactaagcgcgcagtttggcactgcactttagaggctacgcgacgccatttcacccatcgccagacgctggactaagtgcctacctttccaccccctctttcgtcctttcaggtgtcctgggtgcgccacagggatatacacctgctgaccgtcggccgctacacatacacatccgaccagagattcgaggcaatgcactcgccgcacgccgaggattggacattgcgtatacgctacgcgcagcgcaaggactccggcatctacgagtgccagatatcgaccacgcccccaattggacactccgtctacctcaacattgttggtgagtagtcgcaaatatattcatataactgagataataatataatttgtaagttaccaatagaggaccaagttccacatatttttgtaatacaattcaataatacactatgaaagactgtgaccaattcaatacctatactcatactctgcaaccgcatgtcagcgtgtacatagtttcaattggagttttgtgtactctacgaatgctactccaagtacgagacctttacgccagccgtacaaatatatatacaaaatatgtatatataggtcgatacaaaactagaaaaacaactacatttaggtgccccccctcccttgttattctattaattcccatttccactttccccttcctttggcaagttaatcaagcggcgtcgttatttcgctcagtgtggccccaaaactgccgccaatttgtatgccatgcacggcatggctcctccatctacatttccttccacaactcccacacctcacatcccactcccgaccatcttaaccaagtccctcctgctccgccagctccacggcgcttttagttggctacgtatgagtgatttgccaactactttgatgtttacactgatatccaatctggcatggtgggcacatgcagacacagaccgacatacagccacaccaacgaatgttgaccacttgatggggtatctatttccgggtctccatttcagctaccttatcccgacatccctgtatccctgctgccctgtagccctgcatcccgcatcgcagtcatcctgccacccagagtccaccatccacatcctccatttccactctggcgcgcggtgttggtgttgcgcacatgtttgtgtcgttttatggcagctttttgctgtttgatgattcccctgggcaccatttgcactttatggcttttcacaggccgccgccacccagtttctcccatccacaatcatcctggcccatccgatgaacacccaagcgaccaggggacgcgcgtgatgatctgagatggtggataccatatactgcggataccagaggagctgctggccgctgaaagttggtgctagtgggatgggctgcggtgtggctgcctcggctcataaatcacaacttatgcggcacaaaaggcgatgccaagaaaacgttgccttctttttgaggcgccgcaaactaatgacacgacacacaatattttgggtattttagatttactttgtcatgaccgcagctgtgcttacttttgggtgactgaaagggatccgtcatatagttttcacaagcccactgcttttttttcctctgataactaaacatatcgaatttccattgataagtttcacaatccgcattaaagcagagtcagtaatacaacaaaaaacacaataaaaacccctagagaaatacatctgctctctagtttctaaaatttaaaatttataatcaattagtatgtttctccaaagcgaacatccccagatatttatatttcacgctttcgccttcttagctcctcatttggcaaacatttttcggctgcaccctcatacattaggctctttgtagatacatatcttatttaaatcaaaatgtccctcgccggctcttttcaatgcataatttgttttattaattgttggaaaaattacgagctaacttttctggcgggcaaagcgtgcgaaaagtttccactttcggccgccggacgtggcggggtgggattttccaggagaggtggcagatgaagcttatttctgggcaggactcagtcaggactcacactcggagtcactgtcaggcccgaaagcaaacaaatatgaaaataaataatgcaaatttgtttatttttcacactgtcacaatatttgaatagtaatcaaagcacacaaacagccatgccgcacggacatggcagcaaaagttgcaaggggtgttagggactgaaatgggaataggaataggaataggaataggaatcggaatcagaatcagaatcggaatcagaacctgaatcggaatcggagtaggagcagaggaaaggacgaaaggacgaacatgtgtacggttgcatgaagcagactataaacataaaccaaaccattattataatgtcaacacaaacacacataattccactttcaacactttgccttcggggttcgagtggtttgtgcacatacatatatacacacacacacatacatgtatgtacatacgtctgtgcggagcggatgtggataggggctgcaggttcggtcggatactggaacggggggcgttgcgaactggggcgtggccctgcccgcagtcacgcacaaacacatttgcggttgtttgccagagaaccggcgctattctgcccaagcttaagctattattctggttttgactgtagatcacaccctgaaatggagtctaatgcactgagaaaagttcatatatccttgtggtcattttatcttgctactataccgtctagaatgtacccaactatagtttgtttagtaacgaaacgaaattaaatattaattatccatttaactttgagccagttctttcaagtgtagctgtgagtatccttgtcgaggggtaaacgttggcattcgtccttcttgttatgccaaatgccagcaaataaagtgcgtccgtctgtcattggcttcgtgacgaaacccgaccgaatcgacatgtagagtgggcaagtgagtttttagcatttgtcagtgacgacagacgccatgaaattgggcgattcgacgaggggcgatggagcaatcgccggttaagttattggcttgtggggtgcgacatgcgatatgccgaatgccaaataattcaagtcaatttcctggacaaacccaacgccagaaggtttatgggacagaagtgtacgaccaacagacgtcgccaaatagaggcgatatataatgaatatgcatacatacatatagttaaagggggaaaatagaaatagagcattgcagtatattcacttgaaacaaattgtggacagtcattggtacaataatggatgtacctcaaagtatgtaaaaatggacatggaacaccaaacagtaggtttgcataccttcagaaatcttaaaaaaaaaggttttaattggttttccaaggtagagtgcagaaatattaacgtgctacttcgaaaaaaagggcttatatgggccaacacttgtcctactccataatcacacaacaattccgtgcgccaagagctctcgatgattatcaaatgtgcaatgatttctcgttcggccaaatcgattcgattcgattccattcgattcggatcgaatccatcgcttatacatccagtgcattcaaatacatgtatgtataatgtgtatgcatggagttcgggtgcgtgtgtgcggtgcatattgaatttataatgcacggttgatagattctggctttgcatcctgtcaactgcaagctgtttgccaggactgccttttgtcccgattgttcggacaggcggagtcaatcaacggacaaaagttgatttcgcaattcgccatagccacagccattcgccatttgcaattcgcagctcgcatcttgcataaatatgtatatatatatatatatatgcatgtgtcggggcaagttcataagccgttgcccaatcatctattgaaccgttgaatcgtgtacgtgccacagagcgtggcagccaactcattgtcctccttgttcccattgttccccgccaaagagcttgttgcgctttgcccagggaccactttgccattggccatttagcatttcaattggctaaaagttcaaggcgaacgcggattttaaaagaaggttcaagcgagattgttagatgatattaatataggatgaaaggtgcactaaatcactgcttaaggtgtcaacaagtgagttatataatatcttaaaaaaaaaaggttatgccaaggatttctcaaaaatatgataacttaccgccattatctgctctaaataaatcttttgccgaacgaaatcttgaaaatgagtgtcgctcggtcgactcattcaacgttgatgctcgttgccaagttgaaatatgttgacggtatcataaaatcgcgcctcgtagaacaatggcgacaacggcaacaaattttattacccacagtcaacggtaaaatgaaggtccgggatccgcccaaaactttgggacaattcaattgaaaacgcataaaggtttatgagcgtgtaagcctttgctgccttctcggagtttcagtttcagcaaaattgggcgtgcccctgcccccgattttatctaagtgggtgcttgtgtgttgttataggcagcattacgttaacctttatgacagcaaagaaaacatataaaattccgcaccgaaacgctgacacttttatggttcgcatcgaagagtgcgaggggtttttgaggctggttcatgcaaggcaagtatatggaatactttaataaacaataggttcagtgttacgagataagcacgatctactaatataaagttgaaaataaatattaaatttaaatttcataatttaacataagcataaagaccttgattcattaacaaatatattttatggtctgtcctcaattatgtgatttaaagagatggcggctactgaaataaaatcatttgtaagctttgtcattttgttcttagaatgtacttacgaggtcctagacattccgtagaatgaatcttaaatcgaggcacatatcaaatatcgaatctttttcgctaggcattaaaaatcagcttgtaaacaaccagaaaacgcaaatgggcgggtcgtgatggcgacctttttagaatcatttttgggcacatacacgtttgataggttttatttgtctttttattgaaatttattatttgatttacatgcctttaagtgacagggacgaacggaggcgcagaagcacattgtggcatttaaattccgggggttgttttgccaatctgccaataaatgtgtgtgtgtgtgtgtgtgcgaatttggtgtttgcctttaggccataaatcacattcgaaagccccggcataaaagttgcaaattaggctcaaatgttgacatgtcgattaatcaaagtgcaaggcgcaaatgcagcaactaattcgataagagcgcccaaataggagttacccaattcgaaagggggaagaattggtcgagagatactaaagtgggccatgaatcattcataagcgccgtttacactcccaaggactccaaattacgttgattaatgagttgaagttggtgcccagcccctttggactgtcctaatatctcgcccatcgccgtttgcagtctggtcacgcacttggcgcagaccaaggtaggtacagtcgcggtcaagatggtggcatcgcaaatatggtagcgcattgtgtaatggcggaagctggaccctttttgtatatctaaattcaaaacatcagattaccaaactgaagtgatatctttgcacatctttggtcggcttaattgctgatctattaaatggttctgccacgttgacacccgttgtacagttctcaaagtccggattcggttggtaattgagtcggcgagtggcgatgggaacgggatagggtcacttggagcaccgaaggaaactaaaaatcagcaaagataatccgttcggaatgctcagaggagcgcatgaccgagcgccggatcgaatggaattccccaccagatatcgcccccgcatctggtccaaattaaaagtaaaaaggtcataaattcctgctgggactcgatggatggaatgtgggtgtgatggcatggggtgttcggaccgatatggcgggttatttgaatgttctaccgcatgaatggcataaataataaacctgctgcatacttcttggcgccacacacgcacacacacacacacacgttcacaatgtcaaagcacacacaaccacaaacgcatacacaatgcgaaagcgtttgatgatttccagctgctcccttgtgtcgtatgcgtaatatttgtttaatattaactggcacatatacatgtgccacgcccccaggcccacacacataacgcccacatgtgccgaatgacccgcaatttcctacacaactccctctcccaactgccgtgtcctttttggcattgtttttaaaggctccggccaaattccgtagggtttttgttgccgaaccgagttttggatcaataagtttaatgtgttgcgaacggcaaagtttaaattgccataaaagctggcggccaacgtaggtgaaaccaaaaagtgaataaataaggacatgcaaggcgaatatgtgtatagtagtgaaggcaagtgttcgtccgactgaatatttcaggcatgtgaaagttttcagactaaggtgacacttcaaagtgcagccgaaaattatcttcaacaagttgccttaggtgctaggatcttcattttgctcgctattaaggggcaagtgcagttttaaatactcaaagtgattagatttacagattttttttccattgagcaactatttaattgaaatatttaaataaaattagaataagccacttacacagtttgtaatagcatgaccacttcaaagtctgtagctaataaccatatccatgtaagacttcttgcttctttgcatttttcgattactgaattttgctccaaaatgcttccattttacaaactttttgcttatggcactcgcgaggcgtttcccatctgaaatcccattgagttactttttgtggcgcacggatatgcaggcaaacttttctgagaagagctcggattattcgcagagttaactgcacatcaggttgaccgagtatccgagcatccgagcatccaagtatctaagtatctaagtatccaagcattcagccggagatcaaatctctggcaaatgtggtactaacgcgggtcgagggggaaatgtaccgccgagagataactgcggagcataaagaacttcaaatggagattgagagatacgagcacgagatgcatagcaaaatggggcataacccaaaacgaaaaaaaaaaaacaaaaatccagtgaagagaaggaaaaccgccgacacacgccgcaccacgccacgcccacctatccagccgcccactttcttttgggcgagtggcagccatttggcagtacataactttcactaacctttagcggcgttttcagccaagagagcacattaccgttagcgactacagtaactgcactttcacacacacacacacactgacacgcacacaaacactaacgaaacttctttgagaaccggaagcgctaaagcagccattttgctgcttcccaaaatggtgacgaaggggaatgcgaagaatacggcggagagagagagatgcggaagaagatggagaaggagagaaggcagcaaagaaatcccaatttattagcattgaacaagggaagagaacaggaaaggctcaatggaggatatacactacaaaaattacaagatagattaattggaaatgtgtagacaaaaacaaatgatacaacaaataattaaatactttttagagtactttaaacgaaataacgagtttatttaacaaattctttgagccaaaattctaaatatgccgaattcacttaaattggatgtttgagactttaaataggaaactatcctgtctttcaatatgaaacccatgattttaaaggaaagtttttgcgctcactgcacgtaagaatttccgaaagtgtctgggggacaagttgggaatttccaattttagttacgaccaaccgagatttcaatcaatgtccttgaactaatgacacaatttgttgtttactttggccagcatttgaatttgagatttctgttcttccccatttctcattttttttttcgtatattctcctccattcccgatgtcactttgcatttatccaagctaactgtttttgtagccatccttgagttttttgaccgctgttctcttgctcgaaagtcagaaattgttttacgatgaataagaaagtaaacaaacgtgtagatgtcaaatacacatggttttcttttttttttgtcttgtattatttttttttattctggttagtggggtggtgcgagttcttagagggttaggagtacatatgctctggttacgcagcaggaaagaaaacaatttaacgcaacggtagataaacttttcttaaacaggctcaggacgactcctaatggccttgggcatatctctgtgtgcgtgagcgtgtgtgtactttttgttttttttttacttttattgttgttcgggcttaaccgaaatgagctttgaaaatggtttatgcgccattttgtgtgtgcgccgcagcttatggaatgattttaccccatccttggctaaatgtatatacgtatatctcattttttgctcctttgtctttcagaacccgtcaccgacatcatcggcggccccgagctgcacatcaaccgcggatccaccatcaatctgacttgcattgtgaaattcgcaccggaaccgccgccaaccgtcatttggtcccacaaccgcgaggtgagtccacaaaaagccgtcacaaaaacgtataaataccgcgaaaccgcaacgaaaccacttgacatgtgcacgtctttgcaaggctaacatattcatggctaaccccaagtaccatataatattatataataatacgggccacaatacgggccgcatcaataattacgtttgataagggttcttcatgcgaaggatgtctcttggatttttacgattattagtttcagttctggccatgttttcttcaaaagtacagactcttaaacgatacactaacagtaccttttcggaacttctgtttgccttcgtcatattgaattaaacactctaactactttcaaagtacttttgccttttgcataagagtccgtccgaactaaattggtatgtatatagtacttaatgctagtaatgtaacgacaactatttaatttaaaattcgtactgataccattaggttcagaaaagcctaaaagttccaagttgaccaagaaatatttacataagtcccataagaccctcccaagtacagcatcactaacaaggtacaaaatctttggtcaaccacaatctcgttggccactttttctccattttttggctatgcaaatgtcaaggaaattctgttgccggtttctattttttatgtttctgttatttttcgggagttgctggcgaaataagaaatttcccctagcataacgaagctttgaagctaaagcgcaaccggcttgactaacacgttgtcattaataaaaatttaactaacatgctctgcgcccagcatcccgaaaaggaacacaaacgcaaacccaaatattatacccacaacaactgcgaaggtaacaatctagcccagctacctgggaaaaatgaattcaaaaaaaaaaaaaaaaagaacgttgtgtgtcctggcacttaagctgtttgccttcccctccgtcggcgttatttatttcagatcataaatttcgattcacctcgcggcggcatatcattagtcaccgagaaaggtgtgctgaccaccagccggctcctggtgcagaaggccatcacccaggactcgggactctacacatgcacaccctccaatgccaatccgacgtcggtgcgcgtgcatatcgtcgatggtgagtagcccggtatgcaaaacgctttggcttgcctaaatatgagtgttgtccttgctctccggatgtccttgcacttagaaaggaaaccgggtgaaatcatagataatctctaagctactgatcagaatcaaagctagaggtgagtcaggaaatagctaggctgtaaggagcaaaagagctatgtggtagcttgctttctctgcactttatcctagtagtttttctctcagtgcagggcttagctggcttgtgggtcaggggtcactttgcgaatgggcacagcacagcaagacaaatgtgcggcccccaaaagtcaactaagcttgtttggctttatttgacagacgagcgcgtccagtgattgacgacaactttttctaaaagccgataaagtctggatgatcgcatggatttttggaaggaaaatcgccgggggtgcttgccaacaattagccggcaactttgcgtatgagcaatatgctttttagtttggtgccccaaatgaatgaaaggatgaaaatcgatgtagcacaaagtttaaacgatatgaaaacttattcgtttcaatgtcgacttaaagaattgtttatatattatgctaaagattttagcgcttgattttataatacaacgtatattggtttcaccatggctaatttgtgtgatttatgaattcataaatgcttgaatctattggctacgcaagttagatctccgcaatttgttgccatatctcaaatttccacacacacacacctacactgaaacgcacatggtaaagtcaaagaaaattagttaggaaaaactttgagcatcaacatttgcgcaagttttgactcgtttatgccgcagacgcctttctctttttcgccggaggatttccccggcttttggctgccactcccccttttcagaatttacacccccctccccccccatcgaacttccgcccaacgttcgccgcttccgctgaggccggaaaaaagcgcttacaaagcaaaaagt

SEQ ID NO: 11000 - DNA, 732 bp, DROSOPHILA
atggctggtttagtagttaattgtggagcagttagtcggaaaataagctgcacggacggcgcctcgaagcgcttcttcacagacttcctgcaggacctgccaacgcccggaaccggaggacccactttcgacacgaccattggcacgaacatcacaggactcgttggcaagacggtgaagctgacctgccgcgttaagaatttgggcaatcgcacggtgtcctgggtgcgccacagggatatacacctgctgaccgtcggccgctacacatacacatccgaccagagattcgaggcaatgcactcgccgcacgccgaggattggacattgcgtatacgctacgcgcagcgcaaggactccggcatctacgagtgccagatatcgaccacgcccccaattggacactccgtctacctcaacattgttgaacccgtcaccgacatcatcggcggccccgagctgcacatcaaccgcggatccaccatcaatctgacttgcattgtgaaattcgcaccggaaccgccgccaaccgtcatttggtcccacaaccgcgagatcataaatttcgattcacctcgcggcggcatatcattagtcaccgagaaaggtgtgctgaccaccagccggctcctggtgcagaaggccatcacccaggactcgggactctacacatgcacaccctccaatgccaatccgacgtcggtgcgcgtgcatatcgtcgatggtgagtag

SEQ ID NO: 11001 - protein, 243 aa, DROSOPHILA
MAGLVVNCGAVSRKISCTDGASKRFFTDFLQDLPTPGTGGPTFDTTIGTNITGLVGKTVKLTCRVKNLGNRTVSWVRHRDIHLLTVGRYTYTSDQRFEAMHSPHAEDWTLRIRYAQRKDSGIYECQISTTPPIGHSVYLNIVEPVTDIIGGPELHINRGSTINLTCIVKFAPEPPPTVIWSHNREIINFDSPRGGISLVTEKGVLTTSRLLVQKAITQDSGLYTCTPSNANPTSVRVHIVDGE

SEQ ID NO: 11002 - DNA, 3044 bp, DROSOPHILA
cggaataaggcacatagaccccgatgggagctcaattggagcaaggccactggcctgcggctgccgcccacggtgatccactcgcaatcgaatccaaggactttaaaagtctggcagtgactaagaggcagaatatatatatatatttccattgtcgtgaaattaaagtggtttttacttacttcttcagttcattcaaaacccattgcgtggtcggatcctggacggagttgatcacttctatgcgtcgctggggcaccaggctgccgaaggaccagacgcgacgcagtggacacagcagtcggtgcctgtgccgcaccaggacgtataccaagccaactcctgcggccagaatcgcccaatttcttttggtggcgactgccgattcccgagtcattgttctcctttcggagttcagcagctgattggctggcctgccaacttacgttttcacaaaccgtaaaagccggtctaaacaagtttcggaatatttataaccgtaatttgaatgtgctatgccaaaatagttttacagttttaatacattttaagcaaaacttgtttcaaatcttttaaaagttcataaaaatatatcgaaataaaaccgttaaacatgacgagtcgtttaaaaaggtggcattgttggctggactaagatcttcggggtggcaatactggcccacagggttttccggaatctccattcgcgaaaagaattaaaaatgtttaattaaacgcagtcggagcgtgcaaacaatgaataaaactcagtgaaactggcggcggggaaacgatgtgccattgaaaacgcagaaaaggcggcagcagacagtgacacagcgcgtaaataaggaaggcaatcgaaagaaatcgatttttcagggcaggtgggctaccattagactccccacactcatgcacacatattgatgcaaatcccatttgcaggatgctgaaactttgaaggaatccagaaactgtagagaagaaaccccacagaatgccggaaaacctcgagcttcagcagttccaggagggcgccccgcccccagatcccgccccccgttggctggagcgcttgcagcgacgattgggcgccgattgtccctacttgggtatcctgctggccacgctctcctcgctcttcttctccctgtgctcggtgattgtgaagggactggtggacgtgaaccccatggagctggcctcgtttcgattcgtcggagtcctgttgccggcactgcccatcctgatatacacgcgacagccggtgtttccggagggcaagagggtgatactgctgctgcgctgcttcatgggcacaacgggtctgatgctcagcttctatgccttccgacacatgcccctggccgatgcgagtgtcatcatcttctccacgcccgttttcgtggccatatttgcgcgtgccttcctcaaggagccgtgtacgctgttcaatgtcctgaccatcaatatgacattgctcggcgtggtcctcatcacgcgcccaccctttgtgttcggtgacacggcggagagtgaggatgtcgctgggaagacgtacgacatctggggaccagtggccgccatatcatccacactcttcggagccaatgtgtacatcctgctgcgggcgctcaaaaacctgcacttctccgtcatcatgacgaatttcggtaccatcgctctggtctacacactgatcgtttgcgcatctattggagctgtgtgctggccaagctgcggacgggatcgttggctggtcgttgtactgggcgtattcagcttcctgggccagatcctgctcacgctatcgctgcagatcgaacaggccggaccagtggccattgctcgctgcgccgacatcgtcttcgccttcgtctggcagatgctcttcttcggagagacgcccaccgcttactcgctggtgggtgcggtgatggtgatgggatctgtggttctgacggccctgaagaaatgggcaggcaccctgccacgcgagtcgtcgctgcggaagcgattcaggctcatcctgctggaatagtgtggttccagagcaactaaaagagttcgcggtttctccctcgtcttgtcacatcgttctcacccaatcccggcaagcatcagtggccggcagcaaacccggttcattcatcgtagactctacttatatcaaggctcagatcgtagattaatcaaaatatataagaagggacgcgtgatatccactccactcataagtaaatactcgtagtgcgtgtttagtttagccaatttcgccgatttgttgttttgtacattgttatacatgcttaaaatacggtaataaatacaacttatgaataaaataaaaacaagttataatttgcatttgaatttcacgctcttctacatgcaaatttgcactacatttttatataattcatttaaatagttataaataaacaataaaatttcaaatctacagcgacacaacattttacattactttgtaaaaattccgttacatgtagaatacagacggcgcgacatcgatacatacatcgacatcatacatcgattgcagaattaattttacatccacctctagtttttcgtttgtttgtttgtttattattgtttatgtttatattctcgaagcacacacactcgaaaaaacagagcaaggaacggaaacagaaacggaagacaagctgagggactagaagcccaaatcggcaataaccgcgtccagttcgtcctgcagattggtggcccgcgatcgcacctgcacaatttgatcctgcaaattgtcgacgttcgcctggagcagcacattgcacttcttcatcgccgcgaaccggctctcgtgcttcttcacgcgcggctccacattcgccttcttcgcggagttgggcgagtcctgcggaatacggtacaggtgagctggctaaatagtttacgattctctggggctaactcacctctggctcggactcgctgcccgtctccgcctcactttcctccgattcggactcctcggactcgtcgtcggattcctcctc

SEQ ID NO: 11003 - DNA, 1044 bp, DROSOPHILA
atgccggaaaacctcgagcttcagcagttccaggagggcgccccgcccccagatcccgccccccgttggctggagcgcttgcagcgacgattgggcgccgattgtccctacttgggtatcctgctggccacgctctcctcgctcttcttctccctgtgctcggtgattgtgaagggactggtggacgtgaaccccatggagctggcctcgtttcgattcgtcggagtcctgttgccggcactgcccatcctgatatacacgcgacagccggtgtttccggagggcaagagggtgatactgctgctgcgctgcttcatgggcacaacgggtctgatgctcagcttctatgccttccgacacatgcccctggccgatgcgagtgtcatcatcttctccacgcccgttttcgtggccatatttgcgcgtgccttcctcaaggagccgtgtacgctgttcaatgtcctgaccatcaatatgacattgctcggcgtggtcctcatcacgcgcccaccctttgtgttcggtgacacggcggagagtgaggatgtcgctgggaagacgtacgacatctggggaccagtggccgccatatcatccacactcttcggagccaatgtgtacatcctgctgcgggcgctcaaaaacctgcacttctccgtcatcatgacgaatttcggtaccatcgctctggtctacacactgatcgtttgcgcatctattggagctgtgtgctggccaagctgcggacgggatcgttggctggtcgttgtactgggcgtattcagcttcctgggccagatcctgctcacgctatcgctgcagatcgaacaggccggaccagtggccattgctcgctgcgccgacatcgtcttcgccttcgtctggcagatgctcttcttcggagagacgcccaccgcttactcgctggtgggtgcggtgatggtgatgggatctgtggttctgacggccctgaagaaatgggcaggcaccctgccacgcgagtcgtcgctgcggaagcgattcaggctcatcctgctggaatag

SEQ ID NO: 11004 - protein, 347 aa, DROSOPHILA
MPENLELQQFQEGAPPPDPAPRWLERLQRRLGADCPYLGILLATLSSLFFSLCSVIVKGLVDVNPMELASFRFVGVLLPALPILIYTRQPVFPEGKRVILLLRCFMGTTGLMLSFYAFRHMPLADASVIIFSTPVFVAIFARAFLKEPCTLFNVLTINMTLLGVVLITRPPFVFGDTAESEDVAGKTYDIWGPVAAISSTLFGANVYILLRALKNLHFSVIMTNFGTIALVYTLIVCASIGAVCWPSCGRDRWLVVVLGVFSFLGQILLTLSLQIEQAGPVAIARCADIVFAFVWQMLFFGETPTAYSLVGAVMVMGSVVLTALKKWAGTLPRESSLRKRFRLILLE

SEQ ID NO: 11005 - DNA, 6233 bp, DROSOPHILA
aaaggccggcttatgctgttctgggcattcacgaattcctcggtttccgtggagtccggatcttcgagccagcggtacacatccttgatctgggtgccatgaaagtcctctgccacgctttcatccttccgagcaactggatacgcgagcttagcggacaaagtacttggcatggctctggtaactttgttggatttattacacgtatgagaatatatgtattaatctttcgcttttcggcttttgcaactcatccccattagctatatatatatatgtgtatacttacgatttgaaggcaattctcgatgaatgtaatttctgggcagcgttttgggtacaactatttgacaaattcggcggtagagcagcggtcctcgaaaaatggtatgcatttgcaaaattatcaatgcaaaaatgggacactaacttgcgatagtttcgataggtgttaggggcactccttaaattttgctactgcgaactatatatcgccgcctccttataactaatttaaaaagaaatttctcttgtaattttacatattatattattatttatttaaatatttgaatgctcaaaacgagatgctatgacagattttgaaaaacattttaatatataggtaaacttagcaactgttagcttttatttacgtattcgtgttgaaatcaatcttgattaaatcttaaaaccactgtttaatttaactataaaatacaataacaactggtgaagcaatataaaccaagttcctttagtcggtacgaaatgctgcaccaaggtagtagctttattcttgaaaatataccgcacacgtatagaaaataccattgctttagttttagaaattcatgcaagagcacccccaataaaataccgcaaatgtcaggtgtgacacagccaactgtggctcgaaattaatcggtccgtgaacagattacctctgttaaaccatatgttttggtatcgggaggcgagtcgagtcggaatataaacacaatcgaatcaagtcaaacggaccgagtaaatgaattgaattggaattccgcgctgtttttagttcgtttaatttgttagccaccagtaagcgctttatttgttcggtatgtagctttgcttgaacttttcgtacatcaattgtgctgggaaatcgaagttttcacaaattttccttccatatgtatgtttttcttgatcagcaacttgtaggcgcatatggatgtacctaagcttgtatgcataaacaaacattttgaatgtattaacttagctaactagttattatgttgatctaaaaggtaatacagaacttattcagttttatacagtgcagttggattagtagtattagttcataacaatgggcgattttctacgggtttcctatgacatctatttattttcgctgagttaacaattttgttagaagtgaccttgtaactaaatattttgttgagtatttcataaggtgtatgacttaagcacggccttctagataatatccgggtgttaaatatattgcgaatttaatttaattcacattaattgttttcagattgcaatatgatttccgaagtggactccataaataaggatagttcagtacgtgttgctgtcaggtaagattattacaattcaaaaaacaataactatgaccataaaagagcttgaaattctaaaagtttaaatttgaatatctgttaagtgcgcctaaaagcatataatattgtatattttttcagaatccgacctcaaaactcgagggagctaatagatatgtgtcgtatctgcacgaccgtcactcttggagagcctcagatttttcttggatctgacaaagcctttacgttcgactatgtttttgataccaattccaatcaggtaaagttgtcatactaatttccaccttgtcttaagtttcattagcctttattaaccatttcagtgtgatatatactcggactgcgtggaaaaattagtagatagtaccctccatggctataatgccaccgtactcgcctacgggcaaacaggatcgggaaaaacgtatacaatgggcactggtttcgaccacgagtcggagtcatccgattccgttcagcttggcattattccacgggctgttcgtcatatattcagtggtatcgaacaactggagggatccagcacttcagaacatccagcggctggtggaagtccgcagttcagtttggctgttcagtacatcgaattgtacaacgaggacatcttcgatctgctggacccgttcaacaagaacagcaactttaagatacacgaagatgccagtggacaaatcacaatatctggggcatcgataaaacccatttatcaaccgcatgatgccttaaagtatgtataaatggtagagattaataaaacataccttctaaactaaatatttatattttaggtaccttcagcaaggagcattagctcgcaccactgcatcgacaaaaatgaacgaccagtcatcccgctcgcatgcactgttcacgatttttgtgcgcagacagcgactgctcacccccagtgataatgttccggataacgacctggagaccctgacctccaagttccatttcgtcgacttggctggttcggaaaggctcaaaagaactcaggccactggcgagcgagctcgcgagggcatatccataaactgtggacttctcgcactgggtaattgcatttcggcgctcggcgacaaatcaaagagggcactgcacgtgccctatcgggactctaagctgacgcgacttctgcaggactcactgggcggaaatagtcagaccttgatgatcgcctgcgtgtcgccaagtgatcgagacttcatggagacactgaatacactgaagtatgccaacagagccagaaatattaagaacaaagttaagattaaccaggaccagagttctcgaaccatttcgcagctgcgtagggaaattgcagcattgcaattggagttattagagtataaacaggtaatgtgtttacttaatcagggctcgacttaatttctaacttaaaaatgtcattttttacagggtaagctgatagtggactgcgagggtaataccaccatttcggatacatttaatgagaataagttgcttctatcggaaatcaaaaggcttcagcaaagactcaaatcgttgcaaagcacgattgccactttgacccaaaggaatgcagatctaaaaaccaacttggatttgaataagtggactagtgacgacaattccgatgttgaaatagcgaaagttgtaggtcaatacatgctggaaatcgaagaacttcagaccaaactaatagaatctgaggagcatcgcaagcaaatggaaattaaagccactacttcacctagaaacgcgaaacccgtttatgatagtaggtattatatgatatgatatattttaataacctaatctatgtattccaattgaaggcgacatcataaccaaggctaaaaaggatttggaaagagaaagagagcttctgatgtcgcgctcgttgccaggaattcaaaatcagaatgtcagctctgaggaaactgaagtggccagtagtgattctgagggtaagataaatattgaattttgcgcaaattaaatataagttaataatcacacagcagaggaagtggtaaaggatttggaggccatcgataatgatattgagatgagaaccaaactaattgaacaattggagctgaccaactcgagatacgaacaaatgcgaacccattacgaggaaaaactatctgttttatattgcaaaatcgagaacacgcaaaaagaacgcgacgatgtcctggcgaatatgagtaagcaattgaaacaaaagagcatatcttttataatgattaacgactacaatgatattgcagctacatctgtgtcaacgccctcgaaggatagcttaaaaaaagtgaaaactgactatgaaagcaagataagccatatgcaaacggagatcagaaaattgcaaaacgcgcaaagggaacatattcgaagtaagcaacaacttaagtcccacgaagttaggattggcacgctgcgcaatgagctgaatgagttgaagttcgcaaaagtaagttgatgctgatttgaaatctgtacaaattacaaaccctatctctcctaattacccaggttaagttaatgaagaagatgtcacaacaatctaaccgacacaagcaggaggaaagtcgcaaatcaaaggaaattgctcagctgctgaaggagcagcgtcgtcagaagaacgctgttctaactctagaggccaaagtgagtgctaaggagcaaattctgaagaggaaaaccgaggaagtgattgcccttcgcaagagccaaaggggaaagtccggccagagggcaccggctcacttaacatcgaaaattgcaacccttgatgggttttccactcgatccgcacgacatagatgggaaaatctgtaccgcaacatattgcatgcggccagaaacaggcaactgatcacgcaactggagaaggagctggaacgtttgatactggagcgcgaagatctctctcgtgagctgaacataatggaaaacggacaaactgctgacaggcaaacggatgaattcaacgaagttgacaatctcaaaacaaacataagttatattcaggagaatatagagcatgtgcagcaggccataatggagttcgaggacacaaaggacactgtgcagagccatgtgaataagatacaaagtctgctggacgaggtatcaaccgtggcggaagccaaattcatcttacaaaagttctccgacaccgccattgtcatgtcgtgcaatttggccattgccgaatctcatttgcaggagaaggaatcgctgctgaaggaagttaagcaagagagcggcattcagcagcaaatactgcagcatttcctatcgcaaaacagcaacgttcatatagcagacatatttgactccttaaatctcaagggcagtaatatcgcaagtagtgtaaatccaggttcacaaaagtctttgatcagcaacgccacatacgacatcccgcaagacgacaagaattccgagttccatcaagtggaaatgcgcaggacgacgagtagaagtccttcgcctctaggaaattccgatccgtaagactgattgtatttcatatgttttggattaactctaaacaatatatattcttccttcagcttcgataagagccccaaagtgcgcagacgtaccgccaagcgacaagatctgctttttggggatacggaactttcagaacaggtgagcgttactcattttgaaaaatacctgtttctaaatgacgaatattatgatttcatccgccagacttttaataaaatgacgtgatcgtgcaatcgaagatgaggtcatgtgaccaaagacgcggttggaattgaaatatattgattggtagccgcttgggaacaaataataaaaagacagtgtcaataagtttctaagttattattgtaactatatttattcaaaactaacttactagtgcttccgtttgttttttttgaataccgagctaaggtcttgtgcaattggtgtctttgcagttgttcaaaataaacaaattttagaaaatattataataatgtattaataaattttataagagacttagaacaataccatgccttgaaatatacaacaaaaaacttaattttatcttttcctgtaagaacaaagttcttcagcagctttgtgctaggtactaaaatgttgacccaagttttggagatcctatattttacagtaaatgtaaatgaatcgatttaaaagcatattctaataataaaaatatatagtattggctaacattgtgacccttattaaaatattgaaaaattcaaaaagtgtaattaggacaatgtaacaataaactgtataacgttatattgaaatttacaaaatgacttttcttttgtggttaaataatattatttttaatacatatttgtaaatagattcgtttgtaaaattttgaacttgatagcctgcatgtgataaaaataaatcgatagtcgaatgaccccaacaagtgttttcgattaccatttactcttccgctatcttgacattcatcgagctatcgatttttaccggtaattcgcatttgcaactcgcttccatgcgcattttattgtattaaatttctaccaatatatcaaattatagttatgt

SEQ ID NO: 11006 - DNA, 3197 bp, DROSOPHILA
caatcgaatcaagtcaaacggaccgagtaaatgaattgaattggaattccgcgctgtttttagttcgtttaatttgttagccaccagtaagcgctttatttgttcgattgcaatatgatttccgaagtggactccataaataaggatagttcagtacgtgttgctgtcagaatccgacctcaaaactcgagggagctaatagatatgtgtcgtatctgcacgaccgtcactcttggagagcctcagatttttcttggatctgacaaagcctttacgttcgactatgtttttgataccaattccaatcagtgtgatatatactcggactgcgtggaaaaattagtagatagtaccctccatggctataatgccaccgtactcgcctacgggcaaacaggatcgggaaaaacgtatacaatgggcactggtttcgaccacgagtcggagtcatccgattccgttcagcttggcattattccacgggctgttcgtcatatattcagtggtatcgaacaactggagggatccagcacttcagaacatccagcggctggtggaagtccgcagttcagtttggctgttcagtacatcgaattgtacaacgaggacatcttcgatctgctggacccgttcaacaagaacagcaactttaagatacacgaagatgccagtggacaaatcacaatatctggggcatcgataaaacccatttatcaaccgcatgatgccttaaagtaccttcagcaaggagcattagctcgcaccactgcatcgacaaaaatgaacgaccagtcatcccgctcgcatgcactgttcacgatttttgtgcgcagacagcgactgctcacccccagtgataatgttccggataacgacctggagaccctgacctccaagttccatttcgtcgacttggctggttcggaaaggctcaaaagaactcaggccactggcgagcgagctcgcgagggcatatccataaactgtggacttctcgcactgggtaattgcatttcggcgctcggcgacaaatcaaagagggcactgcacgtgccctatcgggactctaagctgacgcgacttctgcaggactcactgggcggaaatagtcagaccttgatgatcgcctgcgtgtcgccaagtgatcgagacttcatggagacactgaatacactgaagtatgccaacagagccagaaatattaagaacaaagttaagattaaccaggaccagagttctcgaaccatttcgcagctgcgtagggaaattgcagcattgcaattggagttattagagtataaacagggtaagctgatagtggactgcgagggtaataccaccatttcggatacatttaatgagaataagttgcttctatcggaaatcaaaaggcttcagcaaagactcaaatcgttgcaaagcacgattgccactttgacccaaaggaatgcagatctaaaaaccaacttggatttgaataagtggactagtgacgacaattccgatgttgaaatagcgaaagttgtaggtcaatacatgctggaaatcgaagaacttcagaccaaactaatagaatctgaggagcatcgcaagcaaatggaaattaaagccactacttcacctagaaacgcgaaacccgtttatgatagcgacatcataaccaaggctaaaaaggatttggaaagagaaagagagcttctgatgtcgcgctcgttgccaggaattcaaaatcagaatgtcagctctgaggaaactgaagtggccagtagtgattctgaggcagaggaagtggtaaaggatttggaggccatcgataatgatattgagatgagaaccaaactaattgaacaattggagctgaccaactcgagatacgaacaaatgcgaacccattacgaggaaaaactatctgttttatattgcaaaatcgagaacacgcaaaaagaacgcgacgatgtcctggcgaatatgagtaagcaattgaaacaaaagagcatatcttttataatgattaacgactacaatgatattgcagctacatctgtgtcaacgccctcgaaggatagcttaaaaaaagtgaaaactgactatgaaagcaagataagccatatgcaaacggagatcagaaaattgcaaaacgcgcaaagggaacatattcgaagtaagcaacaacttaagtcccacgaagttaggattggcacgctgcgcaatgagctgaatgagttgaagttcgcaaaagttaagttaatgaagaagatgtcacaacaatctaaccgacacaagcaggaggaaagtcgcaaatcaaaggaaattgctcagctgctgaaggagcagcgtcgtcagaagaacgctgttctaactctagaggccaaagtgagtgctaaggagcaaattctgaagaggaaaaccgaggaagtgattgcccttcgcaagagccaaaggggaaagtccggccagagggcaccggctcacttaacatcgaaaattgcaacccttgatgggttttccactcgatccgcacgacatagatgggaaaatctgtaccgcaacatattgcatgcggccagaaacaggcaactgatcacgcaactggagaaggagctggaacgtttgatactggagcgcgaagatctctctcgtgagctgaacataatggaaaacggacaaactgctgacaggcaaacggatgaattcaacgaagttgacaatctcaaaacaaacataagttatattcaggagaatatagagcatgtgcagcaggccataatggagttcgaggacacaaaggacactgtgcagagccatgtgaataagatacaaagtctgctggacgaggagaaggaatcgctgctgaaggaagttaagcaagagagcggcattcagcagcaaatactgcagcatttcctatcgcaaaacagcaacgttcatatagcagacatatttgactccttaaatctcaagggcagtaatatcgcaagtagtgtaaatccaggttcacaaaagtctttgatcagcaacgccacatacgacatcccgcaagacgacaagaattccgagttccatcaagtggaaatgcgcaggacgacgagtagaagtccttcgcctctaggaaattccgatccgtaagactgattgtatttcatatgttttggattaactctaaacaatatatattcttccttcagcttcgataagag

SEQ ID NO: 11007 - protein, 1003 aa, DROSOPHILA
MISEVDSINKDSSVRVAVRIRPQNSRELIDMCRICTTVTLGEPQIFLGSDKAFTFDYVFDTNSNQCDIYSDCVEKLVDSTLHGYNATVLAYGQTGSGKTYTMGTGFDHESESSDSVQLGIIPRAVRHIFSGIEQLEGSSTSEHPAAGGSPQFSLAVQYIELYNEDIFDLLDPFNKNSNFKIHEDASGQITISGASIKPIYQPHDALKYLQQGALARTTASTKMNDQSSRSHALFTIFVRRQRLLTPSDNVPDNDLETLTSKFHFVDLAGSERLKRTQATGERAREGISINCGLLALGNCISALGDKSKRALHVPYRDSKLTRLLQDSLGGNSQTLMIACVSPSDRDFMETLNTLKYANRARNIKNKVKINQDQSSRTISQLRREIAALQLELLEYKQGKLIVDCEGNTTISDTFNENKLLLSEIKRLQQRLKSLQSTIATLTQRNADLKTNLDLNKWTSDDNSDVEIAKVVGQYMLEIEELQTKLIESEEHRKQMEIKATTSPRNAKPVYDSDIITKAKKDLERERELLMSRSLPGIQNQNVSSEETEVASSDSEAEEVVKDLEAIDNDIEMRTKLIEQLELTNSRYEQMRTHYEEKLSVLYCKIENTQKERDDVLANMSKQLKQKSISFIMINDYNDIAATSVSTPSKDSLKKVKTDYESKISHMQTEIRKLQNAQREHIRSKQQLKSHEVRIGTLRNELNELKFAKVKLMKKMSQQSNRHKQEESRKSKEIAQLLKEQRRQKNAVLTLEAKVSAKEQILKRKTEEVIALRKSQRGKSGQRAPAHLTSKIATLDGFSTRSARHRWENLYRNILHAARNRQLITQLEKELERLILEREDLSRELNIMENGQTADRQTDEFNEVDNLKTNISYIQENIEHVQQAIMEFEDTKDTVQSHVNKIQSLLDEEKESLLKEVKQESGIQQQILQHFLSQNSNVHIADIFDSLNLKGSNIASSVNPGSQKSLISNATYDIPQDDKNSEFHQVEMRRTTSRSPSPLGNSDP

SEQ ID NO: 11008 - DNA, 2926 bp, DROSOPHILA
gtatcgttctctctagcaaattctttaggtttataattaccccttcttcacgcacgcttttggcctcgacaattgatcctactttttcttcttggcctgtggcggtgccgccggattgtcgcccttgtagaaatcctttagcagagccatcgcctcatccgcccgcacaccgcccgtgatctcgatcctatggccaacgacggcggccacatccacgaccgtctttcctccgaaacgatcgttctcacagccgtagatgatctccttgacgcccagagtgtgcagggcggcggagcacataatgcagggctccacggtgaccaccacggtgatctcgctgaacagctggcgggccggcagacgtctctcgcggcagctggcgaggatagcgtcgatgcaaatgaattccgcgtggcgagtggcgttccggtggacgttcacctcgttcccgccacgtgcgaccaccttgtccccatgaacgaacacacagcccacgggcacctcgccggcgtcacgtgcccgcctcgcctccactaacgcttcctccatgaaggcggccatttggcatggaaatagactcgggcgaactgggtgaaaagccgcaaacagatgagatgaaatgaccaggtcaacaaaaacaatgggtagctctcactcaggcggcactttccagcactgcgcaacagctggcggtcacggtgagcggtcactgtacgagcggtcacggtgggaaagcgaagtcaccttttgtatttggggtattccccgcaaataaataatatctcaaaataaaatagagaattctgtttcaatagaatactgaaattattaataatgtattctcttttgccactcacttataaatgtagagctttaaagttatagtatgtgcagtaatatccttatatatacatagaatgtatttgtacagatacagatatgtaaatactatctaaataattgaccatttttgcttcaagcctcattccgcatgaatcggattaggttgtgctcctccaaaaatgcttgagccttctcgggccaattggtattattagtagaacgcggactaggatgcggcagtcggagcaccgaaacgcaattggatttggcatatcctgaacgcttcagtgcgctgtgaacatactccccaacggccacaatcacgtcgggttggaggagcttcagttgttcctccagggtgtgcaggcacaggtctcctagctgatttttgtaagctcctctgatttcactgggcgttatgttcctgccatctgcgccaaagaaagctagcggacagaaattgtggacgaaacactgctgggagaaggtctgcatgctgccagccagtcggaggaacagctcccacaaacgcacaccactgggctcctcaatccgacaatccaagccagcgactggacgtttgggatgcacgactggaggttggtccaccgaaccagccagctgcattaacaactttactgtgcgcacattgccaaagggaatctgaagcagagcgcgtcaatgtatcaatatgttcggataatctacaagattaagctcttactccggtttgggccattccattgggccctggattcatgccaacaaataccagcttcttgggaccgtccatatagcgacgtaaatagtcgcagtgcagctgggatgcatatactatcgggttgtagatgaacggtgtgctctcaggaggattcagtttttccagcgcctcatttaacttgacttcggtttcgtagaatttaagccacagcggcttatcaaagaattccgatgtactgccctgccttgcggatgtcttagtgggctccccaatctccagattgcatttttgctggttcagtttgcgcttcagcataacgtttgcttcagcggaacaggacaacaaatcgcaggatttaaaagctgcattggatttggttttaatcagctgttccacatagaagactcagtatgaccatatacgaccttgaagtttttaaattgaacacgagacagattggtttaaaataagcaattaaaaaaaaatcctattacagtttaatttataaatacattcgatggactaacattgcgttttattaaaaatcttgataaatagcgagttttatatatgtatatttaaggtttaaaaattagcgctctatttttgattacgcgtaaactcatctagacgcttctcattctcccgaacgaagctcgatttgaaggctttgcaggttttctctatgctgcctttaacgacggttccaagaatttccagaaattgtgatacctgcaagaattatacacaagtttaggatgccagctggattcgggagtcatggggaacatacggttaaattcctttcgggacacgatagcttggcgaactcgcattggggtgcatgtttcacgtgctccttccacggatcatcttcgggctcccagccatccagggtctttccgcacacaaaacaagtggcagtgtcgttttcccgcttggtgcccgtccaatagaatcccgcctcggccatctgtggtgcatggaatatagatgcagttaatatagatggtcatttgggtattcaaaaaatctcagcgacttgcttaccttcgaaatgctgcaggatgcggtctccggaaagggccaactcttgtagctctccacgcgatgctgttccaggaggttcagcttgcgaaagacctccagcttttcaccgcccaagctggctgcaacttcgtttaccactggcgattccatatccttttaataaacagttttaaagcgaaatacttattttgggttttttatcgcaaacagcgcgtcgttgttgctgtgccttcaaaaacagggttgccatataaaaccaaaataatcgatagtttgtaagcccggttattatcgatatccgagtaagaattt

SEQ ID NO: 11009 - DNA, 865 bp, DROSOPHILA
cttttaaatcctgcgatttgttgtcctgttccgctgaagcaaacgttatgctgaagcgcaaactgaaccagcaaaaatgcaatctggagattggggagcccactaagacatccgcaaggcagggcagtacatcggaattctttgataagccgctgtggcttaaattctacgaaaccgaagtcaagttaaatgaggcgctggaaaaactgaatcctcctgagagcacaccgttcatctacaacccgatagtatatgcatcccagctgcactgcgactatttacgtcgctatatggacggtcccaagaagctggtatttgttggcatgaatccagggcccaatggaatggcccaaaccggaattccctttggcaatgtgcgcacagtaaagttgttaatgcagctggctggttcggtggaccaacctccagtcgtgcatcccaaacgtccagtcgctggcttggattgtcggattgaggagcccagtggtgtgcgtttgtgggagctgttcctccgactggctggcagcatgcagaccttctcccagcagtgtttcgtccacaatttctgtccgctagctttctttggcgcagatggcaggaacataacgcccagtgaaatcagaggagcttacaaaaatcagctaggagacctgtgcctgcacaccctggaggaacaactgaagctcctccaacccgacgtgattgtggccgttggggagtatgttcacagcgcactgaagcgttcaggatatgccaaatccaattgcgtttcggtgctccgactgccgcatcctagtccgcgttctactaataataccaattggcccgagaaggctcaagcatttttggaggagcacaacctaat

SEQ ID NO: 11010 - protein, 272 aa, DROSOPHILA
MLKRKLNQQKCNLEIGEPTKTSARQGSTSEFFDKPLWLKFYETEVKLNEALEKLNPPESTPFIYNPIVYASQLHCDYLRRYMDGPKKLVFVGMNPGPNGMAQTGIPFGNVRTVKLLMQLAGSVDQPPVVHPKRPVAGLDCRIEEPSGVRLWELFLRLAGSMQTFSQQCFVHNFCPLAFFGADGRNITPSEIRGAYKNQLGDLCLHTLEEQLKLLQPDVIVAVGEYVHSALKRSGYAKSNCVSVLRLPHPSPRSTNNTNWPEKAQAFLEEHNL

SEQ ID NO: 11011 - DNA, 8202 bp, DROSOPHILA
gtattcggcgcacaatcgattgcccgctgataccaactgaaatcgaaatcgggcttcaaatggccaaatgaaccaaagttccattccgcgcggccaatagttaatagtggtgcgcactaatagttgttgcatttggtcaattgatctactacacgcatgcggtggcccgatggctgattgaatgcgattggatcgccgatcgacccggccaagatagcgaccgcgtttatgaggtgctacaatgcgtgcacagagagaaaagcagtcaacttaccaacacttgaatattttcaaaaagcaaattcaatcatagttaagggttcttagaggtgtgggtactgtggtttggaagatagcttttttttaacacagattagattaataattgaagtttaattatagcaagtagttttagcgtaaatggtggtgagcaaaattgataggaaataagcagattcaaatattaatccattcagttaattgtattttgagcttaattgtatttggagcatggttggaatagtgcactatagagattcagttgtatttttgttaagttaccgttgtataacaaaataatagttaattaaataaataaaatttaattaaaaatttggtatatgtctaacacgtattgtgagagtggttaatatttcgttgtaccaagtaccattgagcaataaacaaactaaatattgtattgctgcacgtattttctcgcagtgctcaattgtggcagcatgtacagcaagtgttacgagtcaactccccttgtcaatatagcgatacacgatcgttggccggcatccaataaaaacaacaacaataacgaaaagcgaaaaatgaaaataaaatcaaataatatgaaaaaaaaaactccctctgccgcagagacgccgactgcgcagcagcagcagcagagcggcgcttatctgctctcatataaatataaactaaagtcggcgggaataatttctcatttgtaatttggctggcggcgtgcgcggttcggtttggaattcgagttcgaattcggttagcacttcgaatccgatttggagacaagttcgagatcactggcctaacagtaatcatccacattctccttctccgctgcatctgcgctttccgaatagaatattattgcaaaacgaaaacagagactgctgtgtagccgaaatagcggtaaaaagcgtagagtcgtgtgcgcgttagttcatattaaggatccgccgttgtccttcaaacccgtgtaaccgtggcgaaggaactgaccagcttgttgacgcagccgccgccaattagtaccgagatgacgcaacagccacaatggggcataagcctatcgaggtgtaagtgtgccacatccttcgatccatgggatatcacaaacacaaccatcaaccactatcaccaccaacatcatcatatcgtcatcatcatcatcatgaaatggccataaggaagtgctgcgtgcgccggtgtattctgaatgcggattgtgcggatcgttgaacctgcgatcgttcggggggcattttcgagtggtagtgctcgcttaaagttaaccgacattgaccgacagcaatataaaacaaaaaaataaaataaaaaggaagaagaagaagaagaaacgtatataaaatcccatatgtattgtgcataaatgaaaacaatgacaaaacgcctctgccacttccgatttgtttcgaattgtgtgcattttgtttgtgtttcgctgcttggtggtctcttcaaattgaaattcccggcatgcgttcacataattggtaaatattttgcatacgatttgcatgtgaattgctgcttaactggccagcgataaagaacagggtatcatatgttcgattctaaaacaccacgatcgaagggctaacggttattacggactttgtcaaccaattatgggacctgcccaaatatatacctatacctataccgatttcctcgccccatctcgctctgttcttttttgggcaaggtcaatgcaataaagaattctttcgaccgattgggcaaccatttcagctgtaagagttttacgaaaataaaatattaaatatacttggaatgcgagtgataaaaatcacgtaagcctattatgattttcgtatcattttagactaaactaaaccccaaccagagtaattataaaaactaattagcttttgagctgtactagttctagctaactagctctgttatatagcttagtattctgcttgtttttccaatgaattatatgttgtgctttaaatttcaaccaacaaaggctttttgccacaagttctagcccaatgaactaacaaaatttacaatttggccataaatcaccctattggacattagttttgagctacggcaatcagcacgactaatcgcctcgtttatggcccccgtcccagttactcaaagtctcattatcatatggaagggtctggcctgggtgtactatctggtgtatatgttcttatgcggcaatcggacctcgctgacagcgaccctctgccccccaggcccattgacataattttcgcaagaccgcggaaatgcaagcgaaagaaatgaggtttatattcattcggggctatctcttagacattcacgattgccggacaaagagacgcaggcccagtaatgtcaacggatggaattgttttcgttttctcattaacgcaacggatacgaacgacaatcgttattacttaaaaaaccaaaagtcatcttcatcataagaaattaaccattaagtaagatttaaggaagtagaaatttgaaattaactaagatttaggggaattagttttatgagatgttttttttaaattgttatcaacatatttaatattgaaaatacccacacttagctttattttaggtatattctatatatagtatctgtgcaaatcgatttcaacaaaaactcccataattgaaactagttcaattgcattgtctggctaattagaaagtatttcaattgaaatagtaatgatgtataggtcgcagataatttattcgtgggattgtgaaacctatttaaataggtaaaaggtactttaaatgtaatcagtttctcaataagtactcaatagaaagggccaactttacaagttcgttgcatttgcaagaaaagaattttacggaaaaggtgtgaccgattaaatctagttaaaagtgagtctcacccccgccgcctcccactcagctttcattttccactcatatgcgcgagataaggtcgcgttagcaagctctgattaaatcttgaatagcttatcgcgggtggaggtccttagatggagtacggtcatatattaacgccaccgattggattggatggtctgaaattattggcatacttggcgggcggcgatatgattagcacccatttacatatacggcggcttatcaacttatcacttggcaatcatattttttatttctttattttatttttttatttgacactcgtggagtgagcgcgtataaatgttcgtgtcgaatttggttaagtaacctgtcaaatattggcacattgttaattttgccagctacggtggcttaatgcaatttgcggccagcaaaagatatattgatgttaatttataggtaaaataaacttgtcagctggtgacgtcgatgggctttttttgcgaaacagtttctcataaactaggggagtttcgaatgccattaagaaggcaaacacatgattgtttaacttttactggcggctggcttaaaaaaaaaacaaaacaaaacatataaatatctgacgtaggtggagtcgtcgtggttaggtgtcaacaaaaacaacagaagtcgtcgactgcggcgggggtgatctaataatattgtcatgaattggattctgattgtgtgtttacccaagaagccaggctactatttgtttttttactcgcaatccagagattcagattgaagtgatctgcgtgccgttcttgttagatcgtttatttcaatacgtttgaaatgagattggtcaatgttaactaagcgtgccaaagaacatgatcaattcaaccttcgacattcataggcggccatctattttcgaggccctatgaatttatgcccaaaattacttaattggcgccgccattggtttatgatcattgttctcggttagcgatttcgcatacttcacattgcactccaaatgtttatcgcagatctagcacactccgccttatcgggccgtaattccgcttaacaatttgattgcgatacgatggtcgtataaactacgtccgttgatcgctgcctggtgattggtgattgatattgggacacgagtgcatagcgccgctaatctttcgaccatgctgctcaacccaaacttaagcacgagccataaacctcacgagacaggaagttcgtgaaagagcgggtctacaaaactggacaaattcctcaaatacctttgaataactaaataaaaaataaaataacttataatggcagtccataaataagagcatataaattatctactcttgcgatcccccgcatatcagcacatgatttattaaatatttaatcaaactaagcactttattgccgcaaatttatttattgagtttgattggaacaagattatttggttgttttatggcagatcactagaagatacttttgcaatctgagttatgtaggttatatacccttgcttacctttaagatattacatttgatcatctttaaatccattctaatgattcatggctagagaaagggagaaaatagggctacaaatcggaacaggcctaatatattctttaatctttaaatgatcatatcgccatgtcgcagttgtctacgcataatttctttatcattaaaattataaactggtttcaaactaaacgatctgtcgtgagcattaaaaattatatgttgttgtcatcatgattattttaagcgttcattaaatatctgcgtggcatataatttgtttaagcattaaaacttaaaatgttctgaaagtgttctagacaatctctattacctagtttgcagcgtttttttatattatacttaatttactactcttttttcaatcattcgtattgaaaaatgactaaaatcggcttcaacagttcagctaattgatatagtgccacagcaatcaagtgcaatttgaagtttatcagcgcaaattgatttgtacccaattgagtcacccgtcaaactatttattcgcacgctaaccgaattaaataagtaaattgcttaaacaatatatatgtgagacgcaaatccgcttggctcgtaaaatgtttgacgcagtgtttggtcaaatgttgcccagcaggttaattaatgtacaccaagacacccactgacgtcaattccgatcgctatcttctcgtccatagatttcgtgataccccagcgagtgatcctggccatcatgggcttcttggccatcctgaatgcctacacgatgcgcgtctgtctatcacaggccatcacggtgctggtggtcaagaagaactcaacggatgacgattctgaggcgatctgcgaacccgatgacatcgacgagggaaccagtgtaagtagagtctaagagtaatatcagaagataatactttaaacacaaaatctttccaggttggtggcgatttcgaatggtccgaggagctgcaaggtttgatcctgtcctcattctacatcggttacattgtcacccacattcccggcggtctgctggccgagaagttcggtggcaaatggaccctgggccttggcattctgtccaccgccgtgttcaccatgctaacgcctttggccattaacaagggtgactccgactggctgattgtgacccgagttctgatgggtctgggcgagggaaccaccttccccgctttgagtgtcctcctagctgcttgggttccggccaacgaacgtggaaagctcggtgctctggtgctgggtggcggtcaagtgggtactatcatgggcaacctgttgtctggcgtgtttatagacgcctatggttgggagtttgtcttctacttcttcgggggtctgggtgttgtctggtttgccatctttgtaagtataggctgagcacttagcacatagtcaagactcgttataatccaaactattcttgctcgtagatgttcctctgctacagcgatcccacgtcgcatcccttcatcaagcccagcgagcgcgagtatctggtcaaggagattggaaccattagccgcaacgaggacctgccccccactccctggaaggccatcctcaccaacctgcccatgtttgccctggtggccgcccagattggtcacgattggggcttctacatcatggtgacggatctgccgaagtacatggccgacgttcttcagttctcgatcaaggccaacggtctttactcctcgctgccctacgtcatgatgtggatcgtttccgtgggcagtggctttgtggccgattggatgatccgccgtggcgtgttgagcaccacaaacacccgaaaggtgatgactggtctggctgccttcggtccggccatcttcatggtgggcgcctcctacgccggctgcgatcgtgtcctcgtcgtggtgctcttcaccatctgcatgggtctgatgggcgcctactatgcgggcatgaagctgagtcccctggacatgagtccgaactatgccggaacgctcatggccatcacaaacggaattggagcaatcaccggagtgatcacgccgtacctggtgggcgtgatgacaccaaatgtgagtatcataaaggtgatgttttgaaactttagctaatctggttgttctccttttacaggcctcgctgctggagtggcgtcttgtgttctgggtggcctttggcgtgctctgcttcactgccgtgatctactgcatttgggcatccggagaggtgcagccgttcaataacgcacccatccagccgcgctccgtcgactttgaggcacaggagcgcaaggtgggtggtgaaaagacaagtggtctggagcagagctcgtaaggtggatcgccaaaaaaaagtgccatacatatatgtatacattgtaatctagttaaagtgctgtctacgcggattctggaatccgtaatctgggatccgagtggttcccaaaagcagtgtcatgctgtatacgcagtggctgttgttcaaattgctagttttatagtattcccgatctggccgatccctggcatcagcgccaactaattaatttaagcgaatttacttacactcccgaacgtccgcagtgctaccatgtttatcccttttgttagctaggataatccttagcctaatcctaatcctaaactatacccctatgccgcgcacgcaacgtactctcttaattattatttagtatttaaacaaactgcgatttcgcattaaggatttcgtgtaccagagctcgtattgccgtattgtaaatcaaatgatgaaataatttgtacattttaaattgttgatcaatgtgtaaagtaaagcgtgtttttagctgttctgttaagacattactgtttttatgatgttagtcaaataaagtgtataaagctaattaaaactataaatctaaaatccagtttgtaaaaatgtattcatgatatactcatataataggtattaaatagtctaaaggggcatcttctagtaggcgttctgcgatttgtccaacttctataaaacaaagttaccaaaatgctgcccgctgttgagcaaaagttgagcgatatatttatatgtatgtatatgtatgcataattcagcgattttacgtggcatccactacaaccagatggttacccgttccattccacagatctggaggtgcgacagcgctgggttctctgctgcttcacatttttggcgatcattaatgcctacacaatgcgtttgtgcttggactgtacgcttaaccgaatcatattggaatgtggtggtcatagggtggacaacgttcctcaagtactaaatccaaaggcactgcccaactggcgtattgaactggccatggcactgaatcacacggaatatcaactgagaagccgcctaaaagcgggaaaggagcaaccagatctcaaccagataagcgccaaaggaacgcgggatagagaacctgccggtgagaaacgtcctggtcaagag

SEQ ID NO: 11012 - DNA, 1943 bp, DROSOPHILA
tgcgcggttcggtttggaattcgagttcgaattcggttagcacttcgaatccgatttggagacaagttcgagatcactggcctaacagtaatcatccacattctccttctccgctgcatctgcgctttccgaatagaatattattgcaaaacgaaaacagagactgctgtgtagccgaaatagcggtaaaaagcgtagagtcgtgtgcgcgttagttcatattaaggatccgccgttgtccttcaaacccgtgtaaccgtggcgaaggaactgaccagcttgttgacgcagccgccgccaattagtaccgagatgacgcaacagccacaatggggcataagcctatcgaggtatttcgtgataccccagcgagtgatcctggccatcatgggcttcttggccatcctgaatgcctacacgatgcgcgtctgtctatcacaggccatcacggtgctggtggtcaagaagaactcaacggatgacgattctgaggcgatctgcgaacccgatgacatcgacgagggaaccagtgttggtggcgatttcgaatggtccgaggagctgcaaggtttgatcctgtcctcattctacatcggttacattgtcacccacattcccggcggtctgctggccgagaagttcggtggcaaatggaccctgggccttggcattctgtccaccgccgtgttcaccatgctaacgcctttggccattaacaagggtgactccgactggctgattgtgacccgagttctgatgggtctgggcgagggaaccaccttccccgctttgagtgtcctcctagctgcttgggttccggccaacgaacgtggaaagctcggtgctctggtgctgggtggcggtcaagtgggtactatcatgggcaacctgttgtctggcgtgtttatagacgcctatggttgggagtttgtcttctacttcttcgggggtctgggtgttgtctggtttgccatctttatgttcctctgctacagcgatcccacgtcgcatcccttcatcaagcccagcgagcgcgagtatctggtcaaggagattggaaccattagccgcaacgaggacctgccccccactccctggaaggccatcctcaccaacctgcccatgtttgccctggtggccgcccagattggtcacgattggggcttctacatcatggtgacggatctgccgaagtacatggccgacgttcttcagttctcgatcaaggccaacggtctttactcctcgctgccctacgtcatgatgtggatcgtttccgtgggcagtggctttgtggccgattggatgatccgccgtggcgtgttgagcaccacaaacacccgaaaggtgatgactggtctggctgccttcggtccggccatcttcatggtgggcgcctcctacgccggctgcgatcgtgtcctcgtcgtggtgctcttcaccatctgcatgggtctgatgggcgcctactatgcgggcatgaagctgagtcccctggacatgagtccgaactatgccggaacgctcatggccatcacaaacggaattggagcaatcaccggagtgatcacgccgtacctggtgggcgtgatgacaccaaatgcctcgctgctggagtggcgtcttgtgttctgggtggcctttggcgtgctctgcttcactgccgtgatctactgcatttgggcatccggagaggtgcagccgttcaataacgcacccatccagccgcgctccgtcgactttgaggcacaggagcgcaaggtgggtggtgaaaagacaagtggtctggagcagagctcgtaaggtggatcgccaaaaaaaagtgccatacatatatgtatacattgtaatctagttaaagtgctgtctacgcggattctggaatccgtaatctgggatccgagtggttcccaaaagcagtgtcatgctgtatacgcagtggc

SEQ ID NO: 11013 - protein, 496 aa, DROSOPHILA
MTQQPQWGISLSRYFVIPQRVILAIMGFLAILNAYTMRVCLSQAITVLVVKKNSTDDDSEAICEPDDIDEGTSVGGDFEWSEELQGLILSSFYIGYIVTHIPGGLLAEKFGGKWTLGLGILSTAVFTMLTPLAINKGDSDWLIVTRVLMGLGEGTTFPALSVLLAAWVPANERGKLGALVLGGGQVGTIMGNLLSGVFIDAYGWEFVFYFFGGLGVVWFAIFMFLCYSDPTSHPFIKPSEREYLVKEIGTISRNEDLPPTPWKAILTNLPMFALVAAQIGHDWGFYIMVTDLPKYMADVLQFSIKANGLYSSLPYVMMWIVSVGSGFVADWMIRRGVLSTTNTRKVMTGLAAFGPAIFMVGASYAGCDRVLVVVLFTICMGLMGAYYAGMKLSPLDMSPNYAGTLMAITNGIGAITGVITPYLVGVMTPNASLLEWRLVFWVAFGVLCFTAVIYCIWASGEVQPFNNAPIQPRSVDFEAQERKVGGEKTSGLEQSS

SEQ ID NO: 11014 - DNA, 3874 bp, DROSOPHILA
tttgatcggccctcggtgggcattattaataatgcaatcaatttgtaaacaatttggcatatatcaatgcgcttcgtgctggccataaatctttgggaaattagctcagtcactctgcccctgctgccgcaaacttttgcacttaaaaatattgcaagctagtagagtgtttcgcgcaaataaagtttagtggctttcgaggttgagacatttcgaaagtggctataaactaatatatagatggtatagatggcaggtaattgcaatttatacactatacatatagtattaactagaccttttgagcttaagtttaattccttgcctatcgattgtggcaacataacaagtccaagtagatttcaagatttataaaactaagctttattgtggcacattcaatacaacttgggatctatgtgggcataaagtcaaccagttttaaattgttatttcattcgctatattttgaaccacatgaaccatatatttcgcttggatttcgcaagtacattttgcgagtgtggtcatttgcaatcccgccccactgacagattgctgggccgccctcttgatggattggcggctggttctggcctggaaatattccggtagcggggtcatggctagttggtagtgtggacagggggcggttccaacagattttgccatatttctgcgttttggctgctccagtggctgctgttgctgctgctgctttggcagttagtgacagctgcggtgatggctgcagtttgcggggtggtgtgggggaaaaaaacccagaaatggagagccgggaaaaccataacgcttgtccggttggcagccatgcatttcccagcaacgggatgagaatggagcagcaggcctttgaccaaccaaagaatggtatttctttggcgctgtttgccggaatatctgatatccccaatggtccgagtaggcagcgcacaaaaaatagaagtcaacaaaaaagagaaaatgccactcgtacagtaaacttccagcgttcagatcccagtatctgcggcgtggtggcaatacatatatctgctttacaaaggtaagttcagagttgaacatccttcggctaattgaatgaagttgtgtgccccctgaagtgtgtgtccagctgagattcttcccttgcggaagagtaatcgcaaatggatgccaatcccgtcccttcttccctgttccctgttccattctcattgcccggcttgccttggccccaatttaaaagtttatgaacttgtcagccaactggcgcctccactcagtcgctcatccctctcttttttccgttctctcttttgtgcttcgacaggaggaaggagcaggaccaagggccaaggaccaaggatgtcggggcgccttaaccaccagcacgcggcgtatgcgcatcgcatggaacaggaacacaaccgggtgcaggccacacaggcagtgaacagctactacagccattggggtaaggtcacatcacgcttcgaaaactggaccaacaaagagtactatgagaaggcggatcaacagctgcaatcccgtcgcgatcagcaggagaaggaggcagctcttaatgaacgtcggtccagacttcgccagcttctggcctcggagagcgaagagtacaacaacgagatggagcgacgtcgccggcctcgggaacccggtggtggagacctccagatgcttgatcgggttaaccagtcgcttaaggagcaagagcaactgcgtcgcaagctcgagatggaagccaagttgtacggccgctggcgtcatggcgtcgacgatgaaaagctgctctaccagtccaagtcggacaacgaagtgctggccaagctcaactggctggaccgccagatcgagagtcagcagcagcgcgaggagcagcaggccctggccgcggagaggcagctcctgctgcagcaggaaatcagtcgcacggaacaagctcaaaaggagcgccagcagatccgggagcaacaattgcgcgaactgcgtgctctgcaagaatcccacatgtccgagcttcgtctgcgacagcaggaggcggacaagttgaaggaggaggagcagcacttccagctcttcctgggcgaactggacaaagagcgggaattgctggaggagagcagtgctctggtgctcaaacaagtcgattccggacacgccttcaacctcaagaagattaaggtcttcatccggcagcgtagtgaggccagtcggaagcagatctccctgtgcatcaacatgctgcatcgcatggccaagtatgtggtcaagacggaggagctaaagaccctgctggacaagtaccgctcccagttggagaacgaggaactggcctgcgcccagatcgaaagcatgtacgagtcagaggccaagtacaacctacagcgcagtgaggaaaactggcgggaacagcacttgcagcgctacggagagctaagcaagttcattgaccaggagaaggattgcctgggcgccatgcttcaggagaatgtgagccagcagcagacattggtggagctgaggagccaacacctgactggcatcgagcaggccaacaagcagctggagcaacttagccaggtgcaggcggacgaggtgccggcaccatcgcaaagtaatctcaaggaggtcgaatcacaatcttcagtttccgagacttccgtggaggagaatctgctgcccaaggtgagcgattcgttctccaatctgaacctggatgtgtggaaggatctgcccccagctcgcagtgaagtcgacatgcagcgcctaaaccaatcccgatccctcagtgtggtcacctcgcagacagccgctccgccgaagttcgcacgcaagcgtgtggcctggacctaacatttcaattccatattatcgtctttgttccagttaaaatttcaatggtattaatagacatattgctagttaagtcccagtttagcaatagtttaacttcttgtgcaaccccttcacacactttacctacactccactacatttcaatgcactccagccccatgaataccactccacccaagcgaacaccactatgtgcacttgtagttgataaggctgatagataggcgcacccccctaccccccgaaatgggcgcaataaattactcaatttgtgggccagcaggatgtaaggctttaattattgtcaagcggctcagtcagcgggttactgccacatatctggttttgcatatactttgttgactcgaataacaaatttatctggtaagtacaaatattgtggttgaaaagaactagctgggcatacaacaagtcagaatagcaagccgcttagtgcaattcgtctggggaagtgcatgtgatgggcgtgtcaagtgcagagtgtttggatttcaaattgtccaattatggcatacacacaactccctcgttgcagatgcgattagcattcaatcgaaattaatatttgtagactcgaggcaagtctctggacggttgctgaagtaataaggttacacacacacacacacacattatttaatgcaggttattcatcatctatttgaatagattgccgacactcgcccaatcttcattccatcaaccgtaagctgctcctaatggccaaaatgctcgcaaatgatgatgaatacgtttcaattactccactcgaactctccatcatcagaaccagaatcggaatcgaaaacagtatcaaaatcgaaatccggatctgcaactaaatgggaatccgggagtgagcataatattctggcgtataactaaagtacgatatttcgatatcatttgattggtgcctgggccagttctcaaggggatccgtccgttcgttcatgaaatgttgtttattgatatc

SEQ ID NO: 11015 - DNA, 1607 bp, DROSOPHILA
aaacttccagcgttcagatcccagtatctgcggcgtggtggcaatacatatatctgctttacaaaggaggaaggagcaggaccaagggccaaggaccaaggatgtcggggcgccttaaccaccagcacgcggcgtatgcgcatcgcatggaacaggaacacaaccgggtgcaggccacacaggcagtgaacagctactacagccattggggtaaggtcacatcacgcttcgaaaactggaccaacaaagagtactatgagaaggcggatcaacagctgcaatcccgtcgcgatcagcaggagaaggaggcagctcttaatgaacgtcggtccagacttcgccagcttctggcctcggagagcgaagagtacaacaacgagatggagcgacgtcgccggcctcgggaacccggtggtggagacctccagatgcttgatcgggttaaccagtcgcttaaggagcaagagcaactgcgtcgcaagctcgagatggaagccaagttgtacggccgctggcgtcatggcgtcgacgatgaaaagctgctctaccagtccaagtcggacaacgaagtgctggccaagctcaactggctggaccgccagatcgagagtcagcagcagcgcgaggagcagcaggccctggccgcggagaggcagctcctgctgcagcaggaaatcagtcgcacggaacaagctcaaaaggagcgccagcagatccgggagcaacaattgcgcgaactgcgtgctctgcaagaatcccacatgtccgagcttcgtctgcgacagcaggaggcggacaagttgaaggaggaggagcagcacttccagctcttcctgggcgaactggacaaagagcgggaattgctggaggagagcagtgctctggtgctcaaacaagtcgattccggacacgccttcaacctcaagaagattaaggtcttcatccggcagcgtagtgaggccagtcggaagcagatctccctgtgcatcaacatgctgcatcgcatggccaagtatgtggtcaagacggaggagctaaagaccctgctggacaagtaccgctcccagttggagaacgaggaactggcctgcgcccagatcgaaagcatgtacgagtcagaggccaagtacaacctacagcgcagtgaggaaaactggcgggaacagcacttgcagcgctacggagagctaagcaagttcattgaccaggagaaggattgcctgggcgccatgcttcaggagaatgtgagccagcagcagacattggtggagctgaggagccaacacctgactggcatcgagcaggccaacaagcagctggagcaacttagccaggtgcaggcggacgaggtgccggcaccatcgcaaagtaatctcaaggaggtcgaatcacaatcttcagtttccgagacttccgtggaggagaatctgctgcccaaggtgagcgattcgttctccaatctgaacctggatgtgtggaaggatctgcccccagctcgcagtgaagtcgacatgcagcgcctaaaccaatcccgatccctcagtgtggtcacctcgcagacagccgctccgccgaagttcgcacgcaagcgtgtggcctggacctaa

SEQ ID NO: 11016 - protein, 501 aa, DROSOPHILA
MSGRLNHQHAAYAHRMEQEHNRVQATQAVNSYYSHWGKVTSRFENWTNKEYYEKADQQLQSRRDQQEKEAALNERRSRLRQLLASESEEYNNEMERRRRPREPGGGDLQMLDRVNQSLKEQEQLRRKLEMEAKLYGRWRHGVDDEKLLYQSKSDNEVLAKLNWLDRQIESQQQREEQQALAAERQLLLQQEISRTEQAQKERQQIREQQLRELRALQESHMSELRLRQQEADKLKEEEQHFQLFLGELDKERELLEESSALVLKQVDSGHAFNLKKIKVFIRQRSEASRKQISLCINMLHRMAKYVVKTEELKTLLDKYRSQLENEELACAQIESMYESEAKYNLQRSEENWREQHLQRYGELSKFIDQEKDCLGAMLQENVSQQQTLVELRSQHLTGIEQANKQLEQLSQVQADEVPAPSQSNLKEVESQSSVSETSVEENLLPKVSDSFSNLNLDVWKDLPPARSEVDMQRLNQSRSLSVVTSQTAAPPKFARKRVAWT

SEQ ID NO: 11017 - DNA, 4924 bp, DROSOPHILA
ggcttgtagtcgcgaatgcgcgacttcttgaacgagtccctgtaattagccaaattgggtagagattgcgtactccccactccagtcgcagaataccctgcacttacgctctgccaatgcgcccgccaggaattgtgggtggcagcttgcccttcaacatcgtgcgctgtaaactcgacattgatccgattgtcttcgctgtggggtcaacaggtggtgctcctacggtgcaggtgcaagtggttattcacacagtcgttgctcgcaattatccgttttcgaaaacaaaaaaatagttccaattcaacgaagaagtattgcagtgtgaccgtaatcgagaaaaccgtaactgacgccagctggcagcgctggttcaagagctgcacttggcaatgcccttgtctggcaacgcctaaccgcaacagtcaacatttcaaattccaaaacggatattttaggcttttgcaatcaaagacgaaaatccgtaccatactgaaacaacaacagttgtatattttaatgtttgtacattttaatcaattaagtattttaaaagtttatctacgaaaaaattgatgagctccccgaaacacttgtaccttatcagctttgtaaatacttcacattaatggcaaaataataagcaaggtaataacctttcgcaaagtggatgtcaaaaccactttttaaagcagacaaaatttggaaaccagttttttagaatgctaacaagaaagaattcatatgctatgaagatgtttgacccatttaacggtaaagacagctagttataaactaacaaagctctcaacaagttcctactgatacacacagtgcaacatcgctagctgggaaactggtgttctataaggtctccgagcatttatatttcagtaatgctactgataaggaagtatcactttattgttcatagtattccggactaagcaaaaacggaaacggaacgggccggattgctcagttgcttgatggaacgcgacgtgctcacaccgaaaactagaactcctctctgataagacggcaccaagttaatttgacctcaaacagagaaagataaggcattgttgggtatgtatcggcaaaagtgtaaaaatcttgacaaaatcctttatatctgtgtttattctggtatgtaaacaaaaggtaagctcaatacaggttaagtttatggtttcgagataagataaatgtcatgtttgtcattaatggtctatttagattatgcggcagtaagtttaagcggtagtacttttgaaaaacaattaccagctaagaactttattgccaaataatttactattagttgggactagacataaacatcaatttcgcggataaatattcaaaataaaatctttatccattgcgcatttcaagggttaatgcttctgcaagcctggcaactcctaaataacagctgttggctatagtcctctcgctcccgcacacccttccttttcatttaccggcagaaattgcacttttgtacttgttttttgcccaattaagcggtcaaattggcgtcaatctaatgttttagtgactttgatgccgtttccccaactgataaccgcaatgttagtacatcactttgtgtgctaatagctatttggacatattgataaggtgagatgggttgataagctaatttttgcacaaccacaggtgcaattgtttttccctttgccacggctatttgtttacgtatgtaaatttgtttttgcccataaatttagattaaccagttgcgacacgtttacggttcgtcgactgcgaaaataatgggcattattaaagtttcacccgcctgcaggtgaacatgactgccaacgggaacggaactgctcaggatttgggtgccggcattgaaatcgtggccccacagaagctccagccggaatccaaggtttacgggcgcgtgcagcaattgaccgcatttttcaaacaacaattcggagcgaatccggactttatcgttcgagtgccaggaaggtgagcagttccactcgtggtgcacatctatagtcccttatcgatgatatctcctccttctcctagggtcaacatcattggcgagcatgtggactactgcggctattcggtgctgcccatggctgtaagccagagcattttccttgcagtggccaagaatcctagtgatagccagcttcaactcagaaatctcgaggaagcgaagtttacgggctacgatgccgatctcaaaacgctcaggtgggtgaatcagaaacatgataattaccgaccttaagcactagaaaattttccatttaatttgttataataacaatgtcaccttgaaggcggtatctaaacgaatttagaaatgataagtccaaatatttttttgctattttagaatcgagcttccaaagagtggtggacccgcttggtataactacttcttgtgcggcatcaaaggaatacaggagagtctgggcagccagtggaagcccattggcatgcgcattgctgtggacggtaatgtgcccttggcggcaggactctccagttcgagtgccatggtcagctccgctgtgttggccaccgcacacgtccagggcaagaaactagatcgcagggagctggcttccatttcggccatgtgtgagcagtacattggaacgcacagtggtggtatggatcaggcaatagcctatttgggcagagttggctgcgcccaccacatcgagttccatcccaagctcaagggcactccggtgaccttgccagcgggcaagtgcttcgttgtggccaacagtctggctcaaaagaacaaggctgcttcgtcggactacaatgaacgagtggtggaatgccgattggccactagatggctggccaagcgcaagggcttgatcaactgggaggatattgtgcgcttcattgatctagaggaggcgtgccaaatggataatgagactttcgagaagttgattaaggacaacttaacgaagagcaactacacgcgagcggatatctgcaaggagttgggagtcaccgaacaggaactggagaccaagttcctatccgccaacactcggcacatggagcagttcaagctgcgtcaacgtgctctgcatgttattcagggtaagttaatcatttacaatcaggatttcacatttaatctgaatcattacgtgtacattaaatttattgatcaccaaatgaataattacagtcaattaataatacgttgacattcatttgttgtccgaaagatttaaactcttagcaaataatattaaattgcaagatcagttaataacattgtttccgcctaacagaatccggtcgcgtggccaaattccggaaaatttgtgaggaactcgccggcggagccaataaggaaggtgcaaaacagctgggtgagctcatgcggcaatcccacgagagtttaagggagctatacgaatgctctcatcctgatgtagagcgcctgattgccatatcgaaccagcagaacgttagcgcccgagtcactggagctgggtaagaaaaccgatatcctagtgactctatgaatttaatcaacattattctttttcagttggggcggttgtatagttgccatgtgcgattccatagaagcagctgatgagtacataaaggttttgaagcgcgattactatgctcaattgccaacacatctcctggagcgtcatcagcccaacaactttagcgaagtggtctttgccactctaccaggaaacggagccgagttgtatatacagtgaacgcttgtgtagcattttaatccaacttttataccaaaatcatcctatcagtcactataatcaaacggtcatttatagaaaaaacatttaatatgtagagtactatgtacaatatattaacaatttacaagctaaaatacaacaaggcacgtggggaacggaactcatctggcatcgtgagttctatctgctactcagatagccggcgttcttgaagagcttgtacacctgttcgcgcggtattttctccgcctcacgatgtaccactgccatttccttcttcgtgagcagtgattccttggccagattggcagcgatcacgggatcattgtagaaccgcgcactcttcgacagctcagccggcaactcagactcccactgggcatttcgcaccaccgagggatgggcatcggctgttgcatatccctggtacggattggccggttcgtaagcgtgcgcaaccggcagacccagcgcctggtggtagaagaactgggcccgaaccgaactcatggccagaagcaggcatccagcgagcagcgttacttggcaggcggtcggcatgattggctgctggaggggagaaaaggagcaggagctggcattattgtccaacgttctaataaagcgatacggacagatttattgccgctggtcagtggcagtttttaatctacaagtcggctgtcagtttcgtgcgtcataaattatgtacgggaaaatcaattatcgcatatggccaatggagtgggcaacgcggagatcttggctcaaactgttacagttgctaatccatgaacttttttgcaacttggaactggcttttttttattgataagaattggactggccgcgaactaaatggcgagctttatttgtcaagcgtagagtgctccaatttggtcgcaacaaagcaatcgtagcttgagatataagtacagtggtctctctagaactcttttgagattttaattgcaattgggtaatttgctataaggattggtgaaaatattattttttattttacgttataatgacattatcgaagatgcatttaccaaatgtattaattaagaatacgttagcaatgaaattgatttaaatcatgatcatcctttttaggctttgatatattcacttcgaac

SEQ ID NO: 11018 - DNA, 2040 bp, DROSOPHILA
cgtgctcacaccgaaaactagaactcctctctgataagacggcaccaagttaatttgacctcaaacagagaaagataaggcattgttggggttaatgcttctgcaagcctggcaactcctaaataacagctgttggctatagtcctctcgctcccgcacacccttccttttcatttaccggcagaaattgcacttttgtacttgttttttgcccaattaagcggtcaaattggcgtcaatctaatgttttagtgactttgatgccgtttccccaactgataaccgcaatgttagtacatcactttgtgtgctaatagctatttggacatattgataagattaaccagttgcgacacgtttacggttcgtcgactgcgaaaataatgggcattattaaagtttcacccgcctgcaggtgaacatgactgccaacgggaacggaactgctcaggatttgggtgccggcattgaaatcgtggccccacagaagctccagccggaatccaaggtttacgggcgcgtgcagcaattgaccgcatttttcaaacaacaattcggagcgaatccggactttatcgttcgagtgccaggaagggtcaacatcattggcgagcatgtggactactgcggctattcggtgctgcccatggctgtaagccagagcattttccttgcagtggccaagaatcctagtgatagccagcttcaactcagaaatctcgaggaagcgaagtttacgggctacgatgccgatctcaaaacgctcagaatcgagcttccaaagagtggtggacccgcttggtataactacttcttgtgcggcatcaaaggaatacaggagagtctgggcagccagtggaagcccattggcatgcgcattgctgtggacggtaatgtgcccttggcggcaggactctccagttcgagtgccatggtcagctccgctgtgttggccaccgcacacgtccagggcaagaaactagatcgcagggagctggcttccatttcggccatgtgtgagcagtacattggaacgcacagtggtggtatggatcaggcaatagcctatttgggcagagttggctgcgcccaccacatcgagttccatcccaagctcaagggcactccggtgaccttgccagcgggcaagtgcttcgttgtggccaacagtctggctcaaaagaacaaggctgcttcgtcggactacaatgaacgagtggtggaatgccgattggccactagatggctggccaagcgcaagggcttgatcaactgggaggatattgtgcgcttcattgatctagaggaggcgtgccaaatggataatgagactttcgagaagttgattaaggacaacttaacgaagagcaactacacgcgagcggatatctgcaaggagttgggagtcaccgaacaggaactggagaccaagttcctatccgccaacactcggcacatggagcagttcaagctgcgtcaacgtgctctgcatgttattcaggaatccggtcgcgtggccaaattccggaaaatttgtgaggaactcgccggcggagccaataaggaaggtgcaaaacagctgggtgagctcatgcggcaatcccacgagagtttaagggagctatacgaatgctctcatcctgatgtagagcgcctgattgccatatcgaaccagcagaacgttagcgcccgagtcactggagctgggttggggcggttgtatagttgccatgtgcgattccatagaagcagctgatgagtacataaaggttttgaagcgcgattactatgctcaattgccaacacatctcctggagcgtcatcagcccaacaactttagcgaagtggtctttgccactctaccaggaaacggagccgagttgtatatacagtgaacgcttgtgtagcattttaatccaacttttataccaaaatcatcctatcagtcactataatcaaacggtcatttatagaaaaaacatttaatatgtagagtactatgtacaatatattaacaatttacaagctaaaatacaacaa

SEQ ID NO: 11019 - protein, 444 aa, DROSOPHILA
MTANGNGTAQDLGAGIEIVAPQKLQPESKVYGRVQQLTAFFKQQFGANPDFIVRVPGRVNIIGEHVDYCGYSVLPMAVSQSIFLAVAKNPSDSQLQLRNLEEAKFTGYDADLKTLRIELPKSGGPAWYNYFLCGIKGIQESLGSQWKPIGMRIAVDGNVPLAAGLSSSSAMVSSAVLATAHVQGKKLDRRELASISAMCEQYIGTHSGGMDQAIAYLGRVGCAHHIEFHPKLKGTPVTLPAGKCFVVANSLAQKNKAASSDYNERVVECRLATRWLAKRKGLINWEDIVRFIDLEEACQMDNETFEKLIKDNLTKSNYTRADICKELGVTEQELETKFLSANTRHMEQFKLRQRALHVIQESGRVAKFRKICEELAGGANKEGAKQLGELMRQSHESLRELYECSHPDVERLIAISNQQNVSARVTGAGLGRLYSCHVRFHRSS

SEQ ID NO: 11020 - DNA, 4563 bp, DROSOPHILA
tcgacgaccttgaccgtgaaatttaaatttagaagctacggcggcggctaagacgtaaaaaataaaataccaccaagcttttcgaagctatcttcgccagtgtattagtcattgtgtgttctggcaattgcagaaaaagctgcgctctatcatcggtaattcccctgcactctcccaataataacaaagattctttaaaaataaatttgtccatttcacgagtttgcttcatgtgacttatataaatattcaagtgaggcgggcagctattttaaaaagcaatttaatgaaacatgaacttgcgtactggcgccgtcgcgacttggtcaatgatgtaaatccgtctaattgcacgaaattgaaggcagcaccaatcggcgcagggcgattttaggtaacgtaaggctaaaaataatgtctgttcttttgattagctgatttgtagatgcgtttgaaattaccgccaagacaaagtgttggttagctttatgcaggtcatttggtatttataatactgaattttaatacccttgaagagttcttcacttcacttcatttgttgaaagtttttagattgcgcgcaatagacataaaatgtattcattgacagaaaggatatttagttgctactatttaattagcttactaagatggtagagagggactgcttgttattagaaacgaggtattttcctttaaattttccgcctttagtagcgatattttggatcagctgattatttgcggaacattcgggaactcccatcactaataaacaatctgcacgatttaaaaacattctagaaacacgctttaaatgactgttaagcaattaaattaagattgaattaattcaagaaaaaccgttaacgtaccaaccaagtaaagtttctcttataaagtagtaactttgccttaaatcaagccggtatttttaaacacgtgaagcacgtggattgtttatccaaaatatacaacaatttcatcaaaagcttttataatggttgccgatatattcagtgaatattatatatgcaatttcaacgatgcggtgacagttgaaggtacaaataataataatagcccgtaatatctgatataaaaactgcccatagatctgcccgcggatgagacactgcgtcaattgtggacccgccagaaactgtggacaatagatgaactccgggagatccttcaacgctggcaggagcatgtcaagccagatccgaatgataatcccacctcacaactcaaggatttcctgctgctgatattcgcttttgttcaaaacagttttactgggccctttgacaaactcgaagagtaccaacaaatccatagtgaactagagctggagaaactcgacgcactcgagaaactgaaggccagcggcgaggaactgaatccaaatgtaaaatctgtagaactactactgattgccagggaaatccttgagggacttttagaaaaccatccagaatcaaaggtttgttggcttcagtgaaatgcactgctgtttattaatgagcgatatacttaggtcctgatttggtggcgattgcgtctgatctgcctgcatcaacatgtgctggatgatttggcggcctccctgtatgagcagtttaagtcagcagctggacatcttcaggctcatttcaatcagtttgagagcagggaactgcaatccctgctactactggagttggccaatggctacctgcagtttcatcgctctgaaatagcctcccaaatactggatgaactgtgcaagcatctccaggtggagctaaaagttgagggtttactaggagtacgcaccaaattccagcagaaggccctgccacaactctgcctcaaagttgagcatctaaacgagcagcagcctctgcctccagccgtccaaacaaatgagacgaccaaattgccaaaactgcttcttctggaggatgacacgcgactggagcggatacgctttgtggaactgaaggacaacgaagtgatgacgcttcccagtgttctccaagctctggtgctggccaaagtgtaagaatggctaatggtgcataatatttttctgatatactaaaatctttcctttacacagaaagcaattgaaacgctcaacgcctaaggatcgcctggcggatgaacaactggagccgtatacacaaaccctactttaccaggaacacggaccattccaagtccggcagtcagcccttcttctaaactgccttcaggaatcgaatcaaagaaggacagtcgaacgcagctggaaacaatgcgaggagtgtgtcaaactgcttgacacctccgaggaggagctatcgctgcgatcccgactctcctacggtttcgccgcccacttgagtcccaagtggcaggtgcagctacagcttgtcgacttgctgcgatccttgggcatgaccaaaacagctctggacatctgtcttcgcatacacgcctggcagcaggtgatcgagtgctacacgagtctggaactccgtcacaaggcagcggagatcatcaggcaggaactggagaagaagccaacggcattgctgtactgcctccttggcgatgctatcgatgatccttcgttctatgagcaggcttggttgtattccaaaaagacaagtggaaaagctcaagcctattggggcaaccatttctataggagtgcggattatgcccaggcaatggatcacttcgagatttcgctagagattaacaacttgcaggaagcgattcttttgcgctgtggctactgtgcaatccaactggaacgctgggagccggctgttaaatattatttggcttacacccacctggaacccaatggattcgaatcctggaataacctagccaaggccctgattaaattgggtgacaaacagcgggcccatcgtgttcttggtgaggccttgaagtgcaactacagcaactggaaggtttgggagaactacatgctggtgtccgtggatacttcccactgggacgacgccatgcgggcttaccagcgcatggcggagctaaagcagcactacctcgatcaggaagtgctaacccgtattgtttacggagtttccaaggaggaccccgccggctcaagtgctctgatcaaaagactcataaagcttctgggacagcagagcattcaacatggtaacgagcctcttgtgtgggaactggccgccttggtggcccaaacgccactgaagaaggccgagaaactggtaaaatcgtatcgtgcgtacacaccgaagcatttgggctgggaaaccaagtcggagcacgctttaaaagccctagatctttgtttagaggtctgcgatctctcagtggcggccatcacagagcacattcaagaggaaagtgaggtaatgattacctctcaactaaattcagccagactggcgggaacatcttgtctgaatgctttgaagagagccataaatgtggatgtatcggcagaacagactgcaaaagtggagcagctggaaaaacgcatcgaagacctgacaaaaattgtccaggaacgaatgaatgcgtctcgatcttagttatacactatataaggttttatactattttgtaattgcaaaacaaataaaaagagtcattttttattgtacatgaaatagtttattgctgatatatatttgtaagctagttttgatttgtaatataattcagctcaagcagattatccagtttttctgattttaaaagctattgcgcattaaggatttattgtctagcaataggtgcaatgaaagtgtattcataaaaatataaacctatgaattaacccatcatccaatatcacaagtatgaagcatttctttaatgggtttcttttgatgtccaccatctaaaaagtgtttagtttggtggtaattaaaacgcgcacgctttgatcgaatgctccacagacggctaggcccagtttgtctggatgccagtcaaagcagtgaaccggctgagagctcaaagtggctgcactaagcatattaagggctccagcaactcccaacttgtttccatcagagtcatcaatgaccctcctgtcgggatactcgtactgccacaggcgaatggaaccagttccgccgcccgtgagaaagagatcccgattctggggcagatgacgaactacccaaacggtggctttgggtccgctgatcacgccatttgttcccacgctgcgtccggcgttgcgttcctccacgtaactaaatcccttggtcggatgttgggttctcatatcgaagacaaggagaccgccctccaaagtggtgaccgctagcttgttcatgggaatgtcccggcgatcgaactccagtccacagataccattcttcatggtggcctcccagcgtacggaaagggatcgcaaatcgaatatctttagatctccattatcatagccggcggcaacgatgcgctcctcagcgttgtaggtatttccaaaggccacggcccagcagtcccggcggccactgctgttgttaacgccatcgcccatttgcggcggcggcgacatgtccaccacaggagcct

SEQ ID NO: 11021 - DNA, 2397 bp, DROSOPHILA
atggttgccgatatattcagtgaatattatatatgcaatttcaacgatgcggtgacagttgaagatctgcccgcggatgagacactgcgtcaattgtggacccgccagaaactgtggacaatagatgaactccgggagatccttcaacgctggcaggagcatgtcaagccagatccgaatgataatcccacctcacaactcaaggatttcctgctgctgatattcgcttttgttcaaaacagttttactgggccctttgacaaactcgaagagtaccaacaaatccatagtgaactagagctggagaaactcgacgcactcgagaaactgaaggccagcggcgaggaactgaatccaaatgtaaaatctgtagaactactactgattgccagggaaatccttgagggacttttagaaaaccatccagaatcaaaggtcctgatttggtggcgattgcgtctgatctgcctgcatcaacatgtgctggatgatttggcggcctccctgtatgagcagtttaagtcagcagctggacatcttcaggctcatttcaatcagtttgagagcagggaactgcaatccctgctactactggagttggccaatggctacctgcagtttcatcgctctgaaatagcctcccaaatactggatgaactgtgcaagcatctccaggtggagctaaaagttgagggtttactaggagtacgcaccaaattccagcagaaggccctgccacaactctgcctcaaagttgagcatctaaacgagcagcagcctctgcctccagccgtccaaacaaatgagacgaccaaattgccaaaactgcttcttctggaggatgacacgcgactggagcggatacgctttgtggaactgaaggacaacgaagtgatgacgcttcccagtgttctccaagctctggtgctggccaaagtaaagcaattgaaacgctcaacgcctaaggatcgcctggcggatgaacaactggagccgtatacacaaaccctactttaccaggaacacggaccattccaagtccggcagtcagcccttcttctaaactgccttcaggaatcgaatcaaagaaggacagtcgaacgcagctggaaacaatgcgaggagtgtgtcaaactgcttgacacctccgaggaggagctatcgctgcgatcccgactctcctacggtttcgccgcccacttgagtcccaagtggcaggtgcagctacagcttgtcgacttgctgcgatccttgggcatgaccaaaacagctctggacatctgtcttcgcatacacgcctggcagcaggtgatcgagtgctacacgagtctggaactccgtcacaaggcagcggagatcatcaggcaggaactggagaagaagccaacggcattgctgtactgcctccttggcgatgctatcgatgatccttcgttctatgagcaggcttggttgtattccaaaaagacaagtggaaaagctcaagcctattggggcaaccatttctataggagtgcggattatgcccaggcaatggatcacttcgagatttcgctagagattaacaacttgcaggaagcgattcttttgcgctgtggctactgtgcaatccaactggaacgctgggagccggctgttaaatattatttggcttacacccacctggaacccaatggattcgaatcctggaataacctagccaaggccctgattaaattgggtgacaaacagcgggcccatcgtgttcttggtgaggccttgaagtgcaactacagcaactggaaggtttgggagaactacatgctggtgtccgtggatacttcccactgggacgacgccatgcgggcttaccagcgcatggcggagctaaagcagcactacctcgatcaggaagtgctaacccgtattgtttacggagtttccaaggaggaccccgccggctcaagtgctctgatcaaaagactcataaagcttctgggacagcagagcattcaacatggtaacgagcctcttgtgtgggaactggccgccttggtggcccaaacgccactgaagaaggccgagaaactggtaaaatcgtatcgtgcgtacacaccgaagcatttgggctgggaaaccaagtcggagcacgctttaaaagccctagatctttgtttagaggtctgcgatctctcagtggcggccatcacagagcacattcaagaggaaagtgaggtaatgattacctctcaactaaattcagccagactggcgggaacatcttgtctgaatgctttgaagagagccataaatgtggatgtatcggcagaacagactgcaaaagtggagcagctggaaaaacgcatcgaagacctgacaaaaattgtccaggaacgaatgaatgcgtctcgatcttag

SEQ ID NO: 11022 - protein, 798 aa, DROSOPHILA
MVADIFSEYYICNFNDAVTVEDLPADETLRQLWTRQKLWTIDELREILQRWQEHVKPDPNDNPTSQLKDFLLLIFAFVQNSFTGPFDKLEEYQQIHSELELEKLDALEKLKASGEELNPNVKSVELLLIAREILEGLLENHPESKVLIWWRLRLICLHQHVLDDLAASLYEQFKSAAGHLQAHFNQFESRELQSLLLLELANGYLQFHRSEIASQILDELCKHLQVELKVEGLLGVRTKFQQKALPQLCLKVEHLNEQQPLPPAVQTNETTKLPKLLLLEDDTRLERIRFVELKDNEVMTLPSVLQALVLAKVKQLKRSTPKDRLADEQLEPYTQTLLYQEHGPFQVRQSALLLNCLQESNQRRTVERSWKQCEECVKLLDTSEEELSLRSRLSYGFAAHLSPKWQVQLQLVDLLRSLGMTKTALDICLRIHAWQQVIECYTSLELRHKAAEIIRQELEKKPTALLYCLLGDAIDDPSFYEQAWLYSKKTSGKAQAYWGNHFYRSADYAQAMDHFEISLEINNLQEAILLRCGYCAIQLERWEPAVKYYLAYTHLEPNGFESWNNLAKALIKLGDKQRAHRVLGEALKCNYSNWKVWENYMLVSVDTSHWDDAMRAYQRMAELKQHYLDQEVLTRIVYGVSKEDPAGSSALIKRLIKLLGQQSIQHGNEPLVWELAALVAQTPLKKAEKLVKSYRAYTPKHLGWETKSEHALKALDLCLEVCDLSVAAITEHIQEESEVMITSQLNSARLAGTSCLNALKRAINVDVSAEQTAKVEQLEKRIEDLTKIVQERMNASRS

SEQ ID NO: 11023 - DNA, 3444 bp, DROSOPHILA
aagacgacaagaattccgagttccatcaagtggaaatgcgcaggacgacgagtagaagtccttcgcctctaggaaattccgatccgtaagactgattgtatttcatatgttttggattaactctaaacaatatatattcttccttcagcttcgataagagccccaaagtgcgcagacgtaccgccaagcgacaagatctgctttttggggatacggaactttcagaacaggtgagcgttactcattttgaaaaatacctgtttctaaatgacgaatattatgatttcatccgccagacttttaataaaatgacgtgatcgtgcaatcgaagatgaggtcatgtgaccaaagacgcggttggaattgaaatatattgattggtagccgcttgggaacaaataataaaaagacagtgtcaataagtttctaagttattattgtaactatatttattcaaaactaacttactagtgcttccgtttgttttttttgaataccgagctaaggtcttgtgcaattggtgtctttgcagttgttcaaaataaacaaattttagaaaatattataataatgtattaataaattttataagagacttagaacaataccatgccttgaaatatacaacaaaaaacttaattttatcttttcctgtaagaacaaagttcttcagcagctttgtgctaggtactaaaatgttgacccaagttttggagatcctatattttacagtaaatgtaaatgaatcgatttaaaagcatattctaataataaaaatatatagtattggctaacattgtgacccttattaaaatattgaaaaattcaaaaagtgtaattaggacaatgtaacaataaactgtataacgttatattgaaatttacaaaatgacttttcttttgtggttaaataatattatttttaatacatatttgtaaatagattcgtttgtaaaattttgaacttgatagcctgcatgtgataaaaataaatcgatagtcgaatgaccccaacaagtgttttcgattaccatttactcttccgctatcttgacattcatcgagctatcgatttttaccggtaattcgcatttgcaactcgcttccatgcgcattttattgtattaaatttctaccaatatatcaaattatagttatgtcggaaaccagtggacccgcagtgcgcatgccttggtaacttgtaattagatcttggaaatccacaagtaatactattttcatttcttcagggtggaaaagtacagaccaagcggtctcgatgatttgatatctcacgaggaaataatatcaacaagtgagcattctgagcgtttagccatacaaagccaccacatttaagtgtacttctagtaacccgctttataagccgcaagcagctgccccatttgctgttctacggaccacctggcacgggaaaaacgagtacaatcctggcctgcgctcgccaattgtattcccctcagcagtttaagtccatggtcctggagctgaatgcctcggatgaccgaggcattgggattgtgcgcggtcaaatccttaacttcgcgtccacacgcaccattttctgcgacacctttaagctgatcattttggacgaggccgatgccatgaccaacgatgcccagaatgccctgcgccgcataattgagaaatatacggacaacgtgcgcttctgtgtgatttgcaattatttgagcaaaatcattccggcgctgcagtcgcgttgcacccgttttcggttcgctccattatcccaggatcagatgatgccgcgactggaaaaaatcatcgaagccgaagcgtaaggtctttcaactgcataaaatagcttattactaacctaaaatctatcaactatcagcgttcagataactgaggacggcaagcgggcactgctgaccctggccaaaggtgatatgagaaaggtcttgaacgtcctgcagagtaccgtgatggcatttgatacggtaaacgaggataacgtctacatgtgcgtgggctatccgttgaggcaggatattgaacagatattgaaggccttgctatccggcagtagcttggaggactccttcaaaagtatgatgcgatttgaaatggcgaaagatcaaaactaatgattctttcttctctttgcatagctgtcgaaagtgccaagtacgcaagaggtctcgctttggaagacatcattacagaattgcatttgtttgttatgagacgtaagtttttatcaagttatcatcaagtcaagttattgatatgtattccaaacagttgagctgcctatgtcggtcatgaacaagcttattgtaaagctagctcagatcgaggagagattggccaaaggatgtacagaagtggctcaaactgcagctctggtagccgccttctttatttgccgagatatggtttcaatggagaagtgaaacaatgtgtactccaataataggttagaattaaattataaatacaaaaacataaaacacaatttatttactgcatgcttctctagtttaacaatcattaaacctttttaaagtggtttcagaggtaggaaatttttttttgttttttttttttttttggatgatcatgcgaaacaatatatgcataaagagactagaattctatgacgaattaattcccacacaagagaattgtttaaaacattaagaacattaagaattgttttaaacaatatttaagagaacccctctgatctgtaccattcgtggaacttctcgatatgctcaaagatgccgcggtcctcgctgcggcaccatacatcgtctggtgttatgttgacgcgttccaaagctgcctgcgaggtgtcctgaatgcgcgggtcatcctctttaaatcgcagcacacacgtaccaatgcactcacccatgcatgtgccgtgctcaaattcgtagataaccaagtagaaaaatggttcgccagggcattgaaagcccgattttagcacaagtaaagtatttggatcctctttcggcagtgacggtgagttgggagctttcgccacagcttgttcctgcggctgtggacaatcgaaagtttgtgatactagctgcgttgagaagctggcttctggctgcggtgagtgtggaatcgtgtttaatgctgtttgctgcgttaattcagggtttacgtttattgctgttgtctgcggtaagtcggggatctcacttgctgctgttggctgcggtgagtcggggatctcacttgctgctattggctgtggtgagtcggatgtgtcccttcttgctattggctgcggcgagtggttctcatcgatggacgtctttggcgacgcctctggcgaatcaggaatttccactatcatctcctcctgtggcggcgataaggataacctctcgcttgttgcgttagatttcggttggctgaatataaccgtgatat

SEQ ID NO: 11024 - DNA, 1050 bp, DROSOPHILA
tcgaatgaccccaacaagtgttttcgattaccatttactcttccgctatcttgacattcatcgagctatcgatttttaccggtaattcgcatttgcaactcgcttccatgcgcattttattgtattaaatttctaccaatatatcaaattatagttatgtcggaaaccagtggacccgcactgccccatttgctgttctacggaccacctggcacgggaaaaacgagtacaatcctggcctgcgctcgccaattgtattcccctcagcagtttaagtccatggtcctggagctgaatgcctcggatgaccgaggcattgggattgtgcgcggtcaaatccttaacttcgcgtccacacgcaccattttctgcgacacctttaagctgatcattttggacgaggccgatgccatgaccaacgatgcccagaatgccctgcgccgcataattgagaaatatacggacaacgtgcgcttctgtgtgatttgcaattatttgagcaaaatcattccggcgctgcagtcgcgttgcacccgttttcggttcgctccattatcccaggatcagatgatgccgcgactggaaaaaatcatcgaagccgaagccgttcagataactgaggacggcaagcgggcactgctgaccctggccaaaggtgatatgagaaaggtcttgaacgtcctgcagagtaccgtgatggcatttgatacggtaaacgaggataacgtctacatgtgcgtgggctatccgttgaggcaggatattgaacagatattgaaggccttgctatccggcagtagcttggaggactccttcaaaactgtcgaaagtgccaagtacgcaagaggtctcgctttggaagacatcattacagaattgcatttgtttgttatgagacttgagctgcctatgtcggtcatgaacaagcttattgtaaagctagctcagatcgaggagagattggccaaaggatgtacagaagtggctcaaactgcagctctggtagccgccttctttatttgccgagatatggtttcaatggagaagtga

SEQ ID NO: 11025 - protein, 297 aa, DROSOPHILA
MSETSGPALPHLLFYGPPGTGKTSTILACARQLYSPQQFKSMVLELNASDDRGIGIVRGQILNFASTRTIFCDTFKLIILDEADAMTNDAQNALRRIIEKYTDNVRFCVICNYLSKIIPALQSRCTRFRFAPLSQDQMMPRLEKIIEAEAVQITEDGKRALLTLAKGDMRKVLNVLQSTVMAFDTVNEDNVYMCVGYPLRQDIEQILKALLSGSSLEDSFKTVESAKYARGLALEDIITELHLFVMRLELPMSVMNKLIVKLAQIEERLAKGCTEVAQTAALVAAFFICRDMVSMEK

SEQ ID NO: 11026 - DNA, 2483 bp, DROSOPHILA
ggccagcttggcagctagctgattgcgatcgaggcaataagctggcgcagcaaacgatcgaaccgaagagttagcttaggacgtagggaaattacattaggttaagcacgggtgcagccctccgacatttatcttacaagtgggaacttaaaacaagttagcctataatacaaccatatatttctataatatatattgcttcgattgttggagggtaaactagattcttggtgtcggactgctagcgagactgcactttacgcatttgaaaaggaaacaaaaggttttgagtagtcttcctatagtggaaacaggcacagccttcactacacacacgtaaatgctgtagctttcatgcagtaattgtatttatgcttagagttaaaacatacgttctgaacgccatatacaatatatcttagactatgcttaaagattataataaattgaatcatatacagaaatcgtcgaagaatgatgcagtggtacttattttactttcggatgtatgcctccaggatgcagatgactggagcactaatgttttcattctttatgcgattgtagttttatgtattctaactactttcatttctgattgcgtttttgaaattcgttctctatttcacgatgatttcgacggaatactattccttttataagataaatacgtttcttggcttgttccctctgaaataatgagtaaactagaggtttgccttcggattttcggtaatctgctcgtttccggattttggaaggcttggaagtaattgaattttacgaaaacgtagacttttgcattctactatttttctatagttttatcatactttaaatattacttcaatgactgtaatagcttcctacttctttgaggatcagtggttgactccattcatgctcctgaaaaaccaatactgtatcgttctctctagcaaattctttaggtttataattaccccttcttcacgcacgcttttggcctcgacaattgatcctactttttcttcttggcctgtggcggtgccgccggattgtcgcccttgtagaaatcctttagcagagccatcgcctcatccgcccgcacaccgcccgtgatctcgatcctatggccaacgacggcggccacatccacgaccgtctttcctccgaaacgatcgttctcacagccgtagatgatctccttgacgcccagagtgtgcagggcggcggagcacataatgcagggctccacggtgaccaccacggtgatctcgctgaacagctggcgggccggcagacgtctctcgcggcagctggcgaggatagcgtcgatgcaaatgaattccgcgtggcgagtggcgttccggtggacgttcacctcgttcccgccacgtgcgaccaccttgtccccatgaacgaacacacagcccacgggcacctcgccggcgtcacgtgcccgcctcgcctccactaacgcttcctccatgaaggcggccatttggcatggaaatagactcgggcgaactgggtgaaaagccgcaaacagatgagatgaaatgaccaggtcaacaaaaacaatgggtagctctcactcaggcggcactttccagcactgcgcaacagctggcggtcacggtgagcggtcactgtacgagcggtcacggtgggaaagcgaagtcaccttttgtatttggggtattccccgcaaataaataatatctcaaaataaaatagagaattctgtttcaatagaatactgaaattattaataatgtattctcttttgccactcacttataaatgtagagctttaaagttatagtatgtgcagtaatatccttatatatacatagaatgtatttgtacagatacagatatgtaaatactatctaaataattgaccatttttgcttcaagcctcattccgcatgaatcggattaggttgtgctcctccaaaaatgcttgagccttctcgggccaattggtattattagtagaacgcggactaggatgcggcagtcggagcaccgaaacgcaattggatttggcatatcctgaacgcttcagtgcgctgtgaacatactccccaacggccacaatcacgtcgggttggaggagcttcagttgttcctccagggtgtgcaggcacaggtctcctagctgatttttgtaagctcctctgatttcactgggcgttatgttcctgccatctgcgccaaagaaagctagcggacagaaattgtggacgaaacactgctgggagaaggtctgcatgctgccagccagtcggaggaacagctcccacaaacgcacaccactgggctcctcaatccgacaatccaagccagcgactggacgtttgggatgcacgactggaggttggtccaccgaaccagccagctgcattaacaactttactgtgcgcacattgccaaagggaatctgaagcagagcgcgtcaatgtatcaatatgttcggataatctacaagattaagc

SEQ ID NO: 11027 - DNA, 483 bp, DROSOPHILA
atggccgccttcatggaggaagcgttagtggaggcgaggcgggcacgtgacgccggcgaggtgcccgtgggctgtgtgttcgttcatggggacaaggtggtcgcacgtggcgggaacgaggtgaacgtccaccggaacgccactcgccacgcggaattcatttgcatcgacgctatcctcgccagctgccgcgagagacgtctgccggcccgccagctgttcagcgagatcaccgtggtggtcaccgtggagccctgcattatgtgctccgccgccctgcacactctgggcgtcaaggagatcatctacggctgtgagaacgatcgtttcggaggaaagacggtcgtggatgtggccgccgtcgttggccataggatcgagatcacgggcggtgtgcgggcggatgaggcgatggctctgctaaaggatttctacaagggcgacaatccggcggcaccgccacaggccaagaagaaaaagtag

SEQ ID NO: 11028 - protein, 160 aa, DROSOPHILA
MAAFMEEALVEARRARDAGEVPVGCVFVHGDKVVARGGNEVNVHRNATRHAEFICIDAILASCRERRLPARQLFSEITVVVTVEPCIMCSAALHTLGVKEIIYGCENDRFGGKTVVDVAAVVGHRIEITGGVRADEAMALLKDFYKGDNPAAPPQAKKKK

SEQ ID NO: 11029 - DNA, 7466 bp, DROSOPHILA
atttgattcgccaggatatgctaaaacaggagtaggtgaggaagtcgaagcacacgacgcgacgaagaaagaattccactcaaattgcatttattggagaaatatttataataacttggaaattcaatttccaaagaaaatatgctaaacggatttcaggggggtactgcagtcgacgagggtgtggaaaaggcagaaggactttccgaggtgaggatgccagtctgcatgtgtgtgtgtgtgtattccagtggcttgtctcgtgtcaatggctcgtgtgtgtcgcctgtctgtgtgcgtgcagagagatatgttagaaaattaaaatcgaccatatgttgcctcatcgattttgataagtcgcccaacggcagcacagcaacatgagcaacatggggcgcggcatgagtagggagcagcagtagcagcagcaacagcaccatggccgcttcatatccgtttccgctttgacacaatgggcgcacaatgcgtggcactcgagtgctgtgcgagtgtgtgtgtggttgtctgttgctgccactgccactttcaattgcaaaaagctggcttaaaaaggcgccttgtcatgcatgagttttccgccttctattattgatgttgttttgtgtttttgtgtatcattattgctggtgctggtgctcgctgctccattgttgctcctttcttgtcgccggccgatctgctgctgtctgccgtttgcgtgacacaaatcaaacgtaccctactaaatatttcataagcacattcagccacgcacctccaatgaactttaaggacatgcaggagcaggtcttaaccctccgacaacccacccacgcctcctaatatgatacgatggcttaccattcaatttggcttcaataaatgttgccgcaacatgttgctgttgcgccggcgcaaggacactgcttctcctggagatttgcatattgttggaggattcgctggagcagctccgttcagttgtttaccgcgcctcaagccacacacacgcaacgagcgctgacaaaccggaaactcggggaactgtgtcccgtgacccgtgaactgctacccgtgactctgggaaatcgctagccgtgactcgtgttcggcctgctcggctggctttcgtatctcgtatctcgtatctggcgtctcaatcggaatcggaattggaattggaatcgcgtcattggagtgactgattttgcgaattggtggtgctggtgatggtgctggagtgtgtcggagtgtgtggatgagtgctccttacgtagcgtaagggctgttacgtaagccaaggacctgctcgctccgcggaaaaggacacaaacgcaacgcgctcgaatgcgttacgttgcgcatgagatggcggcacgcagttcgcgctacatttacttcgaccacggccaccgaatctagtccgctcataggaaaaggtagctcctcatttgcgctagtccctcagttcctcctccttctttttagctccacgtccctgtcgaatataattaagtgtattatcagaacgtgaccagagcgaaattgctgcctgcgggcgaggtaaatgctcctgcttttcctcatccgttggccagaagcaattgaatggacagcttagtgtgtaatgaagaaattaccaaaagctcgaatccaaccaccagcccccctccacttccaggatccttctaacgacccaacggaaggcaccccccatccccctgccaaacactcgcaaggacatcttcatctcgttcttgtcctgtgggcgtcatggtgattgaaaactcgaccgcactgcggtcttgtcatcagtttaaatgaatgtgctgcggtttccggagcaccgataagacggagcccagagcctaatccctttcagttattgtttctgcacaattgtgggctaaaaagtgggcggggctggtggcgagtatccttcatctttagcttcatcttttgtgtgttgcctttcgagtcgatttgagtcgcttcggttcggttcgagttgaattgagtagagtcgagttctccgcgattgccatcatttattttaattacttttctgttgtcgccctacccactttgctcctgctcttcgctggtggtccttcgtcctggctgcagttataagtaattcgagagccccacaaattgcgcatgaaatgttggtggaatactttatggcgctgctcgtgatcatgggattaaccgctccagtcgacaagcagagccggcgcagcagccaatacttcggtgagtacggatttaaatctaatcagacaacactcaaagggttaagccaaccggggactgggcagtcgtatcagaaatggcataataaatgagaatcgcagagcgaatggtattgggaatcggaatcggaagtggggaatcgggaagcgcgaagcaatctaattagattgagggatatggcggggattacaaggggtcactgatctcgcagttggggcagaggacacactttaaatactcaactgcttaagcggttaatgaaattaaaaaactaaattgctaataccttaattaaaattacttttagatagattaaaggagttaaagttaaaggagttcagattaaaggagttaaacgagcacaacgattatgacttgaataaaagaaattaactctttttttcgccatatttgatttatatttgatttataattttttgtgcaacataagcttaaacgtaaaaagcatgttttattaaatttcatacaattagtactttgtgaatttgtatttccattttttcatatttctcaaatccctcaacacatatttgcctattaaattacacttatggaaagtaacttttccggttagttattttttcacacagatgtttttttttttttaagttgcatacatggtttattcatttaaatcctgcaaacttttaatgtggtttaatgtggttcaacacaaagttaaattccgcttcgctttttgcaacggaagggagcaagctgcctaatggataactgatctctaaaaggggatccgaattaggtaatctgcactcgcagctgtcaggaattgtttatgatcccatctatttcgcatctctctgctgcgagtgaatttgatgcgggacccaggagcagctgcaattgctcatttgtaatttatggcacctgaactcagtttagggcccgcttggggaactgcagctagggatgatggggatatggtgatgaaggaagagccggaggttgtggatgtggatgttgaggtcctgcagaagcgttagccatggccactgaagctgcggttgcggttcgacccggcaattttccaacttaccaccccgcactttgtatgtaaatacgcaacttttattaaaaaattttatgttgttacatatttcctgccgttgtgcgggaacgtgtgtgcgagggagttttttttttttattttgtggccagcataaaaagcaatttcagttcaagtgccttggcctggccaaaagcaaaagcaaaagcaacagccatagcgaaagctaaagcatcgtcatagtcatcggctgcggatcaacagtttcaattaagtgttaaacgtcattttattgcctgatatttgatagctaaatttgctcaaccacactcgcacacaatatggatcctggcctataaatcaatatgtgtttatccactccacatccacatatccacataaccaatcgagtagtacccagtcccttctccttcacatcccacgcacagctgtatttgtgtttgtatttgtttaggcactcatggattattagcgcattagttggctaatacatcgccatttgggcggtggagctgcagcaacaatagcgccaatagcaccaccacccacataaatcacttggccgcccagcgatggatcataaacgcgggaatggctccaaaggggtgtaggcttaagctccggcataaattaagcacaaatactcgttaatcaaatgaatgctgattgccagctgaggcatccccgccagctgattgagccaaccaatcgaccatccatctgtccgtttgtccgtccgtctgtctgtccgtctgcatatctatctattcatctatctatctgccagtctaactgtctatctatccgacgcttcctgtgttcatctgcctgcctgcctcctgggctcaggtcctgaaatgcacttgaatacgtttagattgacgttcagatacaactggtggaatgaactacccagggaatatttaatgggcagcttgaatatctaggccctttatgtactaacaatatatattggcatagattctgtttccgcggggataaatttgacgtttagagggttattcatatccttgggttcttaaaacttattcaacttattcaaccttttaaataattataatctgtttactgttttacaggccatctggccgccgccgaggaattgtccaacttgataccagataattacgatgccatcgatcccgtgtttgacaacacaacagatcgggaggttattgcagctttgggcaccaccgcccgtctccactgccgcgttcgccacctgggcgacagggcggtgtcctggatacgacaacgggatctccacatcctgaccatcggcatcatgacctacacgaacgatcagcgctttctggcgcggcacatcgacaactccgacgagtgggtgctcaagatcgtttcggtgcagcagagagatgcgggcgtctacgagtgccaggtgtccacggagcccaagatcagtctggcctacaagctggtcgtcgtgagtaagtatctttcactaagaagagctatgaacaagacacttgtcacttttgagcaaatgaatatatccaaaactatatttactgataatatccttgtgttcataacgaatcgaagggcttcaaataattctctgttggtatgtacataccactaaacattccaaatccatttgaatccgcttaagtttgttccgaaccctttcatgacccatcataattattcaatcgaaattcagccccaagttcctgttttattactcccattgaatctcaatcgattggcggtcttgtaagacgttgcttacatctccgtttagacagcagcgcaagggcgcgaagggctgggattactttgacaaattagtttatcaaacaccccagtacatcacacgacaaactaggatggggcatgggaatagggattgagaagttgaggggttgagggctatggatccacccaataggcaacttgttgacatacccattaatcgaaaacgacgccgctctttgacagcctccaaggctcagatcctggccaaccgcgagctgttcatccagagtggcagcgacatcaatctgacgtgcatcgcaccccaggctccaggaccctacacgcacatgctgtggcacaaggacacggagctggtaagcgactcggcgcggggtggcatccgcgtagagtccgagcagcagatgaagaccagcaacctggtgatatcgcgagtccagcacacggactcgggcaactacacctgctccgcggacaactcgagtgagtcctttagaaatgcatgaactgttagattaaggacactaggtgaatacatatgcgattaaggtgtgtgtgtcgaaaatttaatttaaatccaattagtccaagatggaactgacagttttacaacgaaagttcgatttcattaaatacttaattacatttgaaacacgccaccaactgactcgtataaaatatttacacatgcacatgactatcgaaaagtagttgcacatataaacatcgtaaattaaccatcaaatactgaaaatcaaattaattcaattgcttacttatttatgggtgtagtatacattgtgatcagttacaatgtaaaatatacagatttcactttatccatagctacaaggcattaagttaatggtggcttattgcataaaataatattctataattgagtttacatattgaatgcatataaactcaattatgaaattttattcgaaaatagcagtgcacatttattattgttatttattcaaggagatacagtttttaaaaaataactaatgttattacaatagctaataatactcttgctaaagcagccatacattatacattcaaataattgttttcactgcttttcgtacagagtatgccagctttaatatttaaattcagccctttaataagtaacgacctaaaatatttattttacaattttctaacccacccttttgccaccttttcccaacagattctgacagcgtctttgtgcatatcattaaaagtgagcagcacgcggccatgcagcacgagctgggctcgaggctgctcctgccccctctgcccctgttgctcctggcggtcctgctggtcgtcctgctgggccccacctccagcctccagattcgcaccccgctctcaacccgctaagccgagccaaagacgagcggcaacttatgttcgatgtctggagccatgggagccccgttattcctggtggccgggtaagtcggtgatttttaatgccaccatcagctcaggagtcgtagtcatcatctcgttacaggccacgcctccacgtcacagtaaccgcccacattggaggagcccggtagaaattgctggatgcggaggttaacgacgtcgatgtcgcgttgtcttgtaaatatgtaaattgagtttttgtttacgtttgtgtttgtgttttgtggctcagtctctaagtatttttatacgtaattaagtaaataggtggagagagcatatgtgctggctaggctatatatagtcaatcttggctatgtggcaaatgggacatatacattttgttcacacacgatcgcatacctagagatactaaaaacgagcaatcgaatccgaatcgaatcgaatccgtaacgaatgtaaataaatgtttaatcttaataatagatagacgagatctagattaattatgataaatcggttgcaatttaattttctccaccaatgattgatggcgatatgaatgtgaacgaattcaattccgcctctgacatcctgcgacccggattatgccgcttaattgccggggcgatgcgttgagggttccagcggtaattgaaatacgataaggtcaggtcgggtcatcagtacatactttgcttcacacactccgccccattccaccggcaacgacatcaaagacggaacactttcacttttttgggtggcgaaggaaattgtgaagggaagtgcgacgacaggtgtgcctggagcaaggtaattgaaacatttgaggcgtgcataattcacactccacgccggcaattacatctgaagttctcggacaaagtttgtggccacaatgggatatcttggcaataagtacctgaatgcagggacttcagtgacaattccaagtgcttcaaaagcgccgacaacacaatga

SEQ ID NO: 11030 - DNA, 1424 bp, DROSOPHILA
aagccacacacacgcaacgagcgctgacaaaccggaaactcggggaactgtgtcccgtgacccgtgaactgctacccgtgactctgggaaatcgctagccgtgactcgtgttcggcctgctcggctggctttcgtatctcgtatctcgtatctggcgtctcaatcggaatcggaattggaattggaatcgcgtcattggagtgactgattttgcgaattggtggtgctggtgatggtgctggagtgtgtcggagtgtgtggatgagtgctccttacgtagcgtaagggctgttacgtaagccaaggacctgctcgctccgcggaaaaggacacaaacgcaacgcgctcgaatgcgttacgttgcgcatgagatggcggcacgcagttcgcgctacatttacttcgaccacggccaccgaatctagtccgctcataggaaaagccactttgctcctgctcttcgctggtggtccttcgtcctggctgcagttataagtaattcgagagccccacaaattgcgcatgaaatgttggtggaatactttatggcgctgctcgtgatcatgggattaaccgctccagtcgacaagcagagccggcgcagcagccaatacttcggccatctggccgccgccgaggaattgtccaacttgataccagataattacgatgccatcgatcccgtgtttgacaacacaacagatcgggaggttattgcagctttgggcaccaccgcccgtctccactgccgcgttcgccacctgggcgacagggcggtgtcctggatacgacaacgggatctccacatcctgaccatcggcatcatgacctacacgaacgatcagcgctttctggcgcggcacatcgacaactccgacgagtgggtgctcaagatcgtttcggtgcagcagagagatgcgggcgtctacgagtgccaggtgtccacggagcccaagatcagtctggcctacaagctggtcgtcgtgacctccaaggctcagatcctggccaaccgcgagctgttcatccagagtggcagcgacatcaatctgacgtgcatcgcaccccaggctccaggaccctacacgcacatgctgtggcacaaggacacggagctggtaagcgactcggcgcggggtggcatccgcgtagagtccgagcagcagatgaagaccagcaacctggtgatatcgcgagtccagcacacggactcgggcaactacacctgctccgcggacaactcgaattctgacagcgtctttgtgcatatcattaaaagtgagcagcacgcggccatgcagcacgagctgggctcgaggctgctcctgccccctctgcccctgttgctcctggcggtcctgctggtcgtcctgctgggccccacctccagcctccagattcgcaccccgctctcaacccgctaa

SEQ ID NO: 11031 - protein, 292 aa, DROSOPHILA
MALLVIMGLTAPVDKQSRRSSQYFGHLAAAEELSNLIPDNYDAIDPVFDNTTDREVIAALGTTARLHCRVRHLGDRAVSWIRQRDLHILTIGIMTYTNDQRFLARHIDNSDEWVLKIVSVQQRDAGVYECQVSTEPKISLAYKLVVVTSKAQILANRELFIQSGSDINLTCIAPQAPGPYTHMLWHKDTELVSDSARGGIRVESEQQMKTSNLVISRVQHTDSGNYTCSADNSNSDSVFVHIIKSEQHAAMQHELGSRLLLPPLPLLLLAVLLVVLLGPTSSLQIRTPLSTR

SEQ ID NO: 11032 - DNA, 3992 bp, DROSOPHILA
tttgagctttaagtgtcctgggggctttcgaaaaaaaaaagaaaacggaggcatatcaaggggtttttatatacacgtgtctgccatttcaagagctcttattctcctccgccactttggccataaatgtcatttgagccgcggacttgaaaattgaatttaaatttaatttcaagaccggcccgcagctatgcaaaaataataatgctcaaatgactcatacgcagtgttgtctgctggagtgttacattttaattgcttgatcatggccaagagtcagcgaactcgcatgatgcagcggaaaattgaaatgttttggcgcctgaactgtcattgacattcgcccagtggaaaatccttaaagtcgttggtgtaaaagcagtaattgcgcagccaacaaaaaacgtcaacgaccgcttttcccgctcttcacaaatttttcttcagacacacacacgctcgatattatttggtttcgtttcagtctgtgcgtgctattcattgcccaatatttacgcactccttagaaaattctgcgcagtaaaccatccaaaattttccagcaaggtgcgtttcaggaactcggaagtcaaaggcaattattgtattttttcaaatatatttttttcatttttgttaagtacaaaagtataaatgtataaaatgtaacattcctgaatttcaagcttttcaatagctcacacttacactttaccacctaaatatcaccaaatgctgattttacctgaatgtcatcactaaacgaatgaatgacttcctcatgtaccagagtgacgaacaacaagtagacaacgtatagcccaatcgaatacaagcccattgaacgacgagcgaaaaatcccaacgttgtggaccagagcaaaatggtaaagagtgccatgttaagaaatatgaaggcgatttcaccatattcttccatgtggtgttcagagcgattgcccaccaaacttcttacgtaggccacagtgttcccagttacaacgatagctaatggatcagttcagatattacactagtgcaagtggaaatagttcgaggtactcactgaaaaaagatcctccaatggcggatgcaaaagccatttttggatagccatgtatggccacagcggtgttcgcgaaaagagtgcccaaattcccagtaaatgccttcacagtggcgcccatgtagttgtcatctatggacaatatgtttccaatcacctccagtactgtatcgatttccgtggcgcagagaaagattaagaacatcgatcctgttagattcattatggtaaacacctgaaaaggagtattgatgatgtatttcgagttcttcgtgcattatcttcactgtagctcacccagtgataagatggtggcacatcagtccgtgcatgaaaaagaatgaatacggcaaatggcacagtgagcacgaaggaagaggctccataaatcagtgtgttctgcaggcttatataccatagaaaatttcctttcctatgcatgaaagctgaaagcaaacggaaagaatatattaataataatcaattacgagatgagagtattagtgttaactactcacacaaaaagatcgatattgatagtgcaggattgactactacattgatggcgttcagtagcttgttccagccatgtttctccatttcgtagtccaccaggggaatatagagtgtgcagatgacgacggccggagccctgatcaacagtagaacccggttaagaagttctgcctgcttccaagcctggcacttaatgggcctgagtgcaaggaagaaatccctgaagatcccttggttcttcgattgcgtataatccagtttcatatttcgggtgtagcgtcgattaacgctaacacggggatttcgaatcattctcattgtggtgtagcgtattctggttatcgagatactactgcttttttccaaaatctccaccctcgtatcctgtgaataatactcgagctttctctcaaggtcttggagtttcaatgctatttcaggtgtttgcttctcatccagaagtttttgcattttggtacgcgttgctaggaaattattttgttaacaatatatatatatatatatataaatatataattactcacaggctatggtcttttgcaataagtacacatctgccacgttgataatgatgtagctaatgtaaaccaagagtacaacctaaattttaagtcagtgccattacatttttgcgaaaaagagaaaatcgacttgggctattatgcttactgaaaaatttaaattcatagcccaatgcgaaatggtttgtcgtgtatgcaaagtaatccatcaataaagtcgctaagagaagaaataaaatgtcccggacagtttcgtaggaattcatcttgaagggcgaaatgtagaatattaggccaccggaaatcgtaatcacaaacagggctgacgacaagttattggcaaacacagggacatgtcgttcaacgctggccaagttggcgaaaaaatcggcagaagtgtttccaaatgccatcagggtaactcccgccaaatgctcgttcatatgaaggaatcgggatacggccttcagagcaggactatagctgcaaaagcaagcatttcaagctcaattttaatcttcgctttagttagctacttactaaacattgattgtgtaaattagtagaaccaatatctgaaagcaaaacgccacgaacaaggcgatgaagatcatttcctggaactgattgatacacttcagatcgcaggccaagagtctcatgtatggaattacatttgtgctcgaattgcagtcctccgctttctgtacgaactcacatcgctcctcgaacggaaagttgttggccgcaaaacagctaaccgttttccaaaaattgtcgaattccgcatccaacgcgtttttcacggtaaaaacatcggatttggttgtttttgtgtcgatggccggcattttagttttacttgtttgtagtccgaaatcttggcgttgaattgggtaaaagtgaaactagttctgggattactttgatttcctaagagctatcagaaaaaactaattcaacaattaattccggctacaatcgctgttttcgatgataatacttgtatttttttttttgcactttaaaccacttgttaagcttgtaaacttcataattaaaaaaaagttaaatgtaatgatgaaagattccccacagatgaggacgtccagcttccagcacattcttttaccaagccccattctttaacatttccctaccaaagccaaaacctccaactttttactgccctcccagcctcgccgtcagatttcaatgtcaatgtaattacgccgtagaatatatacatagtatacaaatacctactaccgattaccgactaccgcgtaacataaaaagccaaagcttgtcctgcgtctcggtgcgatgggaaatcaataaaaagaattcactttacgtcatcagctggtggataaagccgtcgctatagccactgtgccggcagcgatatgtgaaatggctcataataagatcaaacatcggggaaaattgggggtctgccacagtggccgtccgaaaaagtggacaccttgcgctaataatgaaattccttgtgcccgcggatgacagacggtcgttttgttattgcggaccttttacgctatgtgtatgaaatttataaaaaaaaaaattttcgcatacccatatataccatacagcccacacggttgctgttcttccagttttgtaccccgattgcggcgcatgcgtcctgctggtgggctggtcgtcgtatcctctgaactttcccagaactgctcactgtgtcgtctacccttaacgggtgcagttcgttctggtctcgagagtcgtgcgcgaatttcatttcctaaggccttccgctgactggccatcgattttgtgcagaaaagctcagagttttcatcagcgaaaagttgcccaaccgt

SEQ ID NO: 11033 - DNA, 1269 bp, DROSOPHILA
aaacaagtaaaactaaaatgccggccatcgacacaaaaacaaccaaatccgatgtttttaccgtgaaaaacgcgttggatgcggaattcgacaatttttggaaaacggttagctgttttgcggccaacaactttccgttcgaggagcgatgtgagttcgtacagaaagcggaggactgcaattcgagcacaaatgtaattccatacatgagactcttggcctgcgatctgaagtgtatcaatcagttccaggaaatgatcttcatcgccttgttcgtggcgttttgctttcagatattggttctactaatttacacaatcaatgtttactatagtcctgctctgaaggccgtatcccgattccttcatatgaacgagcatttggcgggagttaccctgatggcatttggaaacacttctgccgattttttcgccaacttggccagcgttgaacgacatgtccctgtgtttgccaataacttgtcgtcagccctgtttgtgattacgatttccggtggcctaatattctacatttcgcccttcaagatgaattcctacgaaactgtccgggacattttatttcttctcttagcgactttattgatggattactttgcatacacgacaaaccatttcgcattgggctatgaatttaaatttttcagtaagcataatagcccaagtcgattttctctttttcgcaaaaatgatacgagggtggagattttggaaaaaagcagtagtatctcgataaccagaatacgctacaccacaatgagaatgattcgaaatccccgtgttagcgttaatcgacgctacacccgaaatatgaaactggattatacgcaatcgaagaaccaagggatcttcagggatttcttccttgcactcaggcccattaagtgccaggcttggaagcaggcagaacttcttaaccgggttctactgttgatcagggctccggccgtcgtcatctgcacactctatattcccctgtcgatgttcttaatctttctctgcgccacggaaatcgatacagtactggaggtgattggaaacatattgtccatagatgacaactacatgggcgccactgtgaaggcatttactgggaatttgggcactcttttcgcgaacaccgctgtggccatacatggctatccaaaaatggcttttgcatccgccattggaggatcttttttcagtgagtacctcgaactatttccacttgcactagtgtaatatctgaactgatccattagctatcgtt

SEQ ID NO: 11034 - protein, 407 aa, DROSOPHILA
MPAIDTKTTKSDVFTVKNALDAEFDNFWKTVSCFAANNFPFEERCEFVQKAEDCNSSTNVIPYMRLLACDLKCINQFQEMIFIALFVAFCFQILVLLIYTINVYYSPALKAVSRFLHMNEHLAGVTLMAFGNTSADFFANLASVERHVPVFANNLSSALFVITISGGLIFYISPFKMNSYETVRDILFLLLATLLMDYFAYTTNHFALGYEFKFFSKHNSPSRFSLFRKNDTRVEILEKSSSISITRIRYTTMRMIRNPRVSVNRRYTRNMKLDYTQSKNQGIFRDFFLALRPIKCQAWKQAELLNRVLLLIRAPAVVICTLYIPLSMFLIFLCATEIDTVLEVIGNILSIDDNYMGATVKAFTGNLGTLFANTAVAIHGYPKMAFASAIGGSFFSEYLELFPLALV

SEQ ID NO: 11035 - DNA, 2532 bp, DROSOPHILA
ttaccgagcgcccgcgtgatgagcaccatatgtgttgtagttcacgctgaaaatgcgcaccttgtccttcagcaccagcttaccggcattcagatacttcagggtgcggcggatgggctcacggcccttcatgaacggcattttgcacttttaattcaaatacgcctaagtaaaacaaaagaaatccaataaaagagcggctgcttgtgtaatgcgaacagctgatcggtcggctagtggctcccacaaggcgcaagcggaactatcgatataagcgcggtatcgatgcagaccagaaatgtttccacttaaaagaaaaaatacgaatatttatatgtttttatatgggcgtggcagttttgggtggtttgtagacgtaataaagagacatcaggaagaaacctgagctgcttgcataatcttaactttccagcatttgctctgacgagcgttagagtgggtgtggtaacatttggaaacaaacttgcgtctacgtctctagaagctgcatgcttcatctcaatattctagcttttatagttcctgagatcgaggcgttcatacggacaaatggacagacggacagggtcggaacaactcggctattgatcctgatcaagaatatatatactatacatacggaaacacttccttctgccacttacatacttttcaacgaatttaaaataccctttactccacgcgtaacgggtctaaaaatgggtagaactattattgactaacataattagaaaacgcgttaaatcttcaatcttacattttttaaattaaaaaaaaatttttttttttgagcatggtctaaaaaagataaatgcttgcttatatttcatttcagtggagtacgtctattaaatgaaacaacactttcgatttctctggtcatatatcgatagatccgttaagccgaaccggctggctaatttgtttacctcttaaacttaaactttaaagcttcttattctaccacaatcagcaggacatggaaataacactcgctctgataaagccgcacgtgctgcggaatacctatgcaatgcagcagatccgagccctgatctcccagaacttcaccattcttgaccagaaggaggtttgcattacgaaagaactatctgagcgattttacgcggagcataagggaaaattcttctaccaccgactaaccagttttatgaacaggttcgtatagtgcctgggcacatccttaaatcctaagccacttagttggtataaccatttggtatatcttcttcagcggacccagctacgccctgattctccagtcggaaacctgcatccagaagtggcgcagtcttctgggtcccaccaaggtgttccgtgccgtgtacagtgatcccaactgcatccgggcattgtacggaatatccgacactcgcaacgcctgccatggatccgacagcgaggcatccgccctccgcgagatcagcatcctgttcccggagtttgacgcggctgttgggagtcgccaggcgaaaagggaggaggcgtagtcgaggagttcttgatccttagattgatcaagatgtctactaccaaagcagttcatgaaaaatgtttacatgttgttcaagtagctattggaattgtcctaatttatgtttcttatttttaatgcctggcatttttagattagtatttaggctagactagaatgttgtcatatggtatgctttaaaagtaattgaagtttatgatactttttgtgactagtgtactaatatgtttatatatttatatatatatattagcaaaacaaaaactatacttcttgttgataactaataagaattagatgattaaggaatttggcaatgttctttcgaaagaaaaatcgctgtaataaaagaagtcaattgaaaagttaattttttatgaagttactaacaacaccctgccgtagatggaactatggcaattaacttgagataacagcgacatgtgtttcaaaaactttatttcgtcaatttccggtttacataatacaattcttttgttattaggtggtaggtacatgtatagatagagattttcttttcgatttgctctggtttccgtttagctcattgtaaatagttggtaataaaattataaaatttataaacttaacaaattatataaatatatatatatttatgtgtgggtaagttctgtagtacgcctataaataggtaaagatataaatgttttgtatatcggttcagacaattgagaagcatagcaagaaattcaaaaacgggaaatatgtcattaaaaaacttcaaaattcttgtattttgtttgcgagcgagacggcacctgcgcacctgctgtctttttctaactcgtgtgcgacgagtccttcacgaataacagaaaactaatgtaaagaaaaaaaaatggcattttatgtatttataataataataataaagtataaccgtctctctaaatctagttctagttttggttgcaacgatttgtcaaagcagacacaagtcgcaaaaaaatgta

SEQ ID NO: 11036 - DNA, 384 bp, DROSOPHILA
atggaaataacactcgctctgataaagccgcacaaggaggtttgcattacgaaagaactatctgagcgattttacgcggagcataagggaaaattcttctaccaccgactaaccagttttatgaacagcggacccagctacgccctgattctccagtcggaaacctgcatccagaagtggcgcagtcttctgggtcccaccaaggtgttccgtgccgtgtacagtgatcccaactgcatccgggcattgtacggaatatccgacactcgcaacgcctgccatggatccgacagcgaggcatccgccctccgcgagatcagcatcctgttcccggagtttgacgcggctgttgggagtcgccaggcgaaaagggaggaggcgtag

SEQ ID NO: 11037 - protein, 127 aa, DROSOPHILA
MEITLALIKPHKEVCITKELSERFYAEHKGKFFYHRLTSFMNSGPSYALILQSETCIQKWRSLLGPTKVFRAVYSDPNCIRALYGISDTRNACHGSDSEASALREISILFPEFDAAVGSRQAKREEA

SEQ ID NO: 11038 - DNA, 4516 bp, DROSOPHILA
gaagcattacccggagttgcctgcactggattgaaattgccataatcacttgccggatggcagccttgaactttcccgatctcaggtgcgtatccaacttggccagcggattggtatttacattgtttggctgcttggatttttcgttttcgaattcgcctcgtctctgggagtggtctctcgtttattggccgtggctgatttgatatttaattaatggccatttagcggctttgtagatgcatataataaataaacaaattgcttggcccctgcattgttgactgcggccaaagttaatgagcttggtctttgaactttattaggctttgtcttcagctacgtgaccgaaaattcggtggaactctactgctgattgtgtgttagatggatatttgtagaaattatgaattcatatttatgatgggtttggtgctcaatctcttataatcatggtttcaaaaaaaggtcttatttttaaaatccaaaatctaaatgacttaaggactagcttaattttgactactgttctttttaaggtgcagtactgtggattaatccaaaaagtaaacccctttcattacatacttatgtgctttgcttaatttttatgcgcattgcctcgacccacacgcagtgcctgccaaggacggccaatgcaatttcaagtgcacgaattggtgggccaatgcaaacgactctcggccgacgcggcgtatgagcaacatccgctttggcggggcggcgcataaagtatacgcacccgagtccgagtccgagtcgagtgaaagtgcagtgcggtgaccctgaacgaggagagtcacgcctgccacctcctaccggctttcaaaatgcattttcaaatttagaaccgagcaacgtgcgagagaattgagagaattgttgattctccttctcagcgggttctcgtttcgattctcactgctatttgggctctctagtgagtttccattgcacttggactgccagtcgacgtttggcagttcggcgggcggttggtttgctgcaccattttgcacacgtttcgcataggtgtgctataaccaattctttggccagcggaaattgtataataattacggaaaaaaaaactgacctggactcaatttggatttgtgtcagtgctagaaagaaaatgctgcagcggcagaaaccaagttctagcaaacgatttggcagcagccctccaacacgaaccattcctcgtcggacagccaagtgaagtggatagaatggctttggcagcggcaccaacagcaggaccttcgcatggcggcttggcattgaccgtgagttcggccggtggctacgatggtaccaatcaatacgaggagaacgctgagcacttgcgtcagctgttcagccagagcaaactggtgtcctttagcattgcccacatcgcgtgctccgcgggcagtagcagtggcgacaactatatgtccgtggtgaagcgtgtaaccatctcccaggcaggaaaggatcaggatccggagctggctggcagtgaaatcggtaaagtggttcaaaaacatttaagtccattgcattgattttctctttaataccctgcaatgtggcttgcattaagggtagtactctttgttagatcgcattgtttgagaaattttgttgtgcaatatttagttaacgttgagatctcgtttaatcgagttgttgaaatattatgtgtacttgtaccaataatatttattttgtaccatgaatagagtattattcagttcaaaccttaattgcaacgatattagctgaaatgtttgcccgctgagcggcggcgtcgagtgggttgaccttgttacacgcattctaaatgcattgcacccatacacataggcatatacgtaatatagatttgctaaaggtcagcacgcacactcacacacgcgcgatagagagagagagagagaggcggcgaataagagtcgccactttgctctcacgcacgcaaggccagcacaattcattcataaattacaattttagctggcgacgtaaacaaaagtcagctgtttgccccagccgctctcacagtttgttttgctcggcgtttcctcacccaccccctctttcacaaatcattctcagataacacatctcttttatgatttgatatgaatcattgtttatttaacactgaatttcgatagagaatgcaatatttagatcatattaaattgataattaaactttttttctgtttagtcacggtcattgtgaagcgacaaattgcgagcctttcgcgccggcaactctaccgatgcgaggaggccttcagcaacgagatcaacgcctatcggcacttggcgcccctattagctgcccacagtcgtcatcagttgtttccggtatgccacattgcggagagtcaagatcggcgggatgcggaaggtggagaacccatcatcgtgcttcaggacctcaaagccatgggttttcgcatgaaggatcgtctggcgggcttggaactgagcgactgccttctagtgatgaaggtaagtgagtgaaagaatttacttgtagtcattgagccatagttattgagtgtcatctatttgtagaaacttgcacaactccatgctgcctcgctggccgctcaagagctggaatcctcttccttcgccttccatgctgatcatcttcaagagattgtctactgcgatgaggcgacggacttttacgccaccattctagacacctccgtgcagcaggctctggaaagtctaggcgacgccaatgcagacgactgcttgaccacgcccattcgattgctcgaggaacttcgtaccaatctgtttgaaaatctaaagcacgagattaatgccactgcggcggctccaaacagtgtgatctgccatggtgacctttgggtaaacaacattatgttccgctctgagccagaggaggtgatcttcttcgacctgcaggccatgcgcaagtcgtcgcctatttttgacattctccacttcatttacaccagcacgagaaggccactcagggatgtgcacacggacaccctgctggccgcctactcgcaggctttgagtgaggaactaaggcaccagctggaggatacaaccgctgccgaaaggctagaagagctatgtgaagcattctccttgcagcgcctcagttcggattatgttcgacaggtgcattatggactggctatcggcatgtggatccttccagctgttaccttcgatccgaataacctacccaacctggacgtgatgagtgaacagaatctcacgggcaaggagatcaagtgcacccagatgctcacttccgagtaccatatgcgcatacgggagttggtgatggaattctacgagctcggctatcttcagatgcaaaaggaaaccttgtaatagtattcatagtagtgtagtgatagatttaacttttaactctaatgttcgtaagaaatagacgctatatttgccctcgaagaactctctaaaaaggttctctctaaaaggttcctttattaccgaatagttgttcaatatgcaacttacaaaagtttcgtagaaaaaacaaatctggcgggggtaaaagcccaaacaaataacttataaaacggacataccgcagcgtggacatggatctaaaggctttataagtgtaacatggatgcgtggaattccagaagaatacgttgtagtggttagaatccacttcacttgtttccgcccccaccccatccgaggaatcccttgacaaagccggtaatggaggctcctttcttgccgggcgattcaagtttgccctccagcgagggaagctccacgtaggtcatagccaggtcaaagaaaatcggtttgcatggtatgggttccatgtcaggggttagcttgaacacgttaggcgccttggtgtgcagggactgatcctccttgtatagtgacaaacgctcatacagcggttttgtggtcttctgcgacttggtggtggttccggactcctcgctgttgtcatcctccagcacactgtatgcatgggcggagaacttgcatccgtcaatggcggacacgacctttttgagttcctcctgcagctgaaactccgggctactcttgcctttcagcgcctcggtggcgtagttagatgcgcgttcgtaaagcgccacggcttctttccatttctttatgtcgatgagtgtgagcgcaatgtagtagcagcggaaggccttgaaggtgatggccaggttctccacctcgctttggtacgtggcgtcgtcctccaaaccgtttatctgctgcatttccgtcacgttctgcaggatgatctcgtaaagacgggccaaatcctggggtcggacgcgtttgccgtcacccacattttgttgagactgcaggttgggatcgtaaaagttgagcttagcctggggaggaaatatttttgcataagataaccaagtaacgttgtgtttacgagcctacctgttccactaggcaaagattacgctgcagtgtac

SEQ ID NO: 11039 - DNA, 1742 bp, DROSOPHILA
gcagttcggcgggcggttggtttgctgcaccattttgcacacgtttcgcataggtgtgctataaccaattctttggccagcggaaattgtataataattacggaaaaaaaaactgacctggactcaatttggatttgtgtcagtgctagaaagaaaatgctgcagcggcagaaaccaagttctagcaaacgatttggcagcagccctccaacacgaaccattcctcgtcggacagccaagtgaagtggatagaatggctttggcagcggcaccaacagcaggaccttcgcatggcggcttggcattgaccgtgagttcggccggtggctacgatggtaccaatcaatacgaggagaacgctgagcacttgcgtcagctgttcagccagagcaaactggtgtcctttagcattgcccacatcgcgtgctccgcgggcagtagcagtggcgacaactatatgtccgtggtgaagcgtgtaaccatctcccaggcaggaaaggatcaggatccggagctggctggcagtgaaatcgtcacggtcattgtgaagcgacaaattgcgagcctttcgcgccggcaactctaccgatgcgaggaggccttcagcaacgagatcaacgcctatcggcacttggcgcccctattagctgcccacagtcgtcatcagttgtttccggtatgccacattgcggagagtcaagatcggcgggatgcggaaggtggagaacccatcatcgtgcttcaggacctcaaagccatgggttttcgcatgaaggatcgtctggcgggcttggaactgagcgactgccttctagtgatgaagaaacttgcacaactccatgctgcctcgctggccgctcaagagctggaatcctcttccttcgccttccatgctgatcatcttcaagagattgtctactgcgatgaggcgacggacttttacgccaccattctagacacctccgtgcagcaggctctggaaagtctaggcgacgccaatgcagacgactgcttgaccacgcccattcgattgctcgaggaacttcgtaccaatctgtttgaaaatctaaagcacgagattaatgccactgcggcggctccaaacagtgtgatctgccatggtgacctttgggtaaacaacattatgttccgctctgagccagaggaggtgatcttcttcgacctgcaggccatgcgcaagtcgtcgcctatttttgacattctccacttcatttacaccagcacgagaaggccactcagggatgtgcacacggacaccctgctggccgcctactcgcaggctttgagtgaggaactaaggcaccagctggaggatacaaccgctgccgaaaggctagaagagctatgtgaagcattctccttgcagcgcctcagttcggattatgttcgacaggtgcattatggactggctatcggcatgtggatccttccagctgttaccttcgatccgaataacctacccaacctggacgtgatgagtgaacagaatctcacgggcaaggagatcaagtgcacccagatgctcacttccgagtaccatatgcgcatacgggagttggtgatggaattctacgagctcggctatcttcagatgcaaaaggaaaccttgtaatagtattcatagtagtgtagtgatagatttaacttttaactctaatgttcgtaagaaatagacgctatatttgccctcgaagaactctctaaaaaggttctctctaaaa

SEQ ID NO: 11040 - protein, 459 aa, DROSOPHILA
MALAAAPTAGPSHGGLALTVSSAGGYDGTNQYEENAEHLRQLFSQSKLVSFSIAHIACSAGSSSGDNYMSVVKRVTISQAGKDQDPELAGSEIVTVIVKRQIASLSRRQLYRCEEAFSNEINAYRHLAPLLAAHSRHQLFPVCHIAESQDRRDAEGGEPIIVLQDLKAMGFRMKDRLAGLELSDCLLVMKKLAQLHAASLAAQELESSSFAFHADHLQEIVYCDEATDFYATILDTSVQQALESLGDANADDCLTTPIRLLEELRTNLFENLKHEINATAAAPNSVICHGDLWVNNIMFRSEPEEVIFFDLQAMRKSSPIFDILHFIYTSTRRPLRDVHTDTLLAAYSQALSEELRHQLEDTTAAERLEELCEAFSLQRLSSDYVRQVHYGLAIGMWILPAVTFDPNNLPNLDVMSEQNLTGKEIKCTQMLTSEYHMRIRELVMEFYELGYLQMQKETL

SEQ ID NO: 11041 - DNA, 5701 bp, DROSOPHILA
tcccactttgcccaacttccgaactgattttcgccttatttcgaccaagtcatttgcttttttttctgctgaacttgaatttttgtttgtaaaataaaacccctgcaatcgcatttagttgaaagacacgtgccgacaagttgtcaagtacaaagttcgatttatttgcgccgtgcaaaataaaaggtttaacgatctgcggatttgtcgatagaaactggcacacggcgaagacaatgacgacgcatagaacacaaggcagcagaggaatcagatcgcgatccgagatctcggcgactagaccacggctgctcacttcatcaagggggtcaaagtcaactcggcattcgcccagtcatcagcagactgaactccactaataaccccgatgcgaatttctagttctctgcagcgatatttatggccaggcattagggtgatggcaaccgccgaattgctcaatggcaatcagcaaaccttaaaatagtttttgcgccaagaaataaaattatatatggcttaatatagcaatcttcaccaaaacgctcttttagaagtctcagcttttttttttattgttttgattcgctttatgttttgtgatagatctgcatttataatgtatatggtgatataatatcttaggctccatgcgcgatgctctgccgtgtgggtgcagggatgcggaatttgtgatgtgctgtgtatatgtgtgaatataaaatcagacctcatttaacgatgaaacgtatgttcattactccatacaaccctaacaactctaagcggtaaggtaaatactaatgccacaaggggatcatctaattgcataacttaaagtaattgcttggctgacatggtagctcctttagatcctgttttagcaatggaacccttgagcggaagtcatctcgttttgccaatttcagatgcaagcaattctgcactactcgaaatgtaaatcaacttacgacaacattaagtagacaaattggaattttataaataattgtacatatattaatttctctactgcagatttcattcgacaatcaactggttttgcaatttttttttttctatgcaagattttgatgataaatgcgtgtaattgtgtgttaagtgtgtgtttttgtcttctatatggttccgttgattttgtataacaaggtacaaatgctccccaaacgctaaaaaggttgcattgtaaaactgcgctagttcgcattaatatatgttttactcgtactatgaatgggattgtatgtgcttttacgatgattgtttcttggcatccacttcagcatctaaaaggttattggttcgatgggaacagtgcattcgctatacatgacgcggtacatggccatttcagagatgccatggtagtggacaaaagcggccgcaatgaccagtatgtggaatatttgatgtgattgaccctgcaaaataaaagactgttagaacggtgcaaaggacaaaaccatcaagaatcgtacccaaatgtcaaactttccagggaaccagcgttcgggaacacggagggcgtacagcagtgcgcccagaatgtagaggaggcctgcaagatgtattttgccattgttttaccattattttaatatgcatatctacaagcactcacccatcagaattagccatcccagactggcgcggctcatctggctgaaccagccctccatgatgctgtagtgaatagctggaatcacacccgacaggccaaagctcataaatacgccagcgcgcaagggacgaagtgccggctccgaaaacttgtcccatagcgagaccacgatggagaggatgcccagaatgctaacaacggataggtatatcacctttggctggtaatgacagtagaagccatagtacagccaaggcacaaaggaacccatgatcagcagcgcaattccacagtagtcaagtctgttggtaaacaaaacaattaacataatatccatttaattagtcgaggaatacttacttagaaaacagtcttcccatctctacagaatgacagctcagtgtgtgaaaagcgaatgagaatcctaggcacacaatcgcaccgataaagaaggcgccaaaaacgatcttctcctgtgtctggatctcaaccgagggacgcgagatgaagtataatgccacgccgatgaaggcgatgcagccaagaagatgtgtccagatgttgcccgtttccgtgtgcacgcggaaaattgatttaaagcacgcacggaaagaggggagcggtgggcgatggccgcggtgtaggaagtcgttatcctgcagccacttgggtagatttttgtagtggcacactttccagctagcctcccagacctacggatgaaatggaaaaaaataacatatcattctatagataagacattacgtttggtaactataaacaaacaacaacaacaaaaaatacagtcccaacacttaatactatttattgaaataaaaacaaaaatacaaaagctacaatattacaaatcttgaagagtatcttccatttaagccattcttcacttggcagcatcacttggcttaccttgcgcacaaactcctctgcctgctcggcggcattgtgtgccaatgcgcccaaatcaatttcatcggagagaactccggccttcagcacttccgtcatctgtggaatagagtgataagacattaaacagctctcaaaacaaatataaaaagcttaataacaaagaaaaactaagagcaaatgggactaacgactgcattttcagcttgctccttgactgtgtcagggttttgggttctgtaagtttcttgactgagatccggctccagatccgggttgacacgcactataacctccggctgggtctgcatcttgagcggctaacagagattcgaacggaactagaactaaatgtgcgaggcaatgagcgattgtactgtgaagcctctgccagtcgcatactcaatttgttggcggaacaagaaagcaccgaatgcgttccgcgataagataagcttgcccgaaactgactccgggcattatcagcaccgcatcgacgtaaatttgtgatttttttccagcatctgtcgtataaagggctatgccaaagctttttgcgttcaatctaagcctgacctttaaagccggtgatcaaacgggcagattgtctagagtataaggctcaaagtcaagaaattttacttgacacctttcggacagacattaaaggcaaggagagataagaggtataactttcaaatggctatggaatatgctttaaattgagcaattgtatttagtgagtcataaaaatggagaaatggccacgataaggtttaagtacaatggttatggtacattttgcatgtggcaaatagacattggccaatgcaacatttcgattgataagacgcccgacattgaaatgactgcctgcgcagagggaaaattgcgactaacaagtggcagccgataaccacatggtggtaggtcagcgataagagctccgccacatgttttgacgattgcatttcgtacttttccacctggtggaaaatggaaataaaggttaatagccccaactcacctccgcctcaataagctgtgtgtcctccggggtcgaggggagtggacaaccggcgtcatcctcctcgaccaactcatcgtcgtactccagaatgtccagatcattggggctaagcgagtcctccggtccccagccacgtcgcttgcgcaggatcatctgcacctgctcaaagatatcctcgtctgaaccttctctacgcaaggtggccgtggtggtggtcaccgcctcgccggtagcatgtccttcggcgtccatgccgaaagtggctcgagcctgggtggttacctccacctcggcgggatggctcccgccactcacatcagccgctgagccctgttgctcgaggagattagtggccgaatccatggtcttacgatcccgcggattcgttttgcactccgcaaatagtattctgtaagagaaatacgttctgttcaatacgatacatacgaatttagttgttcgaaagcaatgctaagcgtttgttagctcaacgctagctcgtctgggaaatgcgatatttgtttatttgtttattggtctgctccgatcgcattgctatatagtatggcgcgacctttgttccccagtaaatcggttgtacgtagcacataagtctgtatctggtagctttgtgtgttttatcacttaggaaacttagctgccaattacgtttttacataagatggtgttcaaatgcgagtgggatcctcagtgggttaaggtgcagttgctatttcggggaaaccattatatagatagcaaagtgcatggaaaatgcagccagaaggccacgtgtgagtggaatactaccaactggcttaacccccacctgcactccacttgcgcagttcccattttttttatacgaagttacagaaagtgtcacaacacaaacgaacgattaatcactcgatttcactggcgtttcgttactattcacttaccactcgaaagtcgcgcagttggcgtggcttcgacggcaggcccaggagtcaacactggcgcgaaaaactatttgctgcacttgcttcaattgcgtgcaattgcagtttttcatctgttttcccttaatttaattttttctgtgttttttccagtgtgactgcaagcgcgatagggaaaatcactagcaatcatatgggaacggaggaaatgcggtcataccttgacgcagcagctgttaacggctgttaacgctactttgtagtcacagctctgtaaaacaatgtggcaactctgcgcagcgcccgccatatttgaaaatgcttgccagcaaatcgtattgctcccggtaaacaaggtgctttcattattagtcaacatttttgagagctaacaactttttattggcgatcaaaggtggtacttcaactgaccaaatattggatatttgcgtaaatacctaacaggcatttgttttttttttcatgagaaattaccgtgacgaaattacaagacgtatattatatgaatagaaaattttcctctagtctgtaaacacttcagtaacagagaaattgttttcaaaaaatgttaaggcatctcattaaaaaacatcaacaatgaactcaacttaagcctggtagttatgaattagcatgtgtagttccccgatatttaacctacttaagtatgcacatatctgccattccttggacacttttgcaaagacaacaaagacaacatcacagcttacttaaaatatatatatttaaattaattaattaaagtaatacaagaatgtctaattatagcttttttagaaatagcattacggtgttataaaaacccacaaatgtaggcaaataacaattctaataataaagaaacttaattgggaagacaaaatggtgtttggctagtgaggaaatatcaccagccttgcaggcccaataaagattcacttgtttggcaagctcttaatagcgcaatttaactacgttttaatagcgcccttagaatatttattgcacataaaggccaatatgtttagtcaagagtcattcatctttgttaaacaaattcaatttcaaacataagactatagaacttgctttgctcaggggcagcccatcaagatgatataccctattgaccaatcc

SEQ ID NO: 11042 - DNA, 1846 bp, DROSOPHILA
tcacactggaaaaaacacagaaaaaattaaattaagggaaaacagatgaaaaactgcaattgcacgcaattgaagcaagtgcagcaaatagtttttcgcgccagtgttgactcctgggcctgccgtcgaagccacgccaactgcgcgactttcgagtgaatactatttgcggagtgcaaaacgaatccgcgggatcgtaagaccatggattcggccactaatctcctcgagcaacagggctcagcggctgatgtgagtggcgggagccatcccgccgaggtggaggtaaccacccaggctcgagccactttcggcatggacgccgaaggacatgctaccggcgaggcggtgaccaccaccacggccaccttgcgtagagaaggttcagacgaggatatctttgagcaggtgcagatgatcctgcgcaagcgacgtggctggggaccggaggactcgcttagccccaatgatctggacattctggagtacgacgatgagttggtcgaggaggatgacgccggttgtccactcccctcgaccccggaggacacacagcttattgaggcggagatgacggaagtgctgaaggccggagttctctccgatgaaattgatttgggcgcattggcacacaatgccgccgagcaggcagaggagtttgtgcgcaaggtctgggaggctagctggaaagtgtgccactacaaaaatctacccaagtggctgcaggataacgacttcctacaccgcggccatcgcccaccgctcccctctttccgtgcgtgctttaaatcaattttccgcgtgcacacggaaacgggcaacatctggacacatcttcttggctgcatcgccttcatcggcgtggcattatacttcatctcgcgtccctcggttgagatccagacacaggagaagatcgtttttggcgccttctttatcggtgcgattgtgtgcctaggattctcattcgcttttcacacactgagctgtcattctgtagagatgggaagactgttttctaaacttgactactgtggaattgcgctgctgatcatgggttcctttgtgccttggctgtactatggcttctactgtcattaccagccaaaggtgatatacctatccgttgttagcattctgggcatcctctccatcgtggtctcgctatgggacaagttttcggagccggcacttcgtcccttgcgcgctggcgtatttatgagctttggcctgtcgggtgtgattccagctattcactacagcatcatggagggctggttcagccagatgagccgcgccagtctgggatggctaattctgatgggcctcctctacattctgggcgcactgctgtacgccctccgtgttcccgaacgctggttccctggaaagtttgacatttggggtcaatcacatcaaatattccacatactggtcattgcggccgcttttgtccactaccatggcatctctgaaatggccatgtaccgcgtcatgtatagcgaatgcactgttcccatcgaaccaataaccttttagatgctgaagtggatgccaagaaacaatcatcgtaaaagcacatacaatcccattcatagtacgagtaaaacatatattaatgcgaactagcgcagttttacaatgcaacctttttagcgtttggggagcatttgtaccttgttatacaaaatcaacggaaccatatagaagacaaaaacacacacttaacacacaattacacgcatttatcatcaaaatcttgcatagaaaaaaaaaaattgcaaaaccagttgattgtcgaatgaaatctgcagtagagaaattaatatatgtacaattatttata

SEQ ID NO: 11043 - protein, 444 aa, DROSOPHILA
MDSATNLLEQQGSAADVSGGSHPAEVEVTTQARATFGMDAEGHATGEAVTTTTATLRREGSDEDIFEQVQMILRKRRGWGPEDSLSPNDLDILEYDDELVEEDDAGCPLPSTPEDTQLIEAEMTEVLKAGVLSDEIDLGALAHNAAEQAEEFVRKVWEASWKVCHYKNLPKWLQDNDFLHRGHRPPLPSFRACFKSIFRVHTETGNIWTHLLGCIAFIGVALYFISRPSVEIQTQEKIVFGAFFIGAIVCLGFSFAFHTLSCHSVEMGRLFSKLDYCGIALLIMGSFVPWLYYGFYCHYQPKVIYLSVVSILGILSIVVSLWDKFSEPALRPLRAGVFMSFGLSGVIPAIHYSIMEGWFSQMSRASLGWLILMGLLYILGALLYALRVPERWFPGKFDIWGQSHQIFHILVIAAAFVHYHGISEMAMYRVMYSECTVPIEPITF

SEQ ID NO: 11044 - DNA, 3839 bp, DROSOPHILA
aaagttgaaatgtagaaaaaaaagccttcattactatcagcaaatggggcgcgagcacgtgttgcgcaaattgtaaacaaatgctatagtgctgattttagttactaattgctagtgaagaagacccgatttttgcctcgctggcagctaactaatctcccattgtcaggcataaacttgaatgtttccccgacgccactatcttcgatacacgaaatttagctttaaagtagggtgatttttggggttggcatgttgtggtgtgtagctgcctaatggggagctccacttttatggtgacgcctttgccgcgtgccaatttccacgatttcgtcatcaccttacgacgcgtggcaatgaattttgcagttgcagagttgcagtttttctggcaattgctcgattgcttttattcgcttctttttttttttgttggttattcgcaaggtttggaatgcagtttggctgattaatttcggtttatcttgttcccagcgactttgcacgtaaaacacgatttattttacctcgagagcgcggacacaacaaaacggctttgactgcgaacagcgactgtgcgttggcatcgagaccggcattttcatactaaaattaacgcaattttcaccctaaaacgcagtgagagagtgagagcagcaaacggagagagaaacagagagagagagagaatgagtgtaaagaaaaaaaatgagaaatgagtgctcaaaaccggaaattaatgtcaaatggttacttacaagaagaaaacattaaagctgtcctcttgaatgctagctaatgctaaatttatcttatggcataactattaagcatagttttcagttgaataatacaatttcttaaatgttcccgccaaaaatttcaaatttgttagctattcaccacgaaacgcgctcagctgttgcacacatcacttatcgatagcaaagcacttatcgctccgcgcccacctctatcctttttagttattgttttggtgcttgcacgtgttttaatttacttcgattaaaaagccaaataccagcaatgtcagacaagtgagtgattgaaaaactataaaaatgtgttgaccctaaacattatcttatacttttgatccctagatatgcggtgcccaacaaattgcccggcaaaacagtgtcggtgctaaagcatcgcaagaggagaattctgcaggatgaatctgttgttacgcagaaaagaaatgaccgcatcaaaaagagaaccgccaccaagaatcaccacaaattccgccgtgccgaatccttcgtaatgggctacctgaaagcagagcgcacgtccaagcggatcaagcaaaccattctgcgcaccaatgtcaccgaacaaagtgccaaagctgccgacgattccaatcccaaactgctcttcgtgatgcgccatgcgggcaagaagatcttcgacaagaccaccgcggatatattccgaaccctgcgcatgggctcgcgccacaacgccgtcttcatggagaacaccaaggagaaccagttgctgctgcgcgttatcgaaccctttgtagtctacggcaatccctcgctgagctccattcgcgagctggtcttcaagaagggcttcgcccgcatcgacggcaagaagacggccatccagtcgaacaccatggtggagcaacagctgggcgacaagggtgtcatctgtctggaggatataatccacgaaatttgcacagtgggtccaaacttcgccgctgtaaatgagtttctgtgcgccttcacggttggttaacaacttctcttttgcaattcttaaaactatactattaccgccatttggttttttccagttgtccagtcccagcaatggttggcaaaagaaggtatccgtctcgtacaaacgcggtggcgagtacggcgatcgtggcactgccatcaacgaactgattgcccgctgcctgtagagaccctagcctagtaaacccttaagtgattgttcaacctctataacccattctgtagctaagcccaatacacatctatatacaaacgtattctatttgagcgtacttatttaacgaagaaaatagatggtcaggtcagcactatcgtgagtttactgtatgcctataaaagcaatcctgcgactattaaggaaccacatgaaactgtctctaacgacattcctcattattctacatgtttatcaacatgataaacttcacccacgaaacaagttctttgcttcttggccttgcgtgtcccagccgagttcccaaattgaacaaaccagagaatcaactttctgcctcgaataataaataagtcataaccgaggtggctcctcgcaaacgaaaggtatgccaaactgaactacttgttgccatgaaggaggaactgttgtttttcgattagtcggagtcagtgccactaacctagtgcaactcgggtcgtcgtatcttttgttcggataaaactccagggactacacattggaattcaaaatccttagattcaattaattctcaatgaattcaagtttcaacagcgagcagttggacaccgaccgcgatggactgcaaaaaattctggcccgatctctcaaggaacccattcttggcaagcactttgccctgcctggccgcatagagcagagtccacccatcgaactggacaccagccagagctacattgccgtctacactcatctcaaagtgcacgccaccatgatgccggagagattgcccacgccggaggcaatcggacgaatacaggcggagaacttggaggcagcgcccaaggcacgaagttcaaagacccgcttggatccctgctcaaatataaattaaattacgttgggcatcaataaagaaagtattgttattttatcttttggtatcccttaaatttagtaaaagaatattaaaatttttttttttattttattaaatatacatgttcataatccttgtaggcataagcttcacatcaaattcgtgttgaatacatcctcctatcggtgcagatcttagtatcctttttcttgaaagtaattaatatgatgcttttcgtaggttgtttaaatcgctactaggttgataagtataagacaattaatgggaccgcatgtggtgctttaacaatcaatattgggttcattcttgaatccataaaaatcatgagagaaatgtaaaataaccaagtgtttatgtgtcatcctcactcctaattctgcaggatacgcacggcgttgtacatctggccaatgatgggcagctgcttggactcgcgccggcaaaggtatttgtaggcatgcgacaacagcctgtccagggcagccacatcgatctcgtcgggcttggtggccgcgatctgaatgttgttctccgtcatcggttccttctgcgtaagcggcgtgagaaatggatcagtactgcgaatgatatatgcgcttgcagcacttaccaggttgtctaggtaggccagcaactggtggccaacagaggcaatcttcaggaacgtggactgcgagctctgtgcgtaaagattaagtctacggccagcgatctccagcagcagtcggcccagctcctcgtcatcgctgatgtcctggagcaacacttgagcctccgcatcatacccaaaagcgtacagttccaccacctggaggagggaaaaatatttggaatatattttctattccattgtgtttcctctgttgtgctctctacggagcaaactaacgaactgatgttgaaaggcaaaagggattgtaagctccctgtcatgtgtgttcatgggttcctagattaggaattctgggatcatatatgtatgtacattcttacc

SEQ ID NO: 11045 - DNA, 1127 bp, DROSOPHILA
cttgcacgtgttttaatttacttcgattaaaaagccaaataccagcaatgtcagacaaatatgcggtgcccaacaaattgcccggcaaaacagtgtcggtgctaaagcatcgcaagaggagaattctgcaggatgaatctgttgttacgcagaaaagaaatgaccgcatcaaaaagagaaccgccaccaagaatcaccacaaattccgccgtgccgaatccttcgtaatgggctacctgaaagcagagcgcacgtccaagcggatcaagcaaaccattctgcgcaccaatgtcaccgaacaaagtgccaaagctgccgacgattccaatcccaaactgctcttcgtgatgcgccatgcgggcaagaagatcttcgacaagaccaccgcggatatattccgaaccctgcgcatgggctcgcgccacaacgccgtcttcatggagaacaccaaggagaaccagttgctgctgcgcgttatcgaaccctttgtagtctacggcaatccctcgctgagctccattcgcgagctggtcttcaagaagggcttcgcccgcatcgacggcaagaagacggccatccagtcgaacaccatggtggagcaacagctgggcgacaagggtgtcatctgtctggaggatataatccacgaaatttgcacagtgggtccaaacttcgccgctgtaaatgagtttctgtgcgccttcacgttgtccagtcccagcaatggttggcaaaagaaggtatccgtctcgtacaaacgcggtggcgagtacggcgatcgtggcactgccatcaacgaactgattgcccgctgccttttcaacagcgagcagttggacaccgaccgcgatggactgcaaaaaattctggcccgatctctcaaggaacccattcttggcaagcactttgccctgcctggccgcatagagcagagtccacccatcgaactggacaccagccagagctacattgccgtctacactcatctcaaagtgcacgccaccatgatgccggagagattgcccacgccggaggcaatcggacgaatacaggcggagaacttggaggcagcgcccaaggcacgaagttcaaagacccgcttggatccctgctcaaatataaattaa

SEQ ID NO: 11046 - protein, 359 aa, DROSOPHILA
MSDKYAVPNKLPGKTVSVLKHRKRRILQDESVVTQKRNDRIKKRTATKNHHKFRRAESFVMGYLKAERTSKRIKQTILRTNVTEQSAKAADDSNPKLLFVMRHAGKKIFDKTTADIFRTLRMGSRHNAVFMENTKENQLLLRVIEPFVVYGNPSLSSIRELVFKKGFARIDGKKTAIQSNTMVEQQLGDKGVICLEDIIHEICTVGPNFAAVNEFLCAFTLSSPSNGWQKKVSVSYKRGGEYGDRGTAINELIARCLFNSEQLDTDRDGLQKILARSLKEPILGKHFALPGRIEQSPPIELDTSQSYIAVYTHLKVHATMMPERLPTPEAIGRIQAENLEAAPKARSSKTRLDPCSNIN

SEQ ID NO: 11047 - DNA, 5080 bp, DROSOPHILA
gccgctcgggtgccggagaacgaggagctgccgcctccagaacacagtgagttaacctaaagccagttctcgaaagatttagatataggaatactattggttttatcaggcgagcgacagatttccgatactccaacctgggctgtagtatgagcagtatgagtcagaaactaacttagccaaaggtcaacaacatgttttttatttttcggcacacatcttcgatccgctgccggttggtgcttctgttggtggggctgctgcagaaactggttttactgtacacgaatgtgctaagagataaacaaaccttgacaagtaagctcggtggccgagcaaacacatcaaaatcgatttcaagttcagcgatatgtttcttcataataaatattcgcgggccaggcaataaataatagtccaaatacgattcggacatgcaaataccgggtaaagtccccaacaaggctgatcgaaaagagacagaggagacttgtaaaataaaagttttcaattcggaggtggttacacacagaaaaacatattaattctacggactgaaccttaatgaactttgtgggtggagtttgcattttcacgctggaaaagcttagataaattgaaaatgcaaatctagcccacaattaatacggatatatgtgatcgaaaaatgagaactttttagactttaattgaagatcctctttttctgtgtagcataagcctcttgaatcggccctattagctcccacacgtacgtatttttatggcgcgccatgacggaaatacatattagcaccgagtggccgtgatataatcaaaatgggttgcgaaatccacagttgacgtatttcagctaatttaaattcaaaacaggcgcccaatcgctgcgctagccaacactggcacatagagttccgcagcaaattggtgtgaccagctggcgaaaggccacgacttaaaccttttcaacacatttcccattcgttatactcagctgattcgaatacaacactgcttggaatcgctttccagccctcgaaaaatacttgtatattctattctctgcaaaaaaaataataaaaaaaaaacggggaaagcacagcaaaaatgtcatacgattgacttaagtgaacgcaaatgtttgatcagcgagcactcgactgaagtctgaccaagtttctgtgcaccgaatagcacttttccccgctatggccagcagcagcaacaattccagttccacggccaacaatcacggaggccacaatccgctgaaccgcctgtccctgaagtccgccggaaagcgaaaccaggagagcatgtcgcattcccagccgaacggcggctggataaacggtaaggcggaaaacccggaggaaaatcaacgaaggagccgactgttctagggttggtcgtgaatgggggggggggggcacggcaggtgcactgcgtctgtgagttattgatttttcacacaacttaagcagtgtcgccaggggagcgggtggtggtggggctggacgggaggggcgcagtctggcaacacaaacaaaaacaacagtgtcccaatacgttgctattttgagacgctccacttttagaagacagtgaaacttcaggaataagaacttcagttttgaatttgaacacaaataattaaaacccgtgtgtaaagcttacatcagcctagacttttatatgctcaaagatcaaggtttattatcagggctagaatatgcttaagtcatgattaaaatattaaatacagtttgacaggtacacactgtgcctacacagcaaggccccactgtacctggggtgcaataattgtggaaaaaggggagaccctggcatttgttatttatgatgcacacgcagcggaagttgcacaaatgtggccacgcgtgctgctgattctgagcgaactgggtgggatcattagaacagcgatacgtaacccgtttagcccaaatatttaaccattttcccaaaactcatttgcagtggaaaccctgaacaatggcaacgggctgctccactcgccgccccacaatcaccagcagcagcagcagcaacaacagcgaggcggaggaggagcatcgccagctggaggcggaggaggtccctctgccgcagcggatcacaatatccagataacgcagcctatcagtgctccatcctcgccgttggcttcaccgggcgccctcaacagcagtggcagcagcagtggtggtggtgcaggaagtgccggaggaatctccggcagtcccaccgccttttgtctgccctccagttccgcagcggcagcggtggctgccatttccgctacgcccaccagtgggagtggatcgtatgtgtgctctgccggaaccaattggcatttcgcagctgtggcagcatccaacgccatcgatacggctgatcccaactggcaggccagcaaggcgacggtcctcgagaggaatgcagccatgttcaacaacgaactcatgtccgatgtcaagttcattgtgggcggagagttcggtaagcgttcttttactttctttaaccaatcaaacagcattgctcatgacctgcatttttcacagacatcgatcccattcagaccattcccgcccacaaatatattctcgccacgggcagttccgtattctatgctatgttctatggaggactggcggagaacaagcaggaaatcaaagtgcctgacgtggaacccactgccttcctaacgttgctaaggtaagatatccacatcccaaccaaccaatcggaattgtatatatttactctctatgattccgcttaggtacctttattgtgatgaaatcaaactggaacctgaacacattctggccacgctctatgcagccaagaagtacattgtcccgcacttagccagagcatgcgtcaactatctggaggtgaagttgacggcaaaaaacgcctgcctacttctcagtcaatcgcgtctgttcgaggagcccgagctgatgcaacgttgctgggaagtgatcgacgcccaggccgagatggcggttaagtccgaggactttgtggatattgatctcaagacctttgagtcaattctttcgcgagagacactcaactgcaaggagatacacttgttcgaggcggcccttaactgggcaatgaacgcctgcgagaagatgagcatcgatgacacgccgcagaacaagcgccggctgctgggacaagcgctgcacctcatccgcattcccacaatgtcgctggaggagttcgctaacggcgtggcccagacaggcattctttcgtcgcaggagacgatcgacatgttcctgcacttcactgccaagatgaagccctccctgggctttcccacacgctccagggcgggattaaagacccaggtctgccatcgcttccagtcgtgcgcctatcgctcgaaccagtggcgctaccgcgggcgctgtgattcaattcagttttctgttgatcgaaggtaagttctatctaacaaatggttattggattaaggtaattaaaactgaaaatttcagaattttcattgtgggttttggactgtacggctcgtcgactggtgctgccaactacaacgtaaagatcgaacttaaacgcctgggccgcacgcttgcagagaacgacaccaagttcttctcggacggatcaagcaacacgttccacgtcttcttcgagaatcccatccagatcgagcccgagtgttattataccgcctccgtaattctcgatggaaacgagcttagcttctttggccaggagggcatgtccgaggtgctaatgggcaatgtgacattccagttccagtgctcgtcggagagcaccaacggcaccggagttcagggcggccaaatcccagagttaatcttctacggacccaccacagtgacagcaatgagctcgcccaccaattcactgtgtcccacgccaattggtggcagttcctccaatgcaggagcgacttcaaccgcagcagccggaacagctgttccgaatagcagcaatggatctggcaataacgccaacagttctggggaggatggcgacggaagcacctgatgcgcacagctctattgcgccgagtggcagggagcctgttactaccgccaacagcagcagcaacagaggagaccaacacaacaatacaaaacacagcaaccgcaaaagatacagatacaaaatcgaaactcatgggttttcagtgcagcacaagaaagtaaattggagttttaggctcatatatatatatatatatatatatatataccaagatagtagagtactctagttttcataatagtcctatatataaacatatatatacacgtcaaagcatagacacatatatatacacctcggcagtgcgttttaaaactccaagacgattgtcagtacgtgatcatctcaaaaaaaaaagtcagccgatgcaagtcaatcgatataggaaatttgctataattggaaagtttccttcgatatcccaagtatgttaagcaagtgaaatcaatggttttgcagttctaaaacgcactgcacatagtctgttggtaatgcatataaagatattttcaaaatcgaaaaagttgatcatatacactcttaactttatagataaagattagtagttgactcgaaaacttaatacgttccacgacttaagagggcgggatggggtcatatggacgctaatagagacgcatagatacatgcaataagtgaaaatcgggcaatcagtcaagctagcgttaaccaatattctaaagacagttaaagggagagtggacaaaagctaatacgatatataccaaacatatttttgccagcatatacctaacatatacacacatctgatctgataatgataaactatagtcctaaacacttcgagggagaataggccatgttaatagttgcatacgacgaatttgaaacccaagttaaccagttaacgaaatagcaaacaaaaatgaaatcaagggatcttgtacgagatgcgcacaaaatcccccctacatatatattcaaatattaatcttgtagtacgcattatatctatttc

SEQ ID NO: 11048 - DNA, 2242 bp, DROSOPHILA
cgaatacaacactgcttggaatcgctttccagccctcgaaaaatacttgtatattctattctctgcaaaaaaaataataaaaaaaaaacggggaaagcacagcaaaaatgtcatacgattgacttaagtgaacgcaaatgtttgatcagcgagcactcgactgaagtctgaccaagtttctgtgcaccgaatagcacttttccccgctatggccagcagcagcaacaattccagttccacggccaacaatcacggaggccacaatccgctgaaccgcctgtccctgaagtccgccggaaagcgaaaccaggagagcatgtcgcattcccagccgaacggcggctggataaacgtggaaaccctgaacaatggcaacgggctgctccactcgccgccccacaatcaccagcagcagcagcagcaacaacagcgaggcggaggaggagcatcgccagctggaggcggaggaggtccctctgccgcagcggatcacaatatccagataacgcagcctatcagtgctccatcctcgccgttggcttcaccgggcgccctcaacagcagtggcagcagcagtggtggtggtgcaggaagtgccggaggaatctccggcagtcccaccgccttttgtctgccctccagttccgcagcggcagcggtggctgccatttccgctacgcccaccagtgggagtggatcgtatgtgtgctctgccggaaccaattggcatttcgcagctgtggcagcatccaacgccatcgatacggctgatcccaactggcaggccagcaaggcgacggtcctcgagaggaatgcagccatgttcaacaacgaactcatgtccgatgtcaagttcattgtgggcggagagttcgacatcgatcccattcagaccattcccgcccacaaatatattctcgccacgggcagttccgtattctatgctatgttctatggaggactggcggagaacaagcaggaaatcaaagtgcctgacgtggaacccactgccttcctaacgttgctaaggtacctttattgtgatgaaatcaaactggaacctgaacacattctggccacgctctatgcagccaagaagtacattgtcccgcacttagccagagcatgcgtcaactatctggaggtgaagttgacggcaaaaaacgcctgcctacttctcagtcaatcgcgtctgttcgaggagcccgagctgatgcaacgttgctgggaagtgatcgacgcccaggccgagatggcggttaagtccgaggactttgtggatattgatctcaagacctttgagtcaattctttcgcgagagacactcaactgcaaggagatacacttgttcgaggcggcccttaactgggcaatgaacgcctgcgagaagatgagcatcgatgacacgccgcagaacaagcgccggctgctgggacaagcgctgcacctcatccgcattcccacaatgtcgctggaggagttcgctaacggcgtggcccagacaggcattctttcgtcgcaggagacgatcgacatgttcctgcacttcactgccaagatgaagccctccctgggctttcccacacgctccagggcgggattaaagacccaggtctgccatcgcttccagtcgtgcgcctatcgctcgaaccagtggcgctaccgcgggcgctgtgattcaattcagttttctgttgatcgaagaattttcattgtgggttttggactgtacggctcgtcgactggtgctgccaactacaacgtaaagatcgaacttaaacgcctgggccgcacgcttgcagagaacgacaccaagttcttctcggacggatcaagcaacacgttccacgtcttcttcgagaatcccatccagatcgagcccgagtgttattataccgcctccgtaattctcgatggaaacgagcttagcttctttggccaggagggcatgtccgaggtgctaatgggcaatgtgacattccagttccagtgctcgtcggagagcaccaacggcaccggagttcagggcggccaaatcccagagttaatcttctacggacccaccacagtgacagcaatgagctcgcccaccaattcactgtgtcccacgccaattggtggcagttcctccaatgcaggagcgacttcaaccgcagcagccggaacagctgttccgaatagcagcaatggatctggcaataacgccaacagttctggggaggatggcgacggaagcacctga

SEQ ID NO: 11049 - protein, 677 aa, DROSOPHILA
MASSSNNSSSTANNHGGHNPLNRLSLKSAGKRNQESMSHSQPNGGWINVETLNNGNGLLHSPPHNHQQQQQQQQRGGGGASPAGGGGGPSAAADHNIQITQPISAPSSPLASPGALNSSGSSSGGGAGSAGGISGSPTAFCLPSSSAAAAVAAISATPTSGSGSYVCSAGTNWHFAAVAASNAIDTADPNWQASKATVLERNAAMFNNELMSDVKFIVGGEFDIDPIQTIPAHKYILATGSSVFYAMFYGGLAENKQEIKVPDVEPTAFLTLLRYLYCDEIKLEPEHILATLYAAKKYIVPHLARACVNYLEVKLTAKNACLLLSQSRLFEEPELMQRCWEVIDAQAEMAVKSEDFVDIDLKTFESILSRETLNCKEIHLFEAALNWAMNACEKMSIDDTPQNKRRLLGQALHLIRIPTMSLEEFANGVAQTGILSSQETIDMFLHFTAKMKPSLGFPTRSRAGLKTQVCHRFQSCAYRSNQWRYRGRCDSIQFSVDRRIFIVGFGLYGSSTGAANYNVKIELKRLGRTLAENDTKFFSDGSSNTFHVFFENPIQIEPECYYTASVILDGNELSFFGQEGMSEVLMGNVTFQFQCSSESTNGTGVQGGQIPELIFYGPTTVTAMSSPTNSLCPTPIGGSSSNAGATSTAAAGTAVPNSSNGSGNNANSSGEDGDGST

SEQ ID NO: 11050 - DNA, 9147 bp, DROSOPHILA
gatacccgataattgatgtaattgacaaagcccatgggttaatcccgaacccaccacccattgcctttcgtttacagtgccgcgcattataatcgctgccatatacaaatacctgaacgagacaatgaagctgctgtggaacgatgccatgcgtttgaatactgtgcacgtatcggacgtgtgcgctgccgtttggcaattggctcagagtcccaagaccgccggtcagatctacaacatctgcgatgattcagcatcgacgcagggcaccattagtaatcttttagtggatattttcgacatcaatttggatttcttcggccttgtaatgtcgaatttggcaaaagtaagttagcatttaatcggcgcactaagcttcagcttattgtttattattcgcttgaattttcagctttatcccacggacaccgtcagtgaaatcaacgacaagcacatggcaccctgggccgagatttgccagcgcaatggcatcgacaacaccccgctgacaccgtacctagatgaggagcagctccagcacaagcacctctacttggataacacgaaactgaaagactttggctacgtgctgcagcatccgaaagtcactcgcgagctgctcatggagatgattaacgactatgtgaagcagcaattgtttccgaaatcgttggttctttgattcactacttctatcaaaagattgcaccacgttgacatgcactcggacccggagacatttattccctgtagcttgtaatccactagttttttaaacgattatcaaacctcttccaatttgtatacggacacggatactctcacatgcacgctgtgctgtatctccgttttttttaatcacaaaagtgtacttatagtattatagaacccatatatttttgatacattccagtcgatccagcgatatatacgtttttgcgtacgagtattccattgtgattagctaagtgaccaaccgcaatcgacaattaaaatgcacttgtttagagtttagttttgtgtatatttgattattttaatgttacggcaacggagcgatcgtacgataaacgtgacttgacggtacgagacgttgcgatacataattgaaaatgcaattgcttcactttgacgctcattaacttaaaaattacagaaaatcaacaataataagctcgcaacttgttcaacttaatacgaaacacgggcgaaagttcgcttttgttttgctttgttttttaaaagagttattttggccagctccaattgccatagatataaattacgattcttgcatttcggttttgtgacttttcatctaagacggcggtgcatggagcaatagcaatagttatgctcttgagttcgattgcttaattaactagttaagagtctgggggctaatcagcacactcagcgggcttagaaggccaggccggcatcgcggtatgtggtgaagatcttctcaatggagttgacgtaggcagcggttctgaggtccaggcccaggttgtacttcatggctgtcttcatgatggcgcgggcggagcgctccatggtgtagtccaggccggagtgcacgatatccttctcggaggcgccggagatgcgcttctggaacgactcggagggggtcacggggatgcgaccgcccacacggccgaagcgacgctccagggactcttgaacggattctgcaggaaaacagcgatgggggaaacaaaaggacaaagcgattagttaagagtgccacatgctcaagggaccacatatacatatatgacagggttttttaagccaccaaataattagataccgaattaaagcataggattggatggttcctggtattagtctgattatgatattgtgtttttttttttttggataaagcaacaagtaataaatgcacaaaataaacgttacagaacaaaactaactacaaaaaaggtaaacatgaggtagaaaaagttttttgggcttaaggatggataggtggtaacgaaaagaattaataatcagaatgtaccgtcattaatgattctttcaattgactgttggactgaggctacattgttgatagagaaacggaaaaagaagaagaataaacaacgaattacttagatgatacttcaaaattatataacgatcttagagtctcttggttatggtttgattttcaggtgtaggtggataataaatcgaaagtaaattgacgagaaacgaaatttggaagtactgaaccaatatgggaagagcaaatgccgaaagagcaagcgcttttctaataggttttgtgttttctaaaataaatagcataactaaatccataaaccaatcaatgagatggcatgatcaatgggccaaagtatacttattcagatagatagatagattgatagataacgagatgaggagcaagtgccttcaagagcctattgttttgcataataatagtgtgataaacttaccaagcagatggtagttggactcgcgctcatacttgaaggtcaggcgaccgtacgagacgtggttcaggttcttcagccactcgaagaaggagacggtgacaccaccggcgttgatgtacagatcgggaatgaccaggatgttgcgatcgatgaggatcttgtcggcagcgggggtggtggggccgttggcagcctcggcaatgatctaaaattgatgaaaattatttaaaatatatattaaccattttgaaacgggaatatattcccatttttacaagattcttttgttatattcaattaagactttaccttagcttgaatgcggttggcattctcgctggtgatgaccttctcgacggcagcgggaatgaagatgtcgcacttctcgaacatgaggttctcgccctcgtagggcttggcgttctggtagcccacaatggtgccgtgctcgttcttgtagtcctccagcagcttagggtcaatgccctccgggttgtacagagtgccgtcgtgctcaatgacaccgatgcaggtggctccggcgcgggtcagatagcgagtggtgtgcaggcccacgttaccgaagccctggacgatgaaggtcttgccgccccagccgggagtggtgcctaagaatgtagatattaccattaggatgatgcactttcataactagacaatcatgatgcaacactcaccgatctggctcatgtagttggcctcgttgatgaagttctccaggccgtggaagacaccgcgaccggtggccgagacgcgtccgtggataccgccctggttgatgggcttgccggtgacacaggcatgagcattgatgtccaggtgaccgatggtcttggcataagtatcggcaatccaggacatctcgcgctcaccggttcccatgtcgggggcgggcacatcgacaccgggtccaatgaagcccttcttggccaactcaagggtgaagcgacgggtgatcttctccagctcgtgctcggagtactccttagggttgatcttcagaccggccttggctccgccgaatggcacatccacgcaggcgcacttgaaggtcatcagggcggacagggctttgacctcatcgcgtgacacatccaacgagaaacggatgcctgcaagggaaaagaattgcataagcacattacgtatacgacaggtgtgctcagaactttcggcgaccttgttgcagctttcatttttggtctaaatccaacagacaaatacaaaaatagacgacaaactacacgaattcctcgcggaaagcaaaagttctcctcgaatcgatgatacaaccgaacatttcttggctgttttactaaagcacgtgccctaaaaacaaaatcattgcatctggcagacgtggggaaacctttcgccgatggcgcaacaatcccatgaacagaaaccataaaacccctccttggctcttatctttatttgcttggcacatataatgtttatatctttgggaagtcggcgcgattagataagccaaaatttcgtgcttgtaattcgaatttaacaagggtgttttaattgtaagaacttaaaagtgcaaagtgcccgctttttatggatcgataaatataaatgctgctttattggcaagagcaagttccaccaaatggcctttatacatacgtaaatttgtatgtagaactaggtaaattaatgacttccccattagaaccccgggacgagcccccaaaaaacaagactataaaatccaaaattagcttaatttttgcgattaaattaaatgccttgttgccaagtggccggtcgatagtgaccatgaatcaagcaaatttttggtttctccacacaaaaaacaatctctgaatttgcttttggcactcgaaataagttcttgacattatcagctgtgtagcatttttttggggcccggcaactggaacttataaacaaataaaacgatgagtacacaatttcaaaaaattacaattcattatgtaccgattggaacttatttgtgtatcattgtttttcaagggccagtctgattttaaagtacactatcctgtcgcgactgaagtgaattatgatccggtatgcttgtaaacaacctaaaaataggttcttccgtgctgttactgaatctttaatcttaaggagcacataatctgtgctttttaataataaactttaagattagtgagctggtgttgggaagattgtattcacgtagcatttattaatttaaagccagactttcagtttataatgagtggtttttgagtttgcagagccttttttttacagccatttggcgtcttcgctttgcctttccgctgagtgagctaagccctcatatcgaatcgaatcccaagtccagctgagaatggtgctgactgtacccaccgcgcttgacgacagcgaatcattctctatttggcgaagccccattcttcgcctttcttttcgcttatgtttaccataagaaacaaacaaaaaaaaacagcagacgaaatgccagagtaacagcaccaaccggcttgatcagtcgacttgttttcgttttttgccaaaaatttttcgaaaaacaatacagaaagaatgaatctattaaggttccaaagatagctgcctatatagtctagttgggcatgctgctgcttatacaatcggtggtgcgataacacatttgggggctcgatcgtgtggctgtgtgtgtgtgtgccatatagccacgtctataagtatgcccatatgtatatattccccattggcaacaggcgacgatctttttgtttttcgaatagaccaaaccggttgcctcaccaagtcagctgaccagaattctacgccatatgattagaatgccgccgagtgcaaaaacttctccgaaatctttttgtcagtgggggccttgagatctcaatgctcgataagattggggggataagaacggaagtgacgcagatatggacgcacccccagcgaagttgagtgctaagaaacatgccatttcgatgtcgataccatcgtgatcaactatttagctgtgaactagataatgggtacaggtttgtttgttttttttccagggcgaggtaagtatcggggaatcaacttgagtgtaacacaattaacacgatttgcatacgcatttttcgagtgcaactctcgacgggtagcaaatagaatggaaacatgtttgtcaataagataactgccaagtacttgtgggcaacgctatttacttgaactaatgtgtgtacatttgtcgccacatgtgtataataaatatgtataaataatacattggcgatagggccgctttacattatcagttttttattttgtcgcgttcgattcgagtttgaatgcatcacttgtacttgtggttgagtaaatgcaaagcagaccactcaattgactagacaatttagatcggttcatcgacatgtgtagaaagttccacagtcgtaggccagatcaaatcggttttgaatggacccccatttgttgaaaaaaaaaaaattaaagaaaaccagcacagtggtgaagcgtatgacgcatatatcataaactcgcagtttttgttcaattcttttttttttggcacaacgtgactatcacgtgaacaaagccgaacggacagacaccccgggcaaattaaaaccagttctttagaggcacacacaactcgacatttggacagggaaccaaacgaaacgaaattcatgagccggctgttttttttttaaaggggcacttttgccgaaattcgagaccggggacttgatgtatgtacatacgcagaacgtattaaataattaacagccaaatggcagatgcatcagcgggaattaacattaattagagcatggagcgcacaaaatggtggccattaaacactgtccattgatctagtagtactaagtaaataaatagactagcaatttttagcacctttgactgaaatagcagagagctggctatttgagtgaatcattaacgagccataaggtggattcaattcacttagtaacaggctgtttacaacttttggtgacccaactaactaagccacatgatcgatcgatcgatctatggatcgaaaacaagatcataaagtgttaagaagcgtggcaataatcgtaaacaacaaattttaggggcatagcgttttttcggctgtttctgttttctatttttgcgcataaccaaggtcagataagattccctagtcgaatatttttcactacatattttttgtgttcttttttttttgcttttgataagcaccaaactgattctataattaataatttgagatgaagcaaaaaaaaaaggaacagaattcggaacaaacaatttttgtggcctgacaacaaggagattttttctttttttttttggtggttaggggcgttactttttttttagcacttgacacactgtgcagtgctgtgctctcatttcaattagaaagcaaaacacaagcaaaagttcattataaatagcacccagccaaaggaaaaacaaacagcagcgaaagaatcgaaatacatttgccagctcgaaaataatgaaatgtgcgaaaagcgggcagtacattcagcatatgtacatctgtttttgaatggtggcacacttgaagggtttggaaatctaatgcaaacacgtgtgcccaacgtccgagccttatgcaatgcggcctaaaaaccctcaaataacaaaaaaaaaaaaaaaaaaaatgtggagaaagggggagcccagtcggctaaaacgtaaacaaaacaggcggcagcggtacatgcgcagaacgtggggaaaagggggtctggtctggtgtggcttatatactgggttacataacttgaaaaatcaagacgaaatgccagaaatgcctaaggaaaaatcgattttgcatcgagcgacaacagctgttctgagggtttcttaaaacttaagtaagtgttgacaaatttttgctttaaacttgctaggtaattgcattttttgttttagattttcaaggaaaactgaatcatctagtggtctctataggtttggcacttttgtttgcatcccttttgaaaacctcttaacgtctcattttttactacctacgtgcagagttctgactattatatcttgggttatcttggatcaacacttgcctcccttggtgggcgtcttgtgggtgctgtgctgggcgcggtagccggtgatcatctcgtagttgccggcatcgcggcgcagggggaaggcgatctcgatgatgtggtcgcagggctgcatcagcatgaggatgcccttcaccttctgcttcttctcgtcgcgggtcagcttgcccttcatgtcgtccaccagcgattcctcggcgatttggcagccgcgatggaagaaatactcgaccatgtcgaagaagcgcggatccttggcggtgggcacatccttgaggcggtcgggaatctggtgctcggtggcatagccgcggctcgactgcatcacagcggtgggcagtgccttggccagcgtggccagctcctgctggcggcgggcgccctggcgggccagactcttcaggtgatacatgctgctaatcgcttggattcttcgggttccaactctttttttattctgttctacacaaccgctcgctactcgacgccgcaccaaactggccgaggcactcgcatagatatgtatatatatgtcggctttttcggagcgccgagctttttgctctccggcgagagcggtgcaaacttttcaccgaaaagctctgtgggtggagtgcccgctagaaacgcggcaccaccgccggcggattactcgcttcgttgccagggcgagattaggtatttgttatcggtttcacgttcacgtttttctttgactccaagattaagctatgatttatcatcttcggctatatgttgaattcaggggggtactgagtttcttttagaaagcacttgaaaatctaagtaataaacatcgtacagtacaatacaaacgatatatacaaggtatattttatataaggtgtttttttaaaggttttgctaaattttttatttagagctcatactttcaggaatttaccacgtaactttcgggcttatcatgctattgatctttcacacaattcctatgtgactgttttgagttttaatccttagttaaaatagaaataaaacacagctagcttacttaaaaagaaacaaaatcttgtggactatatttgaagtacataattaaagaagagtttatacatgtatggtgctgtttcgctcatggtaaatggtgctgagcgaggatcggatgaaggcatcgctccgttccacgaagccatccaaatgggtccacaggaaccagaagctcagggagaaaaacagcactttgctgacccagtcgaggatatacagccgtcgcaggaccttcctggcctgcggcagagtgtcctcgctctcgcccagtatataggtgcgcatgcccacaatgtagttactgatgtatgtctcccaattgacctgacccaccgacgtgtcgaagaggtcctgatccaggaggctcagctgactgctcatctcctggaagcgctcgtttcggaactcccaccttttcgttgtgtagtactgcagcagcttcagacccatggacactttgcgttggacat

SEQ ID NO: 11051 - DNA, 2204 bp, DROSOPHILA
agtttggtgcggcgtcgagtagcgagcggttgtgtagaacagaataaaaaaagagttggaacccgaagaatccaagcgattagcagcatgtatcacctgaagagtctggcccgccagggcgcccgccgccagcaggagctggccacgctggccaaggcactgcccaccgctgtgatgcagtcgagccgcggctatgccaccgagcaccagattcccgaccgcctcaaggatgtgcccaccgccaaggatccgcgcttcttcgacatggtcgagtatttcttccatcgcggctgccaaatcgccgaggaatcgctggtggacgacatgaagggcaagctgacccgcgacgagaagaagcagaaggtgaagggcatcctcatgctgatgcagccctgcgaccacatcatcgagatcgccttccccctgcgccgcgatgccggcaactacgagatgatcaccggctaccgcgcccagcacagcacccacaagacgcccaccaagggaggcaagtgcatccgtttctcgttggatgtgtcacgcgatgaggtcaaagccctgtccgccctgatgaccttcaagtgcgcctgcgtggatgtgccattcggcggagccaaggccggtctgaagatcaaccctaaggagtactccgagcacgagctggagaagatcacccgtcgcttcacccttgagttggccaagaagggcttcattggacccggtgtcgatgtgcccgcccccgacatgggaaccggtgagcgcgagatgtcctggattgccgatacttatgccaagaccatcggtcacctggacatcaatgctcatgcctgtgtcaccggcaagcccatcaaccagggcggtatccacggacgcgtctcggccaccggtcgcggtgtcttccacggcctggagaacttcatcaacgaggccaactacatgagccagatcggcaccactcccggctggggcggcaagaccttcatcgtccagggcttcggtaacgtgggcctgcacaccactcgctatctgacccgcgccggagccacctgcatcggtgtcattgagcacgacggcactctgtacaacccggagggcattgaccctaagctgctggaggactacaagaacgagcacggcaccattgtgggctaccagaacgccaagccctacgagggcgagaacctcatgttcgagaagtgcgacatcttcattcccgctgccgtcgagaaggtcatcaccagcgagaatgccaaccgcattcaagctaagatcattgccgaggctgccaacggccccaccacccccgctgccgacaagatcctcatcgatcgcaacatcctggtcattcccgatctgtacatcaacgccggtggtgtcaccgtctccttcttcgagtggctgaagaacctgaaccacgtctcgtacggtcgcctgaccttcaagtatgagcgcgagtccaactaccatctgcttgcctcagtccaacagtcaattgaaagaatcattaatgacgaatccgttcaagagtccctggagcgtcgcttcggccgtgtgggcggtcgcatccccgtgaccccctccgagtcgttccagaagcgcatctccggcgcctccgagaaggatatcgtgcactccggcctggactacaccatggagcgctccgcccgcgccatcatgaagacagccatgaagtacaacctgggcctggacctcagaaccgctgcctacgtcaactccattgagaagatcttcaccacataccgcgatgccggcctggccttctaagcccgctgagtgtgctgattagcccccagactcttaactagttaattaagcaatcgaactcaagagcataactattgctattgctccatgcaccgccgtcttagatgaaaagtcacaaaaccgaaatgcaagaatcgtaatttatatctatggcaattggagctggccaaaataactcttttaaaaaacaaagcaaaacaaaagcgaactttcgcccgtgtttcgtattaagttgaacaagttgcgagcttattattgttgattttctgtaatttttaagttaatgagcgtcaaagtgaagcaattgcattttcaattatgtatcgcaacgtctcgtaccgtcaagtcacgtttatcgtacgatcgctccgttgccgtaacattaaaataatcaaatatacacaaaactaaactctaaacaa

SEQ ID NO: 11052 - protein, 564 aa, DROSOPHILA
MYHLKSLARQGARRQQELATLAKALPTAVMQSSRGYATEHQIPDRLKDVPTAKDPRFFDMVEYFFHRGCQIAEESLVDDMKGKLTRDEKKQKVKGILMLMQPCDHIIEIAFPLRRDAGNYEMITGYRAQHSTHKTPTKGGKCIRFSLDVSRDEVKALSALMTFKCACVDVPFGGAKAGLKINPKEYSEHELEKITRRFTLELAKKGFIGPGVDVPAPDMGTGEREMSWIADTYAKTIGHLDINAHACVTGKPINQGGIHGRVSATGRGVFHGLENFINEANYMSQIGTTPGWGGKTFIVQGFGNVGLHTTRYLTRAGATCIGVIEHDGTLYNPEGIDPKLLEDYKNEHGTIVGYQNAKPYEGENLMFEKCDIFIPAAVEKVITSENANRIQAKIIAEAANGPTTPAADKILIDRNILVIPDLYINAGGVTVSFFEWLKNLNHVSYGRLTFKYERESNYHLLASVQQSIERIINDESVQESLERRFGRVGGRIPVTPSESFQKRISGASEKDIVHSGLDYTMERSARAIMKTAMKYNLGLDLRTAAYVNSIEKIFTTYRDAGLAF

SEQ ID NO: 11053 - DNA, 5429 bp, DROSOPHILA
aatgaattgttaaaaatatgagttatatgattacatttagtaacaatttaccgacaataatccgcgaaatatgtgatattaagtcgatccactggacaaactgtaacactcggcaaagttgtattccaaaaaatataatttcgctatgaaatcaataaattattgtttgattttagtttatgggaatttagcaatacttcgattccaatatgtgtgcttttggtgtagtaacgatcaatagatgataagcagacaattatgcaaaaatatatcgaagcaatcagtagaattagccagaggaatctggaaaccgaaacgtattttaatcactaataattagtttaagtaatttacaacttacttctcgaacagtataagcattgaatccgtaagatagcgaaatccatgtatgcaacaattgttgaaatacaaaacaaagtaatttattacaatttttaaaccatttctgtactttgagttcttggccaccataatgatgaaattctatagattcctattttttattgactatgagtatagtaatccagttcttaggcgactaaataattgttttttagaccacaaattttataccaattttgccttttgaaaagccataaattctttagcgtgactaagctcgaaaatggctttctgctattaagcagcagctaacttcattatttatttaaaactattacattttgcacttgcgccactctgccatttggaatgttagatgtttattatacttaaactactttaaataaacggctggtcaaaaagaagcaaattacattttgctaaacaatttgtttaaagaaattactcgaaggtattgttggtcttctatatatcgaattctcgatttgttaaatcaatatatatggatagtatactaaatgcaagtgaagtgaaattttttataaactttaaaataacttaaaaaaattcatgagctccgtttagttttgcaaagtcgttatatttctttattgattcatgatggaatatacttttgttggattataaatgtgcgaatctgcatgggaaccagtgtgaccacgaatccggaggcgttcatcgttgaattggccgtcaagggattgtgaggagcatggtaatattcaacggaggaaggaatggaaccggtgccatcttgggcaaatttaaatctcttcacgtcctccaacaacatattaccatccagagtggtttcccaaatttgatatccatctagggactcaaaaagtgggtaaatgttgaagctaactacgtttccttcggtattaaagttctccagtcgtattaatatttggtcctttgagtagggttccaaggaaagcaattcaacggattcgggaataccgaagaaatcgggaatcatgttcctgtttacagaggcgacgccattggacttgctaaagaacttccagaagtgttggtccaactggtgttgcagcaatctttgatttggtttcccatcaacagcatcgaggattaggtatatctttcctcttgcaatcaaaccagttccatattgcgtctcatttagggcttcgcccactccaaacgcatcatcgttcagaaggcgacgatggagcatcagctccagttcgccatcctttaggctggttccaccctgggctctatcattcagcagggtgattcgcttttcgtcatcttgtaacgaaatttgaccagtcaccgggtaatagtttccacttatagcctccgacatatccggagtgaagtgctcccgctgatttctctcacgttccaggatttcacgaccatttgagtccgtgtagaacttgcccttcgaggatatgttgctggaaaaccgggtgattatctccttgccaacatcatcatccgttggaatcggtccgactagccattcaaattcaacacgattgacgtcctcatagattcggattacctgggagatccattcgttgacatgctgatggacttccttaaccttggtgccattatagaatgatagctccaccttgttgttcacaatttcaatatcgccatatggacggaaaacataggcaccggatgatcggtttttcgattcaccattattgccgcgataacccttgtatataccaaaggtctgttgaatattttccgtaaatccgttcattttcacagttttcaagccacccgttgtggtatcaaaagtcagttttaccagctgaaatgtgttagttgaagttaatggttaatatataataagatcaaggtatatccttaccgaagtctccactgttaactcatcctggctcctctctaccgggaattggacttgatcttctgcaatatttttcggtgatggtagcacacgaatcaaaaagttggctattttatcaacactggcttcaaaaaccaactcgtgctgggtatcattaggtcgatgttccaacgccaaaacttgccagggaacgggaaccacttcggaaaatacttcacgacctgatttgaagttttagaaagattagttattattccgaatggatatagagtatatacctttctcatcggtgactatgtagttctcgttcttcgccggaacacgcacatattgtgttgaagaatgagccaatggattgaccagggtcacaatcacattgttggcggtatcttgggtgaaggcacaaacacttatgttgagttccaggcaactctcgaactcccctgaggtcagattggtcagagatcgtagggcatctcgggcactgttttcagctccaacgatggccttgaacaataagcgatcatagtcgctggccaccgcctgtttttcggtacccgtaacagcatcatgatgctgcattatgcccattgcctgactcagattatccagatcttcggagtactgggtgccactcaagttggccaacacactcaattgcttaacagtttggaagaagtgattgccatccctgtggaaacgtttttgggtgggtcgtgaggtgaagtatccggtccagtaggagtgcgaatcactggaatatggaaagaagtcttccgttttgtttggccaagtttgcttcaattggtgcaattcataaagataacacgagggtgtggagtagaatacgttgacttgggatcccgtcgattggcgatcgttgacgtacctgataagtattatagaaaagccatcgataagaaatatagtaatgttgaataaaacttcctgttttgcatgccaattggttgctgtactcacttgataagtttgtccatattcttgaagttaactgctgcatcttcgtactgaaaatcatctcccatgggcaccatgatgtgagtggatcgatacgacttagacatgttcttaacatagtctataaactcactgactctcgcatccacgttattatcatagctctcgccatcgataattggtgcatcctcgcaattgatatcgaaacagaatcccggaggagctgaatagtgattgtagagcatgccagtgaatatattcgaattctttagggactcgctggactgccaaatcatctccatttccagatccagcatacgttgcttcttatcaacgtagtccatgcgtgcgaaaaattcaccattaaatgccatttgtgcgaatatggaggccatttctcgggaatgaccaaatggatcgatctgccaaccaaccgtggggcgtccacaatcaccaaaagtatctttaagatatctgcaatagaatcaactatatatcttatccttttaatggaagttaacctaccttaagcccaggttaaactgatctacaacactttgatagtgaactgtggcctcatcgttcatgctccaagctccaccagcgaattccaaacgtccttgggccaccaactttttcaccgccctttggaccgtttcagtttgctccgaataccattttgcaaagaaaaacgtttccacctggatgaagcgcctcgacgaatccttgaggagctcctccaccacggtgtccaaaatgtattggactccagcgtgttgtatcttgttctgactaccataataatactgatccactgtctttagccatccaacgtcgtcgtgcgaatgcggcaccaagtgcacattgatcatgtttagtttcgttgcgggacatgcctacaattagtgggtatacttcaagatatatggcccaacaaatatgtactccagaatgggttacctcgaatccacaggttgtctcgcatatcgctgtgttcagtagaaacagtgtgataaatacgagtatgccaccgaagtattccatttcggtaaacgcagagctcctcggggattggtcttatcggtagcgttgagtcgaataaaatgaaacgagaaatgaggcaactccttaggccccagcaatgtggcacttgaggcgataaaccttgtactgcgatcgcattattaacttgagtgggattatgaaattaaaatccatttaggagcaacagcgataaacatttacaccctagatagatgggaaaatactcgttaatattggtttgtttgtacttatgccagtgtaaatcttcattcacgttcgctaaaaataatgattatgtatagaggagtgaactttaggtttgccgcttatcaactgagttttcaaaataaacatacttattcgcatttgtttatgtttaatttgtactcaacgacttctgtattttgcattataatccttatcatcgctgcaatcgtttcaagtaattaattattccgattacgaatggaagctttatgaatttgtactcaatcaagtggtacatacatacaatagatggtcttgtatttgttataccaattataatggtgatatgtggttttcttcaaggatactgtattcatatgtataaaataatacctttatttacaataatatatagattatgcagaaaaacctctacatccgatagtttccaaagtttattgggaaaaatgttctagaccacaacttaaaaatttccaaacattcatgccttattattcttttgtaaaaagtttagaaatgccatcaatttaattgaacaaaatttttgaaggtccatttatcccctgccaaatgttaataaaccaatgggatttatttacaaaactttgtgctaagacttccaatcattagtatatatatatatatatatatacaatttgcagatatttgtaaatatatatgcacatctaggtataatatacctagagtataatacctaagtataataatacttaatgaacttatgaacttttttggactgcttagttattgaatgaaatttcctgaaatttcttagttcttatatgtaaactatctcaagtcgtagaaatgctacgatttgcgatgtttctagctttgaaatgacaattttctgatatattttactggtaattgggattatcagcattctatcaat

SEQ ID NO: 11054 - DNA, 3105 bp, DROSOPHILA
ttaataatgcgatcgcagtacaaggtttatcgcctcaagtgccacattgctggggcctaaggagttgcctcatttctcgtttcattttattcgactcaacgctaccgataagaccaatccccgaggagctctgcgtttaccgaaatggaatacttcggtggcatactcgtatttatcacactgtttctactgaacacagcgatatgcgagacaacctgtggattcgaggcatgtcccgcaacgaaactaaacatgatcaatgtgcacttggtgccgcattcgcacgacgacgttggatggctaaagacagtggatcagtattattatggtagtcagaacaagatacaacacgctggagtccaatacattttggacaccgtggtggaggagctcctcaaggattcgtcgaggcgcttcatccaggtggaaacgtttttctttgcaaaatggtattcggagcaaactgaaacggtccaaagggcggtgaaaaagttggtggcccaaggacgtttggaattcgctggtggagcttggagcatgaacgatgaggccacagttcactatcaaagtgttgtagatcagtttaacctgggcttaagatatcttaaagatacttttggtgattgtggacgccccacggttggttggcagatcgatccatttggtcattcccgagaaatggcctccatattcgcacaaatggcatttaatggtgaatttttcgcacgcatggactacgttgataagaagcaacgtatgctggatctggaaatggagatgatttggcagtccagcgagtccctaaagaattcgaatatattcactggcatgctctacaatcactattcagctcctccgggattctgtttcgatatcaattgcgaggatgcaccaattatcgatggcgagagctatgataataacgtggatgcgagagtcagtgagtttatagactatgttaagaacatgtctaagtcgtatcgatccactcacatcatggtgcccatgggagatgattttcagtacgaagatgcagcagttaacttcaagaatatggacaaacttatcaagtacgtcaacgatcgccaatcgacgggatcccaagtcaacgtattctactccacaccctcgtgttatctttatgaattgcaccaattgaagcaaacttggccaaacaaaacggaagacttctttccatattccagtgattcgcactcctactggaccggatacttcacctcacgacccacccaaaaacgtttccacagggatggcaatcacttcttccaaactgttaagcaattgagtgtgttggccaacttgagtggcacccagtactccgaagatctggataatctgagtcaggcaatgggcataatgcagcatcatgatgctgttacgggtaccgaaaaacaggcggtggccagcgactatgatcgcttattgttcaaggccatcgttggagctgaaaacagtgcccgagatgccctacgatctctgaccaatctgacctcaggggagttcgagagttgcctggaactcaacataagtgtttgtgccttcacccaagataccgccaacaatgtgattgtgaccctggtcaatccattggctcattcttcaacacaatatgtgcgtgttccggcgaagaacgagaactacatagtcaccgatgagaaaggtcgtgaagtattttccgaagtggttcccgttccctggcaagttttggcgttggaacatcgacctaatgatacccagcacgagttggtttttgaagccagtgttgataaaatagccaactttttgattcgtgtgctaccatcaccgaaaaatattgcagaagatcaagtccaattcccggtagagaggagccaggatgagttaacagtggagacttcgctggtaaaactgacttttgataccacaacgggtggcttgaaaactgtgaaaatgaacggatttacggaaaatattcaacagacctttggtatatacaagggttatcgcggcaataatggtgaatcgaaaaaccgatcatccggtgcctatgttttccgtccatatggcgatattgaaattgtgaacaacaaggtggagctatcattctataatggcaccaaggttaaggaagtccatcagcatgtcaacgaatggatctcccaggtaatccgaatctatgaggacgtcaatcgtgttgaatttgaatggctagtcggaccgattccaacggatgatgatgttggcaaggagataatcacccggttttccagcaacatatcctcgaagggcaagttctacacggactcaaatggtcgtgaaatcctggaacgtgagagaaatcagcgggagcacttcactccggatatgtcggaggctataagtggaaactattacccggtgactggtcaaatttcgttacaagatgacgaaaagcgaatcaccctgctgaatgatagagcccagggtggaaccagcctaaaggatggcgaactggagctgatgctccatcgtcgccttctgaacgatgatgcgtttggagtgggcgaagccctaaatgagacgcaatatggaactggtttgattgcaagaggaaagatatacctaatcctcgatgctgttgatgggaaaccaaatcaaagattgctgcaacaccagttggaccaacacttctggaagttctttagcaagtccaatggcgtcgcctctgtaaacaggaacatgattcccgatttcttcggtattcccgaatccgttgaattgctttccttggaaccctactcaaaggaccaaatattaatacgactggagaactttaataccgaaggaaacgtagttagcttcaacatttacccactttttgagtccctagatggatatcaaatttgggaaaccactctggatggtaatatgttgttggaggacgtgaagagatttaaatttgcccaagatggcaccggttccattccttcctccgttgaatattaccatgctcctcacaatcccttgacggccaattcaacgatgaacgcctccggattcgtggtcacactggttcccatgcagattcgcacatttataatccaacaaaagtatattccatcatga

SEQ ID NO: 11055 - protein, 950 aa, DROSOPHILA
MINVHLVPHSHDDVGWLKTVDQYYYGSQNKIQHAGVQYILDTVVEELLKDSSRRFIQVETFFFAKWYSEQTETVQRAVKKLVAQGRLEFAGGAWSMNDEATVHYQSVVDQFNLGLRYLKDTFGDCGRPTVGWQIDPFGHSREMASIFAQMAFNGEFFARMDYVDKKQRMLDLEMEMIWQSSESLKNSNIFTGMLYNHYSAPPGFCFDINCEDAPIIDGESYDNNVDARVSEFIDYVKNMSKSYRSTHIMVPMGDDFQYEDAAVNFKNMDKLIKYVNDRQSTGSQVNVFYSTPSCYLYELHQLKQTWPNKTEDFFPYSSDSHSYWTGYFTSRPTQKRFHRDGNHFFQTVKQLSVLANLSGTQYSEDLDNLSQAMGIMQHHDAVTGTEKQAVASDYDRLLFKAIVGAENSARDALRSLTNLTSGEFESCLELNISVCAFTQDTANNVIVTLVNPLAHSSTQYVRVPAKNENYIVTDEKGREVFSEVVPVPWQVLALEHRPNDTQHELVFEASVDKIANFLIRVLPSPKNIAEDQVQFPVERSQDELTVETSLVKLTFDTTTGGLKTVKMNGFTENIQQTFGIYKGYRGNNGESKNRSSGAYVFRPYGDIEIVNNKVELSFYNGTKVKEVHQHVNEWISQVIRIYEDVNRVEFEWLVGPIPTDDDVGKEIITRFSSNISSKGKFYTDSNGREILERERNQREHFTPDMSEAISGNYYPVTGQISLQDDEKRITLLNDRAQGGTSLKDGELELMLHRRLLNDDAFGVGEALNETQYGTGLIARGKIYLILDAVDGKPNQRLLQHQLDQHFWKFFSKSNGVASVNRNMIPDFFGIPESVELLSLEPYSKDQILIRLENFNTEGNVVSFNIYPLFESLDGYQIWETTLDGNMLLEDVKRFKFAQDGTGSIPSSVEYYHAPHNPLTANSTMNASGFVVTLVPMQIRTFIIQQKYIPS

SEQ ID NO: 11056 - DNA, 4226 bp, DROSOPHILA
atgggaatgggccaaaaagacccgcaggcgcacaaagatgattcaattgattgattgattgattgattgaccgctttgccgcagcagcggaaaacagcggccggggggaaaacagactttctagccgatgacgtcaagcaaatcgatgctgggtggcattcaagatgctaattcatccttatgacttctattcagatccagattgagatacagatacagattgacttgcaactttaaattagctgaattgtttctgaactagagaaattgaataagggactgctgtaaaatgattgcattttctgtcataatctgtgcaaacgaagttaaccatgtgaatgggaattgagctgcaattgaagtaattttaaactaagatataggttaatcaataaaaaacgaaatctgatttaattttataaatatgactaagtaataatgtctcctctcaccaaattgtctctttgtgaatttgatataatatcaaggtttagggcggactttctttgactatattagaccattttatctgttggcctcttatctcttttcacttctccggactatctactttttaagtgctattattaacaaacaaactgtagcagatgcgctctcacacgggaactagtttattgataacactttgctctgaaccagagtcgtacagagaactatttgttaaaagggggtcctaatccaaactatatacttgttgtatattagttcttacaaatgatataacaatttcatattacaataatgtttgatatatatcttgtggtaaaataaaacaaaaaaattaaaaaaattatttgagatttgagaaacagattgtctacgcccctgcttcatctggatgcccacttgtgggtctggtgagctggcaggcaaagtccaaagacccgatttagctgctgattataatatttagctttctccggcgtttctcattcggcatttaaatctcgagcagtcggcacacaccgagtcgatcgccatgtgggttccgagattactgggtcgttccctgagtcaactgaagaccattaactccgctcagttttctcgccaaatcagtgccaagatcgtgaatgaatcgagtatcgaggttcaaccggaggcaaattccaaaccgcttacttttccgggtatttggctgcgggacaattgcatgtgcgaggattgcttccacggcagctccaagtcgcgtaagctggactgggataacttcgatacccgcatccggccagtcagcctgcagacagatgagcaatccaaggaagtgctggtcaagtggagcgatgcacacgagagcaggttctctttgaagtggctaaaggagcgatgtttcgagcctgataaacagcaggaatacctgcgggacttctacagacccacgactagacactggtcgggtgcagagtttcaggatattgcccagcactttagctacgatgaggtgatgtcccaggattcggtgctgatgcagtggctccaggcgctggccatctacggtgtggctctgctccgaggagctccactggacgagggcgtggtgcgacgactggcggaccgggtgggcttcatccggcgcaccacctacggcgaggagtttgtggtgcaggccaagccgggtgcccagaacttcgcctacctttcgctgacactgcccctccacacggatctgccctactacgagtacaagccaagcgtcaacatcctgcactgcgttgtccaaacggattcacctggtggcagcaatatgctcgtggatggcttccatgtcgccgatctcctgcgtcgcgatcatcccgaagacttcgagcgactgagtcgcatagtagtcgattggaacgacattggcagcgaggatggacgagagttccacaacatttggagggcaccagtcatttggtataacaacattcattttactagtagttttattgagttcgaaatgacattcccctttcccatgcccacagcttggacgaggaggggcgatacacgcggataaatcacagcgtgccgcagcgggacagtcacttcaatgtgccgctcgaggaggtccttccgtggtatgagtcctacgcccttttcgttcgcctggccatcgccgatagccacgccttcaaaacgcgtcccggcgacgtcctgaccttcaacaatattcgcctgctccacggacgtactggttatgatgattcggaggagagtccgcgctatattgtgggcgcctatctggactgggacatcatatattcgcgcctaagggtattgaaaaaacgcttgactgcgagttgccaataaaaagcgagataacatattttccaagccatttgatgtgagcttctcatttgaatagtggccccatcgcccaacggattttgggtgctttgccagcgcagccacatatgctcctgaatcctgaatcctgaatcctggcatcttggcatccagcagccgccggaatccttctaatccggtttagcttagggcgccaatttcggcagttaaaccagctcaagcgcaaaaatgaaaagttgtaaaaaatcgcgatgatcctggcgatgaaaaaaagtcaccacgttgagtgggagggcaacacttgatgggcggtgggggaaaatgtctcggcttatttgcatcgcggcattgcctgacaaatcgtttgtgaaaatgattgacgtcggggcgttaggggtataaaatgcgtgaaaaggggcggggcaaattggccaaaacaaggtgggagtgtcgaaaagttcagatttttttagggtgaatcacttaaaatctatcacacaggaacaaccttttatcttctaatagaaatgaatgttttacactaaacattttatttattagtatgcatatatattttaaagagaaattatatagtataattttttaacttttcataaatgctgcttgttaagctttaatgtacttcattttagtttaaatgttttcactaataaattagctcctaataacaaaggttttttattgtgaggtgtcgttgccatttgcataattttcttcatgataatttagcttctgtgcagtttttccactttccttgtggagagaccttatacaaatctcagtttggagtgcattaaccttaaatagcgctcaatgagtagcccgttaatcggccgacacgcgtctccaggtcctcgaggtgccagctctcgggatcctcgaagtacccgactgaatggggcaaaaaagaaagtacttgaaacccggaaacgtagccgtaaatgttgccgtaaccgttactgtaaccgtgcccttacccttaccaccagaaaaaaaaaaaagaaggaaaatctgccgcctccggctggaaacttctatgccaatttccttttaaatattttatagggccccattatgcctacttatgtcttgttatagtaataaaataaaatttaaaagtacacgcggtcgggggtgtggtcctggtcgtgggtggcaaaaagtgcggagatggcgagcgaattgttaagaaaaatatgaaaagtctgcggtagcaaaactcgacaactcgcagccgttggaaaacatttcgaacaacagttacaacgccagcaactccacatcgacatccacatgcccagcccgaaaatcccactccgaatttcctcgtccttcgagtccttgcaataacaggaacggcaacagcaagtggaaaagcagaaaaaccctaaacctagactgggtaagatggggaaaacccttgaagagaaaaagcggcggagatttgcggtcgaaattcggctgtcgtggtagagttttgacctgcaataatgtgccatatctctggggagtttcgacaattcggaaagtttgttccatacaaatatggaaaattagctattaataggtaagtagttccagaactagaatatctagagaagagccagcccaaaagtatgctggagtctgtggcaagcaattgtgtccagtacgaagtgttacatacttaggggaaaagtcttgtttaatatgcatgttggttgtttatattatattaaattcagatacgaaaatgcttattgaatcttgaaattaaatatatttatgaacttccttatacatatcttaatgcttagcgcggaactaaatctcagtttcaattgatcttcctaactgcggtagtgcatttatccttgtacccaagtgaaagcatttccatggcgaaatccttgtgt

SEQ ID NO: 11057 - DNA, 1251 bp, DROSOPHILA
atgtgggttccgagattactgggtcgttccctgagtcaactgaagaccattaactccgctcagttttctcgccaaatcagtgccaagatcgtgaatgaatcgagtatcgaggttcaaccggaggcaaattccaaaccgcttacttttccgggtatttggctgcgggacaattgcatgtgcgaggattgcttccacggcagctccaagtcgcgtaagctggactgggataacttcgatacccgcatccggccagtcagcctgcagacagatgagcaatccaaggaagtgctggtcaagtggagcgatgcacacgagagcaggttctctttgaagtggctaaaggagcgatgtttcgagcctgataaacagcaggaatacctgcgggacttctacagacccacgactagacactggtcgggtgcagagtttcaggatattgcccagcactttagctacgatgaggtgatgtcccaggattcggtgctgatgcagtggctccaggcgctggccatctacggtgtggctctgctccgaggagctccactggacgagggcgtggtgcgacgactggcggaccgggtgggcttcatccggcgcaccacctacggcgaggagtttgtggtgcaggccaagccgggtgcccagaacttcgcctacctttcgctgacactgcccctccacacggatctgccctactacgagtacaagccaagcgtcaacatcctgcactgcgttgtccaaacggattcacctggtggcagcaatatgctcgtggatggcttccatgtcgccgatctcctgcgtcgcgatcatcccgaagacttcgagcgactgagtcgcatagtagtcgattggaacgacattggcagcgaggatggacgagagttccacaacatttggagggcaccagtcatttgcttggacgaggaggggcgatacacgcggataaatcacagcgtgccgcagcgggacagtcacttcaatgtgccgctcgaggaggtccttccgtggtatgagtcctacgcccttttcgttcgcctggccatcgccgatagccacgccttcaaaacgcgtcccggcgacgtcctgaccttcaacaatattcgcctgctccacggacgtactggttatgatgattcggaggagagtccgcgctatattgtgggcgcctatctggactgggacatcatatattcgcgcctaagggtcctcgaggtgccagctctcgggatcctcgaagtacccgactga

SEQ ID NO: 11058 - protein, 416 aa, DROSOPHILA
MWVPRLLGRSLSQLKTINSAQFSRQISAKIVNESSIEVQPEANSKPLTFPGIWLRDNCMCEDCFHGSSKSRKLDWDNFDTRIRPVSLQTDEQSKEVLVKWSDAHESRFSLKWLKERCFEPDKQQEYLRDFYRPTTRHWSGAEFQDIAQHFSYDEVMSQDSVLMQWLQALAIYGVALLRGAPLDEGVVRRLADRVGFIRRTTYGEEFVVQAKPGAQNFAYLSLTLPLHTDLPYYEYKPSVNILHCVVQTDSPGGSNMLVDGFHVADLLRRDHPEDFERLSRIVVDWNDIGSEDGREFHNIWRAPVICLDEEGRYTRINHSVPQRDSHFNVPLEEVLPWYESYALFVRLAIADSHAFKTRPGDVLTFNNIRLLHGRTGYDDSEESPRYIVGAYLDWDIIYSRLRVLEVPALGILEVPD

SEQ ID NO: 11059 - DNA, 3236 bp, DROSOPHILA
caaagagcacagcccatcccagcccagccatttgaccatatgagcggaattgaggaaaccaagcggggttcctccgcagcggtgaccttcgggcgggagtggacctagagctggacgccctactgcaaaatccatgtgtcccgtccatgggtgtgacgttctggtttcggaattggtcgcgcatcagcgtcgcgccgtgaccttgatggttttgcgacccctccctcaccactcagtatgtgcggtttgggctctggtcgcagtttggtcgccgatctccgtccgcgcacagcgaggtgccattcccggggagattggctgagagtttcgcagaagatgcgtaaatattttgggtgattattttagataatcttcgactaatgtccttggtttgtctctcaagacaggagggatattgaggtgcttcgaatttaagtttattagtctgatgtaggcctagatttaaatatgtacactattatattgtagatgggtgtactgatgacttgttgttgtaagacatataattttctaaatcaaaactcgaaattttcattgacaataaatatatgttatatgaattaaatggctagacattttcacacttatgtgtagtccacaataataatgcattccagattatttcgaaataggtattctgaacttgttttgaactttatataatagtaacaaataagaattcttaatttaaggaatatatttactaaaaattaaacaaaatatagctatttttcttaaaaaaaacattaaatgcatttaaaagttgtttaagtaatatgaattttgtctaagccctaaccgaaactgaaatcttaaaattaaaaccaacaattatatagaaaagttaatttttaaatttttttcttatcatttcgcatccttttaaaaagccgttacgaatgcggtcgcactaagatgtgagtcagtgtagccacacctgttcagctgactgcggtatgcaccagcagcagatgaacggtcccactgattgattcagtcagtctttattttttaccatttcccacccaccacgaaatcaaggaaaagcatcccgaaattgcacaatgtccgaagaaaagaagaatggcgatgaattaaacgacttgctggacagtgagtacagcccggaaatgcctttggcgatcccttctcgaccccttacataatgcgcactgcgtcgtccacttttcgcacaggtgctctccaggatttcgataaaagtggtgccggtgaccaaaaggagccgtccgcatcatcggatgtggcgaccaacgctggacctgagggctccgaggatccagatgcgtttttcatgtgagtcaatgcgccagtgcaacgcggcacttgaactttgtattctgacctgttatccgccttcagtgagcaggccaaggtgctggccgatcgcatgaacacgctcttcggaggtccggacacgcccagtggcgatattccgccgctgccccaggatcccgaccagatcatggccggtttcaaaaagatggccgaagcggcagcgctcaccttgagcggcgaaaattcggccaccgacgaggatgtctccaagtattctgatagcatttcccaggctctcaagggtctgcaagagggctccgagaacctggctgctcccgcctcggagaacgacatagccagcatgtttggttcactgaatcttgaaggggtatgcatcctgaaaatgaaatatgaattctccttgctcaatcattaaacaatccccgtttgacaggctggcgagggtgatggaaacatgttcctaccattcatggagggcatgatgcagagcctgctctcggcggagattctgttgcccagcatccgggagctgctggagaagtaccccaagtacctcgaggagaacgacgccaagctctccgctgaggacaaggaaaggtatgctcgaaatcaactcgcaataagatacttttattgagaaaccaatacatacaggtaccagaagcagatggagctgtacaaggtgattgaggggcatttacagagcgagaagaccgaggattcggccgccgtgaagcgagagaagttccgcgtcgtgctggacgacatgcgcaaactgcaagactacggccagccgccgccagagattctggccgagacgggcggcgacttgcccttcggcgatcccactgccggcgtagcagccggcggtcccggtccccagtgcccaaccatgtagtggctgacggagcacgatagtctcgtggtgtgccaattggttaactgttgagtgttgcacattttttaggctaaggcaaatttgtattttattttatcaccgacaaaacaatacggcggtcgctaatggttatcacctctctcttcaatcaagctattattttcgtattaactgttggtttattaagtagttctatacctaaatacaatgcctcgaaatacacctagaggaagaagcgacgtcgcgactccatggcgtgccgtttgttgctgattatccaggcatagtcaccggtcttgctgtcgaatgtgccctcctgcagggaacgtagtttcagggtgaaccgcggccccagttcgcgcagctttacgcgttttccctctttggtgaactcgtagcggtggtgacggaagaatatgtaatctcgctgattgtggaacgtcaccgctcggcggccgcggaactcgggatcgtgatggaagagggcacccagcatgcggcccacggtcagacccaaacgtgtggtaaaattgttcaggatcacttcgggcctgtgcttggttatctccttgtgatcgcgctttatgtccgaggtgagcttcacgttggacagcttgaagtgggcagtgggaccattgggcagatgaatgaccagcagcccattgggctttctgcgatcttcgttaacgatcacgacgtctgtgaactcctcgcgctcggcgcttttgcatatcttcttcaccgacgacttgttgcgaatcttaaccagggcgttggggaatatgcgcgaaagctccagtccaaacttacgcgtcttggtcaccggattgtcagcaaaagtgatcagcacctttggctcgtacgaacgttcgaagtacgagctgaaatcgtccagttggagttccttttgcaactcctcgttgtcggaatcgttcagattggccacctctgtttggtccttctctcgcaggctctctatggtgtgaccaggattggcggg

SEQ ID NO: 11060 - DNA, 964 bp, DROSOPHILA
tcccactgattgattcagtcagtctttattttttaccatttcccacccaccacgaaatcaaggaaaagcatcccgaaattgcacaatgtccgaagaaaagaagaatggcgatgaattaaacgacttgctggacagtgctctccaggatttcgataaaagtggtgccggtgaccaaaaggagccgtccgcatcatcggatgtggcgaccaacgctggacctgagggctccgaggatccagatgcgtttttcattgagcaggccaaggtgctggccgatcgcatgaacacgctcttcggaggtccggacacgcccagtggcgatattccgccgctgccccaggatcccgaccagatcatggccggtttcaaaaagatggccgaagcggcagcgctcaccttgagcggcgaaaattcggccaccgacgaggatgtctccaagtattctgatagcatttcccaggctctcaagggtctgcaagagggctccgagaacctggctgctcccgcctcggagaacgacatagccagcatgtttggttcactgaatcttgaaggggctggcgagggtgatggaaacatgttcctaccattcatggagggcatgatgcagagcctgctctcggcggagattctgttgcccagcatccgggagctgctggagaagtaccccaagtacctcgaggagaacgacgccaagctctccgctgaggacaaggaaaggtaccagaagcagatggagctgtacaaggtgattgaggggcatttacagagcgagaagaccgaggattcggccgccgtgaagcgagagaagttccgcgtcgtgctggacgacatgcgcaaactgcaagactacggccagccgccgccagagattctggccgagacgggcggcgacttgcccttcggcgatcccactgccggcgtagcagccggcggtcccggtccccagtgcccaaccatgtag

SEQ ID NO: 11061 - protein, 292 aa, DROSOPHILA
MSEEKKNGDELNDLLDSALQDFDKSGAGDQKEPSASSDVATNAGPEGSEDPDAFFIEQAKVLADRMNTLFGGPDTPSGDIPPLPQDPDQIMAGFKKMAEAAALTLSGENSATDEDVSKYSDSISQALKGLQEGSENLAAPASENDIASMFGSLNLEGAGEGDGNMFLPFMEGMMQSLLSAEILLPSIRELLEKYPKYLEENDAKLSAEDKERYQKQMELYKVIEGHLQSEKTEDSAAVKREKFRVVLDDMRKLQDYGQPPPEILAETGGDLPFGDPTAGVAAGGPGPQCPTM

SEQ ID NO: 11062 - DNA, 5303 bp, DROSOPHILA
ttacagtggagccggtgatgctgcaaagtctacagcaactgattcagtgggtcaccgacctggcactcaacatgctgcatcgtctgcccgaggaggtaatgaagaccaagctctccggaaagcggcctagctacgatatcagccgagacatcgtggccatcagcagtctgcgcgagctgctggttatgatccgcatttggggcctgttaaacacccagtgcctgcccgtctacaccaagacgatggacaacatcgatgtgctagtgatcttgtttcgtttgcttactcgcctggcccagaatcctgcagaaccggacgaaatgctgctggacgagtgcagcctgctttccaagcagctcctaattccccagcccaccaagttcaaccccaccacgctgctgagtgcccaaggattcgcggccgtaaagtcgggacagctgcagttcacctccatggaggagccaacttgcttgcaggacatggagacggaggaggtggtcttcgccagctctgtgaaggatggcgtgagcaatctccaactgggcgcccgacccagccacattcggagatgcgcccgctgcggattcgtgttcgtgaataacgccagcaaagtggccaagacgtcggccctcaaggcgtggtttagtaagtggctgcactgccactgtgggggcttttggaagcaggttcactagtaaatctatgtgagcaatgaccttagttattaagtatgatttaagcttcaaataaaagtacatgattgccagcaattttagtgaaatcaagaaatttaatatactaaatatatttcttctttgcacgacgtgctcgttcaaaaaacttaagccacagagaagtcaccaccatacttcactatttcaaaactaaatttatttgaataaaatatattttttaactctatctatgaattgtggttggtgtatttgctaacggtttgatattaacaacaacaacatatcgaagaacttgcatcactagcatgtcaatcgatatcaggacgtccaatgtgtctgtcggctgtcggcaatcgatatctcctctgcaaatagatattttcagaataattggcttatttcacttcgccctaacgctgcagtaatggtaagtgcatcgaggtgcaacctgtagtcgccagaagtcgaaattcctagagaaccgagtgccccaggtccaggcttaaccgagtgctgagtgcccaccctgtcgacgtcaaaagagggctgcctgtggtgagaagcaacgcccccccggtccaaatcccacgtccatgtatccctggagctcctcctcgtacggcggccagattcccagtgccgccaacgtccgggtaaatactccgccaatcccagattacgaatcttggatatgtgtaatcgttaatccacttatcttcaatttggtcaatccttcgtctcaacttccggacttcttccgggaatgagtaaagtgggcttatctcgagtttattttatttttatatgtatatcttagccaataatattgcttaccatctgtcctttcagaccatgccgaatggtttggatgaccaggagaagctgctcgctgaagccattggactagcgaggaagcaggcctttcaaatgaaccactttctggataaggagcgtatgctggactcgctcaagtgcgccagcaccatgctgggcgagctgcggacctccgtcctttcccccaaaagttactacgagctgtgtgagtaaaaccaaagcgtctttatacaacttcagatctaatcgatttaaatgaaccgcagacatggccgtcaccaacgaactgtgccacctggagctgtacctcagcgagaaaatcgacaagaaaacggatttgtacgagctcgttcagtactcgcatactattgtgccgcggttgtacctcctcataacagtgggcattgtgtatatcaagaatgaccctacgctgaagcgcagcattctaaaggacctggtcgagatgtgccgcggtgtccagcatccgttgcgaggcctctttctgcgcaactacctgctgcagtgcacccggaacatcctgcccgatgtgatggttgaggagaacgagcacgagggcaatgtctatgatgccatcgacttcgtgctgaccaactttgccgagatgaacaagctgtgggtccgcatgcagcaccagggacactccagcgaaaagacgcgtcgcgagaaggagcgtgaggaactaaagatcctggtaggcactaatctggtgcggttgtcccagctggagtcggccactctggaaatctaccagcgactcattctacccggcatcctggagcaggtggtcagctgtcgcgatgcaattgcacaggagtacctaatggagtgcatcatccaggtgttccccgacgagttccacctaaagacacttgaccccttcctaaagtcctgcgctcagctggagaccggtgttaatgtgaagaacatcataatatcgttaatcgaacgattggctgcctataaccagcgaagtggcaaggtaagcctcccccgtcgcttccagcgctaagataatatctaaactacttatattttagacaagtggtaatgccatcgatgccatcatacccgccgaggtggaactgtttgaagttttcagtgtccaagtggctaacatcgtgcagacccgaatggacatgccgttggaggacaccatatcgctgcaggttgctctgctgagcttggctcagaaagtgtatcccgatcgagttgactatgtagataaggtgctgggcacaaccgctcaaattttgcagcgcatgaacatgaacaagtaggttgaactctaataggggagcatcaagtttgctacatattcattccttgcagcatctcccatttgctatctgtaaaccaggagttatcgcgccttctgcgcatctgtatcgacttctacaacaacgccttgaccataattcaacttcaaaacttttgcccgctgctcgaaaagtttgactacacatcccgtaaatcgctggccctgtacctagttatgaacatcttggacaacgaaaccctagttccaacagctgatcaggcggatagtctgctgaccatcattacgccgttgattaaggacgatgatacgaacaaagaaaacggcgcggcagcaggaaatacgactccggatgccgaggagtttgccgaagagcagggggttgtggcacggtaggttattatttccttcgcacaaaacatttctaaatcatttccctttttaagatttattcacctcatgcgctcagatgaaccggacatgcagtataaaatgctgcagaccgcccgaaagcatctgggaaatgggggcgggcaaaggctaaagcatgtcctacctccgcttgtcttcgccgcctatcagctggccttcaagtacaaggcgatcgccgagcaggatgagaactgggacaagaagtgtcagaaaatcgtgcaatactgccacagtaccatcagtgcgctggccaaagccgatctcgcagacctagccctgcgtctatacctgcaaggtgccctggtcattggggagatcggttatacgaatcacgaaacggtggcatacgaattcatgacccaggccttctccctctacgaagacgagatctccgactcaaaggcccagcttgcagccataacgctcatcatgtccacttttgaacaaatgtcctgctttggcgaggagaacgctgagccgcttaggacgaattgtgcgctggctgcttcaaaattgctgaaaaaaccggatcaatgtcgcggtgttgtggcctgtgcggcgcttttctggagtggaaagtaagttggatatgaaatcttgattgaaattttactgatataacttaattcgctaccaggcaaaacggcgaggagatgcgtgacgagaagcgaactttggactgcttaaagaagggtgctcgcatcgcttcgcagtgcttggataccggagtgcaagttcaattgtatgtggagctgctgaatcactatctgttttacttcgaacgcggcaactcgcttatcactgtggctatgctcaaccaggttactatagctcattgaaaattgaaaagtccatttaactaaatagaatttcaatattacagctaattgccaaggtgaatgaggagctgcccaacctggagcccagcgaggagaccaaacagatcgagagccattacaagaacacgctggcacacatccgcagtcgcatggaatccaatgactcgtcgctggaggtctcctttgcgggcataactctcaattagcccagcgcacccactttggataaccctgggaagcatccaagcgctactaaagccctgcaggaggatcagccaggcccgtttttatacagctagttatcaacttgctcgtagaccgtttagacttattcaaagctctgcgagagtattcaaattgcttgtgtgtgaaactaaattccatggttaggaaagttgtgggccttcgaccaacttttgatttgtcaatttgatttcgatcgtaatcgtaagtgcaaagtaaaaacattcttgattatttccccaatttatttagtatgatagctatgcgtatatttaccccagaggatttttaatttaccatatttaatctccaaaccttccctaaaaaataatgtgaaaatattgttaaacaaaatcttacataccattatcgaattggttcacgaatcgccacgcgctacgtataaatatgtattacaaataaagttaagaccaaattgttttcgcaaaacaatgcgcctgtatgtgtggcctggactacagtgaatcaaaactcgtcagcgataaacatgtaaagtaattcgtttattaaaaatatataagccgactaatttccatcggtctatcaatcaatcagttaacttagcttccatttacaatacacgatgagttcgcactcgtacatatcctacagactctcgccgatcgaatctagctccgcgtccttattcgtccttccatcaatcacatgcgctacaagggtgctggatgttcgtgtccttccggttcctctgattggtgtggcagtattcgggggatggagcggtgttgggtggcagtttcgtgttgcttcgagaccagttagtgggtgagagtggttagggacaggcctggtactgcgggcagttaacttggtgcgtatgcgcaacttaaagctaatatttttagtcactaggttctaagcataaacattacagatagaagcgcctaattcactttgagtgccatatagcagcaaatggaa

SEQ ID NO: 11063 - DNA, 2664 bp, DROSOPHILA
atgtcaatcgatatcaggacgtccaatgtgtctgtcggctgtcggcaatcgatatctcctctgcaaatagatattttcagaataattggcttatttcacttcgccctaacgctgcagtaatggtaagtgcatcgaggtgcaacctgtagtcgccagaagtcgaaattcctagagaaccgagtgccccaggtccaggcttaaccgagtgctgagtgcccaccctgtcgacgtcaaaagagggctgcctgtggtgagaagcaacgcccccccggtccaaatcccacgtccatgtatccctggagctcctcctcgtacggcggccagattcccagtgccgccaacgtccggaccatgccgaatggtttggatgaccaggagaagctgctcgctgaagccattggactagcgaggaagcaggcctttcaaatgaaccactttctggataaggagcgtatgctggactcgctcaagtgcgccagcaccatgctgggcgagctgcggacctccgtcctttcccccaaaagttactacgagctgtacatggccgtcaccaacgaactgtgccacctggagctgtacctcagcgagaaaatcgacaagaaaacggatttgtacgagctcgttcagtactcgcatactattgtgccgcggttgtacctcctcataacagtgggcattgtgtatatcaagaatgaccctacgctgaagcgcagcattctaaaggacctggtcgagatgtgccgcggtgtccagcatccgttgcgaggcctctttctgcgcaactacctgctgcagtgcacccggaacatcctgcccgatgtgatggttgaggagaacgagcacgagggcaatgtctatgatgccatcgacttcgtgctgaccaactttgccgagatgaacaagctgtgggtccgcatgcagcaccagggacactccagcgaaaagacgcgtcgcgagaaggagcgtgaggaactaaagatcctggtaggcactaatctggtgcggttgtcccagctggagtcggccactctggaaatctaccagcgactcattctacccggcatcctggagcaggtggtcagctgtcgcgatgcaattgcacaggagtacctaatggagtgcatcatccaggtgttccccgacgagttccacctaaagacacttgaccccttcctaaagtcctgcgctcagctggagaccggtgttaatgtgaagaacatcataatatcgttaatcgaacgattggctgcctataaccagcgaagtggcaagacaagtggtaatgccatcgatgccatcatacccgccgaggtggaactgtttgaagttttcagtgtccaagtggctaacatcgtgcagacccgaatggacatgccgttggaggacaccatatcgctgcaggttgctctgctgagcttggctcagaaagtgtatcccgatcgagttgactatgtagataaggtgctgggcacaaccgctcaaattttgcagcgcatgaacatgaacaacatctcccatttgctatctgtaaaccaggagttatcgcgccttctgcgcatctgtatcgacttctacaacaacgccttgaccataattcaacttcaaaacttttgcccgctgctcgaaaagtttgactacacatcccgtaaatcgctggccctgtacctagttatgaacatcttggacaacgaaaccctagttccaacagctgatcaggcggatagtctgctgaccatcattacgccgttgattaaggacgatgatacgaacaaagaaaacggcgcggcagcaggaaatacgactccggatgccgaggagtttgccgaagagcagggggttgtggcacgatttattcacctcatgcgctcagatgaaccggacatgcagtataaaatgctgcagaccgcccgaaagcatctgggaaatgggggcgggcaaaggctaaagcatgtcctacctccgcttgtcttcgccgcctatcagctggccttcaagtacaaggcgatcgccgagcaggatgagaactgggacaagaatgccctggtcattggggagatcggttatacgaatcacgaaacggtggcatacgaattcatgacccaggccttctccctctacgaagacgagatctccgactcaaaggcccagcttgcagccataacgctcatcatgtccacttttgaacaaatgtcctgctttggcgaggagaacgctgagccgcttaggacgaattgtgcgctggctgcttcaaaattgctgaaaaaaccggatcaatgtcgcggtgttgtggcctgtgcggcgcttttctggagtggaaagcaaaacggcgaggagatgcgtgacgagaagcgaactttggactgcttaaagaagggtgctcgcatcgcttcgcagtgcttggataccggagtgcaagttcaattgtatgtggagctgctgaatcactatctgttttacttcgaacgcggcaactcgcttatcactgtggctatgctcaaccagctaattgccaaggtgaatgaggagctgcccaacctggagcccagcgaggagaccaaacagatcgagagccattacaagaacacgctggcacacatccgcagtcgcatggaatccaatgactcgtcgctggaggtctcctttgcgggcataactctcaattag

SEQ ID NO: 11064 - protein, 770 aa, DROSOPHILA
MPNGLDDQEKLLAEAIGLARKQAFQMNHFLDKERMLDSLKCASTMLGELRTSVLSPKSYYELYMAVTNELCHLELYLSEKIDKKTDLYELVQYSHTIVPRLYLLITVGIVYIKNDPTLKRSILKDLVEMCRGVQHPLRGLFLRNYLLQCTRNILPDVMVEENEHEGNVYDAIDFVLTNFAEMNKLWVRMQHQGHSSEKTRREKEREELKILVGTNLVRLSQLESATLEIYQRLILPGILEQVVSCRDAIAQEYLMECIIQVFPDEFHLKTLDPFLKSCAQLETGVNVKNIIISLIERLAAYNQRSGKTSGNAIDAIIPAEVELFEVFSVQVANIVQTRMDMPLEDTISLQVALLSLAQKVYPDRVDYVDKVLGTTAQILQRMNMNNISHLLSVNQELSRLLRICIDFYNNALTIIQLQNFCPLLEKFDYTSRKSLALYLVMNILDNETLVPTADQADSLLTIITPLIKDDDTNKENGAAAGNTTPDAEEFAEEQGVVARFIHLMRSDEPDMQYKMLQTARKHLGNGGGQRLKHVLPPLVFAAYQLAFKYKAIAEQDENWDKNALVIGEIGYTNHETVAYEFMTQAFSLYEDEISDSKAQLAAITLIMSTFEQMSCFGEENAEPLRTNCALAASKLLKKPDQCRGVVACAALFWSGKQNGEEMRDEKRTLDCLKKGARIASQCLDTGVQVQLYVELLNHYLFYFERGNSLITVAMLNQLIAKVNEELPNLEPSEETKQIESHYKNTLAHIRSRMESNDSSLEVSFAGITLN

SEQ ID NO: 11065 - DNA, 2859 bp, DROSOPHILA
gagcagtagatccatcaagatcctaaaaatatagcctctcgtattgttgcataatactaagaatctttattactagatatttaatgagctagggcctaagaagatccgggagctgagctatcaaacatggcgagcaagggccacgttggcgctgataagttcccattccaatccattggctatcccggatcacagcagcgattagtgtactttaagtgttagctgtaccaaaaatattcaataaataagtgaaccattgacaactgcttgaatgtgcttttttaaatgtcaccagatcctgaattgcatcccggttagacatccatgttgcgtgatcttttcggcggacccctgtccagtgtttgcttgatcgacttgagcagaccaggtatcaggtttatgtacttgtccacacagttgttcgtgcaactctcaaacatgtgctgggatcgggacatgtcccggtcactcggattgctgggcatctgagaccgcgcatcgctgttgcaatcctgcgggttggcaatcgtattaaaaataggatatatcaatccaatattaagcatttataattatagtttaagctcctaccctaacgcagttttgaagtctattctggaattggcccagctcgtgctgcaggaaatcctgggcatccatcaggggaccggcgcacttctcgatgcagttctgtacgctctccagcgtccctcgatcatcgtcgcagcagcgggcggcacagcggtgcatcgtggacttggaaacaacgttcttaccagaaattcatagtaggcaagtggaggccacacactcacctgcattctgcgcaagtgggtgcggtacatgtcctcgatcatttcgctaatggcgccctccaagcgctttttttgttgctccaccatttcaatttaaaatttgaacaatttcgaaagaacaaaacaaaatgttgaattgacagttttcggtgtacaaagtatgtttattttttttactgatggcaaaacttgacattcttccgaagattgttagcacaacagttgttggttgctgcttaagactttcaacaattaataaggtaatttttgttctatattcttaaaagcaaaatttgaaatgactccagagatgggactcattgcacggttttaaaataaacgaattcaacaactaattatgtagtaaatgcaggttgagttagacttggggaatgctctcgggtcccttggagagcacagccttcatggtcttcatcatgccgggaatgaggcccacatgcttgtccacacactggatggcacagcgctcgaattggtcggtgtacttggctatctgatcctcattgggactgggcggcattttcaccttcacatcgtcgttgcattgctgcggaagaggagaatgtgaaatatgagcgttgcctaataatattctattattcttagagccaccagggcaaaaagttggtgcaatggatactaaccatgacgcaacgttgaagtctgccctggaactcgcccaattcgtgttgaacgtagttctgtgccctcgtcatgggcgcggagcatcgatccacacatctctggacactgtccacgctggaggttccatcctggcagcacttggccgcacacaagtgcatctcattctggaatttcgtgaaaagcaagtcagtttcgggatatcccctaaagcgaactccacttacctgcattttgcgcaggtgcgtcttgtccatgtcgtcgatcatctccgttaccgcggcctcgattttctggcgctgttgctggatcattttgcttgtttaattgttaattacctacgtcttacaaccgatttcgtaatatcaaaataaatgccggcagcgtgttttttgtaatattcgattagtgatgagccgacgcagctgctaataatcgattagcagtctatcggtgccgctcttcttctttggttttccacttggttttggttttcttgtggatatttttgagcaatattaaattaaaaccatgtcgctcttgcaaaaactaagcagatctggtgtaccgatggcttcattaacctgtcgttcccgaatgccaatggtcattcgacttatcagcggtaacacagaaaaaccggcggaggaatctactcccgcagtgaatacggaaacggcggagattggcagcagcaagggaggattcgcccgtgccttcgacaagtacacggcaccagccacgcctccacagctgccggaagacaaccagaccttcgcctccctgctgcgcaactccaaattaattgatgtgggtacattatttaagtaatcccattgtttatgtaataacttgttgatttctggagcagctggacaacgccgagggcaaggtggtcagtggcaagatctttcatgtggtgggcgatgatctctacatagactttggttggaagtttcactgcgtctgcagtcgtccaacacgcaatgccaggtgagttcaatataatttcctgtctctttatccaataaaccgcctttcctacttcagcgactatgtgcgaggagcccgtgttcgactgcgcatcaaggacttggagttgtccaccaagtttctgggttcgtccaaggatattaccattctagaggcagattgccatttgctgggtctcctgtccacgcccacccgccagtcgacggccaaaacaacgccgaaaatcgaagatatcctataaatcctttattaaaaccaaggtttgttaaacgttacgtcaagtcttcatcctccttggttgtgaactggaacacttcgtagtgatggttgagttcccgcaccgaatgcagttggaatctcgtggctagagctccgttttcagagttct

SEQ ID NO: 11066 - DNA, 702 bp, DROSOPHILA
ccggcatttattttgatattacgaaatcggttgtaagacgtaggtaattaacaattaaacaagcaaaatgatccagcaacagcgccagaaaatcgaggccgcggtaacggagatgatcgacgacatggacaagacgcacctgcgcaaaatgcagaatgagatgcacttgtgtgcggccaagtgctgccaggatggaacctccagcgtggacagtgtccagagatgtgtggatcgatgctccgcgcccatgacgagggcacagaactacgttcaacacgaattgggcgagttccagggcagacttcaacgttgcgtcatgcaatgcaacgacgatgtgaaggtgaaaatgccgcccagtcccaatgaggatcagatagccaagtacaccgaccaattcgagcgctgtgccatccagtgtgtggacaagcatgtgggcctcattcccggcatgatgaagaccatgaaggctgtgctctccaagggacccgagagcattccccaagtctaactcaacctgcatttactacataattagttgttgaattcgtttattttaaaaccgtgcaatgagtcccatctctggagtcatttcaaattttgcttttaagaatatagaacaaaaattaccttattaattgttgaaagtcttaagcagcaaccaacaactgttgtgctaacaatcttcggaagaatgtcaagttt

SEQ ID NO: 11067 - protein, 146 aa, DROSOPHILA
MIQQQRQKIEAAVTEMIDDMDKTHLRKMQNEMHLCAAKCCQDGTSSVDSVQRCVDRCSAPMTRAQNYVQHELGEFQGRLQRCVMQCNDDVKVKMPPSPNEDQIAKYTDQFERCAIQCVDKHVGLIPGMMKTMKAVLSKGPESIPQV

SEQ ID NO: 11068 - DNA, 2621 bp, DROSOPHILA
aaatacggaccggaggtgaattccctatcggacttggtggccgcccttcaccgggaattcgagtcgaactatgttaacatcgagatggtgaatcaccttatgctcagctacaagtccaatccgcgggagtggcgcaaatatgccaagttcgatcgttacacctacacgcggaatctcgtggatgctggcaatggaaagttcaatctgctgattctgtgctggggcgaaggacacggctcctcggtgcacgaccatgccgattcccattgcttcatgaagatgctgaagggtgatctgcgcgagaagcgctacgagtatcccaatagatctgccagggacaacggccggtcccatcatcccgatggcgagatcgatagccgagagctggtggagattggggagacaccaatcgccgtcaatgatgtggcctacataaatggtgagaaaattagaaactttaaaagtggggtattcctatacttactgtttttttttttttcgttttgttatccatagacaatctgggtctgcatcgcgtggagaaccccagccattcggatacctctgtctcccttcacctatactgtccacccttcgacacgtgctccgtgttccaggacaacctgaagaagaccaccgccaaggtcaccttctggagcaaatacggcgtgaggacgaagcagaacgagcagtagatccatcaagatcctaaaaatatagcctctcgtattgttgcataatactaagaatctttattactagatatttaatgagctagggcctaagaagatccgggagctgagctatcaaacatggcgagcaagggccacgttggcgctgataagttcccattccaatccattggctatcccggatcacagcagcgattagtgtactttaagtgttagctgtaccaaaaatattcaataaataagtgaaccattgacaactgcttgaatgtgcttttttaaatgtcaccagatcctgaattgcatcccggttagacatccatgttgcgtgatcttttcggcggacccctgtccagtgtttgcttgatcgacttgagcagaccaggtatcaggtttatgtacttgtccacacagttgttcgtgcaactctcaaacatgtgctgggatcgggacatgtcccggtcactcggattgctgggcatctgagaccgcgcatcgctgttgcaatcctgcgggttggcaatcgtattaaaaataggatatatcaatccaatattaagcatttataattatagtttaagctcctaccctaacgcagttttgaagtctattctggaattggcccagctcgtgctgcaggaaatcctgggcatccatcaggggaccggcgcacttctcgatgcagttctgtacgctctccagcgtccctcgatcatcgtcgcagcagcgggcggcacagcggtgcatcgtggacttggaaacaacgttcttaccagaaattcatagtaggcaagtggaggccacacactcacctgcattctgcgcaagtgggtgcggtacatgtcctcgatcatttcgctaatggcgccctccaagcgctttttttgttgctccaccatttcaatttaaaatttgaacaatttcgaaagaacaaaacaaaatgttgaattgacagttttcggtgtacaaagtatgtttattttttttactgatggcaaaacttgacattcttccgaagattgttagcacaacagttgttggttgctgcttaagactttcaacaattaataaggtaatttttgttctatattcttaaaagcaaaatttgaaatgactccagagatgggactcattgcacggttttaaaataaacgaattcaacaactaattatgtagtaaatgcaggttgagttagacttggggaatgctctcgggtcccttggagagcacagccttcatggtcttcatcatgccgggaatgaggcccacatgcttgtccacacactggatggcacagcgctcgaattggtcggtgtacttggctatctgatcctcattgggactgggcggcattttcaccttcacatcgtcgttgcattgctgcggaagaggagaatgtgaaatatgagcgttgcctaataatattctattattcttagagccaccagggcaaaaagttggtgcaatggatactaaccatgacgcaacgttgaagtctgccctggaactcgcccaattcgtgttgaacgtagttctgtgccctcgtcatgggcgcggagcatcgatccacacatctctggacactgtccacgctggaggttccatcctggcagcacttggccgcacacaagtgcatctcattctggaatttcgtgaaaagcaagtcagtttcgggatatcccctaaagcgaactccacttacctgcattttgcgcaggtgcgtcttgtccatgtcgtcgatcatctccgttaccgcggcctcgattttctggcgctgttgctggatcattttgcttgtttaattgttaattacctacgtcttacaaccgatttcgtaatatcaaaataaatgccggcagcgtgttttttgtaatattcgattagtgatgagccgacgcagctgctaataatcgattagcagtctatcggtgc

SEQ ID NO: 11069 - DNA, 483 bp, DROSOPHILA
gttctttcgaaattgttcaaattttaaattgaaatggtggagcaacaaaaaaagcgcttggagggcgccattagcgaaatgatcgaggacatgtaccgcacccacttgcgcagaatgcagtccacgatgcaccgctgtgccgcccgctgctgcgacgatgatcgagggacgctggagagcgtacagaactgcatcgagaagtgcgccggtcccctgatggatgcccaggatttcctgcagcacgagctgggccaattccagaatagacttcaaaactgcgttagggattgcaacagcgatgcgcggtctcagatgcccagcaatccgagtgaccgggacatgtcccgatcccagcacatgtttgagagttgcacgaacaactgtgtggacaagtacataaacctgatacctggtctgctcaagtcgatcaagcaaacactggacaggggtccgccgaaaagatcacgcaacatggatgtctaa

SEQ ID NO: 11070 - protein, 149 aa, DROSOPHILA
MVEQQKKRLEGAISEMIEDMYRTHLRRMQSTMHRCAARCCDDDRGTLESVQNCIEKCAGPLMDAQDFLQHELGQFQNRLQNCVRDCNSDARSQMPSNPSDRDMSRSQHMFESCTNNCVDKYINLIPGLLKSIKQTLDRGPPKRSRNMDV

SEQ ID NO: 11071 - DNA, 4940 bp, DROSOPHILA
cgacttgtccaccataattggtccgggcacaggatccgcatcctttgacgcctttggagcacccaagtaccaaaacagacgcaccatgagcagctcggatcgctccctcatatcagcctttaaggagatatcctcgatggccgatcgcattaacttgcccaaaaccattgtcgatcgggccaacaacttgttcaaacaggtgaaattcgagttcgcggttgatttggttgagacctcatgccgttttcttgtaggttcatgatggaaagaacctcaagggtcgttccaacgatgccaaggcatccgcttgtctgtatatagcttgtcgccaagaaggagttcctcgcacattcaaggaaatatgtgctgtcagcaagatcagcaaaaaagagattggccgttgctttaagctaacattgaaggctctcgagacaagtgtggatctcataaccactgcggacttcatgtgccgcttctgcgccaacttgggtaagtgtttttacactttctgtacttgaaggtagcaggattaatacctataattcttatcagacctgccgaacatggtccaacgcgctgccacgcacattgcaaagaaagccgtcgagatggatattgtaccgggacgttcgccaatttctgtggccgcagccgcaatctatatggcctcacaagcatccgagcataagagaagccagaaggaaatcggtgatatagccggtgtggccgacgtcaccatcagacagtcctacaaacttatgtatccgcacgcagctaagcttttccccgaggactttaagtttaccactcccattgatcagttaccacagatgtaattcttttcgtagatccgatgctcaatactaacgctaacgttaagtgaaggaaaattcctaatttaatcacaaattacgattttattaaataaagttagcataactaatattcaaatagaactgttggaccaatcagaacataattaaatcattgttaaattaattatctgagttaaaccctttcagtttttgaactttattccaatgattcgtaatactttgcttgcttgatttatttttacattttttgtgtatctttggtataatataagctaataaccagaaacaaaaattgcacactacgtttatttgccagttatttgcgaaaataagtttaacaaaccacgtactctgtttatacataagctttaagtaattagtaataatataaatggataaaaaattcgcaaataagacgaccaatctgtaactttcaacattatcaattgcaaataaagcggggcgtttaaacgtagtaaatggctaaattcatttagagagccaagcagggcagcaaactaataattccaaagcataatacatgtgctaatagttaatagttaatgacgaattatatcagtcgccaacaatagttattgctgagtttaaacagtgtatatattagataactagtcaatagaaagcgagcacttttcgtcatcactgtggcccacgcactccagcgccggtcgatgctcggagtcccacattcccggaccgcaacgcttgcacaggccactcagggtgcacggaatcttcggcaactggcggtactggtggagcaggccgcgcgcctttcgcaagatcagttggccgtccatgtacatggccagcgaactgaagtgcagcagcatctcgtccgggcgtagattctgtgccaccacatcgtccgcatagacagcgatgatggccaggcagaggaacagatgaaagtagtctgtcaagtagtttgaccagcacgcctcccacatccgtatgaccaccgcttcggtgaattcgcgcttaaagcacaatagcagccaacgatggcaaaagagcagctccatggagtcgttgtgctgttccagatgcttgtagaagtgcggcagcattatccggatcagttcgcgcaggtagctcagattgtggtccacatcccggtcggtgggagtgcagacgaagaaggcccgctgcatcaggccaacgaagcaccagaaggtctcggactcgttttgaacttcgcacaggacaggcgcaaggagatcactcataccctgtgggttataaaccaaaatattaaggacaatttgaagaagcgagctaaccattaactggatctaggacccacctgggaataggacattccggtgttgtatacggcaaagttaagcaaaatgtttttcatgacctcggtattgggattatcgtcgccgcagaagaacggattggtgcgatccgtgcgaaccacatccttctccaccacaatctgcacggtcttccagaagtgaatttgctgttctggggacatcgagtacaggcgctttcgcgtaatttcctcgtactcctgccgcttgatgtccatgagcactgcgcgatcctcgaatgtcgaggagaatgagtagcactttagaaggaatggccacaccgtctttcgcagactcttttccaagccaccaaagaagacacatttccggagcagcaagtcgtcctcgatctgtcccttctcattgagcagcgtgccgtagaaaaagttcgttgttatcttcttgacatcgccctcgtccggatgcatttccgatttcttaacctccggccgacagaccatgaagtgcctgtacggcaaatcgaatttatcctggcccgtttccgatgtgatgttgtgcagaaagcagtgccactggtgcagcacctgggccaggtgatccaagccaccgtaatggaaatgtagaatcttgtactgcgactcccgcgacgcgatcaccagctgacccgaagtgcagttgtcgtcattgaagaaaaggcgcagagatcgcatttggcttaggtcaacggagaaatggcggcacttcatcgcggatttttggcgatcggctggcgtcgaattgccgctatccgggaactccaggttgtgcttgaaggccagcagttcaggtgttgtccactttgggttatcggttgccgggccatcgcctactccagaaccattcgtgcaatcggagcaattgttactatccggccggatggtgatgcagttgaaggactgcgatatattgctgttctcgatctgcggattggagatcgttatgttcaccgacgtgatggggttattcttcagcagagcggtcaagtcgtctatggatgcagcttggccacccagcagcggttgcagttcgttctttagctcctgcatatccgccgcgttctcatcctcctcccgaatgtccctctcctggatcgtctgcggtatggtcacgtggcagtagccgtttcgagagtccggcgacttgctcctcggattacactgaccccggcaatcgtcggcattcagattggtatacttgcatagcgacgagttcggtatccaggtgagcagaagcgtgggcctcttggcgctattatactgatctacaaaggtctttgtcgtgcaggtcaaatagcccggattgtgcagtatatccgactcatcgcgggcgattgtgggcggatggatgcagacgttattcttgcagaagaggatttcgttgtcttcgtaagcaatatcgatttttctgtccaatctctcgtcgcccagtatgaaactagaagcctttttgataatgcttcctatgggcatggtctcgaatttgatatccttgagcgggtaactactatatggtgaattataggtttccttcccggagttatcctaacggatttactagtgggcggatggggaacttttttctctggttagcttctggtttggcggatttttgtttgattatggcggtcgctggttaccataattttaggaattggttggctaaacctttgattcgacaattaattgtaacacagcggattggtgaaaaaaaaaactattaacttttgattctagggacctctcacaagcaggatgacattggaggaaaagaatttacgcgaaaactcagcgcaggcgcagttaacagtcgatggttttaagactggtttcgatatttaatactttaaaaatgttgaggatttattaattcaaactgcaatgaaaaggtatatttttaataacaatgataatatattaaatgcgagtaggtgtatattaatatcttcttattcagcttgcaaatcaatcaaatctaagtctatttctataagctttcttcacataatcatactatatatcaaatggaatacaaaacatattatatatacattaattaaatataatttaaataaattttagaaactacaggaacattggtattggaacagcatatgttccagctatcgatatcagacttaccttcactaacgtaaatagaatcaatagtcgcttaaaaatattgacattgcatttagttttgtcttgagttcttgataaaatggcgagcaaaagaaagcaccaagcatcccagaaagtgaaagaggaatccttcaagaaacacacgcttgactccgatgaagaggattctgacgactacgaaaggtaatgcttaaaatgtgcaaacaattgattgttttgatttcggcactttttgtttgcagggaatacctcaatgatagcgacattgagggcggcgaggagggcgtggcaaaagtggaagacgatgtgaaggtaacacccttcaatatgaaggaagaactggaggagggacacttcgacaaagatggtcactaccattggaacaaggagacggaagcaaaggacaattggttggacaacatagactgggttaaagtaaggattccatcactgctgcctgtacacaatcatttaatttaaaagcaatatttgcctaacagattggcacacagaagaacgccttcgacccggcaaaagatgaagaaaactcttccgatgaggagaagaacgaacccgtgggcaaggcctttaacttgtccatgaacctcatgaaaatggtcgag

SEQ ID NO: 11072 - DNA, 2782 bp, DROSOPHILA
ccaatgtcatcctgcttgtgagaggtccctagaatcaaaagttaatagttttttttttcaccaatccgctgtgttacaattaattgtcgaatcaaaggtttagccaaccaattcctaaaattatggtaaccagcgaccgccataatcaaacaaaaatccgccaaaccagaagctaaccagagaaaaaagttccccatccgcccactagtaaatccgttaggataactccgggaaggaaacctataattcaccatatagtagttacccgctcaaggatatcaaattcgagaccatgcccataggaagcattatcaaaaaggcttctagtttcatactgggcgacgagagattggacagaaaaatcgatattgcttacgaagacaacgaaatcctcttctgcaagaataacgtctgcatccatccgcccacaatcgcccgcgatgagtcggatatactgcacaatccgggctatttgacctgcacgacaaagacctttgtagatcagtataatagcgccaagaggcccacgcttctgctcacctggataccgaactcgtcgctatgcaagtataccaatctgaatgccgacgattgccggggtcagtgtaatccgaggagcaagtcgccggactctcgaaacggctactgccacgtgaccataccgcagacgatccaggagagggacattcgggaggaggatgagaacgcggcggatatgcaggagctaaagaacgaactgcaaccgctgctgggtggccaagctgcatccatagacgacttgaccgctctgctgaagaataaccccatcacgtcggtgaacataacgatctccaatccgcagatcgagaacagcaatatatcgcagtccttcaactgcatcaccatccggccggatagtaacaattgctccgattgcacgaatggttctggagtaggcgatggcccggcaaccgataacccaaagtggacaacacctgaactgctggccttcaagcacaacctggagttcccggatagcggcaattcgacgccagccgatcgccaaaaatccgcgatgaagtgccgccatttctccgttgacctaagccaaatgcgatctctgcgccttttcttcaatgacgacaactgcacttcgggtcagctggtgatcgcgtcgcgggagtcgcagtacaagattctacatttccattacggtggcttggatcacctggcccaggtgctgcaccagtggcactgctttctgcacaacatcacatcggaaacgggccaggataaattcgatttgccgtacaggcacttcatggtctgtcggccggaggttaagaaatcggaaatgcatccggacgagggcgatgtcaagaagataacaacgaactttttctacggcacgctgctcaatgagaagggacagatcgaggacgacttgctgctccggaaatgtgtcttctttggtggcttggaaaagagtctgcgaaagacggtgtggccattccttctaaagtgctactcattctcctcgacattcgaggatcgcgcagtgctcatggacatcaagcggcaggagtacgaggaaattacgcgaaagcgcctgtactcgatgtccccagaacagcaaattcacttctggaagaccgtgcagattgtggtggagaaggatgtggttcgcacggatcgcaccaatccgttcttctgcggcgacgataatcccaataccgaggtcatgaaaaacattttgcttaactttgccgtatacaacaccggaatgtcctattcccagcgggccttcttcgtctgcactcccaccgaccgggatgtggaccacaatctgagctacctgcgcgaactgatccggataatgctgccgcacttctacaagcatctggaacagcacaacgactccatggagctgctcttttgccatcgttggctgctattgtgctttaagcgcgaattcaccgaagcggtggtcatacggatgtgggaggcgtgctggtcaaactacttgacagactactttcatctgttcctctgcctggccatcatcgctgtctatgcggacgatgtggtggcacagaatctacgcccggacgagatgctgctgcacttcagttcgctggccatgtacatggacggccaactgatcttgcgaaaggcgcgcggcctgctccaccagtaccgccagttgccgaagattccgtgcaccctgagtggcctgtgcaagcgttgcggtccgggaatgtgggactccgagcatcgaccggcgctggagtgcgtgggccacagtgatgacgaaaagtgctcgctttctattgactagttatctaatatatacactgtttaaactcagcaataactattgttggcgactgatataattcgtcattaactattaactattagcacatgtattatgctttggaattattagtttgctgccctgcttggctctctaaatgaatttagccatttactacgtttaaacgccccgctttatttgcaattgataatgttgaaagttacagattggtcgtcttatttgcgaattttttatccatttatattattactaattacttaaagcttatgtataaacagagtacgtggtttgttaaacttattttcgcaaataactggcaaataaacgtagtgtgcaatttttgtttctggttattagcttatattataccaaagatacacaaaaaatgtaaaaataaatcaagcaagcaaagtattacgaatcattggaataaagttcaaaaactgaaagggtttaactcagata

SEQ ID NO: 11073 - protein, 674 aa, DROSOPHILA
MPIGSIIKKASSFILGDERLDRKIDIAYEDNEILFCKNNVCIHPPTIARDESDILHNPGYLTCTTKTFVDQYNSAKRPTLLLTWIPNSSLCKYTNLNADDCRGQCNPRSKSPDSRNGYCHVTIPQTIQERDIREEDENAADMQELKNELQPLLGGQAASIDDLTALLKNNPITSVNITISNPQIENSNISQSFNCITIRPDSNNCSDCTNGSGVGDGPATDNPKWTTPELLAFKHNLEFPDSGNSTPADRQKSAMKCRHFSVDLSQMRSLRLFFNDDNCTSGQLVIASRESQYKILHFHYGGLDHLAQVLHQWHCFLHNITSETGQDKFDLPYRHFMVCRPEVKKSEMHPDEGDVKKITTNFFYGTLLNEKGQIEDDLLLRKCVFFGGLEKSLRKTVWPFLLKCYSFSSTFEDRAVLMDIKRQEYEEITRKRLYSMSPEQQIHFWKTVQIVVEKDVVRTDRTNPFFCGDDNPNTEVMKNILLNFAVYNTGMSYSQRAFFVCTPTDRDVDHNLSYLRELIRIMLPHFYKHLEQHNDSMELLFCHRWLLLCFKREFTEAVVIRMWEACWSNYLTDYFHLFLCLAIIAVYADDVVAQNLRPDEMLLHFSSLAMYMDGQLILRKARGLLHQYRQLPKIPCTLSGLCKRCGPGMWDSEHRPALECVGHSDDEKCSLSID

SEQ ID NO: 11074 - DNA, 9147 bp, DROSOPHILA
tcattaaattgtataccttctcatttgaaataccgtggtttattagcagagcataccccttttcagataaagcctctctcagatttgtcgccacgtcctcgatggtattttctaaatctattataggaacagcattttgcaagagcagagtctcagtttctgatttcattgtttaaaaaagtatcttatcaagtgaacttattccaacctcaagcaaaataggactgaagtcaaaacaaagaatactattcttcaaagagattgtgtgagagattgtagcaatggttaatttttcatactatacttttgggttatcattgtaaagtaaactcccgtagaaaccgtgtcataaatcaagaactatttttaaccaaccaaataccagcatacaatcaatatggattatcaatccatagctatatagcagttatcatacgcaaataaatacaatcaccacttacatacatacgaatcgtttgtttattgtttgcaaataaaatatacaaaattacatttcatcatcgagttgggcatgacaataatgcggacagttcggcgcggtgttgtcgacaggcaaaagttcagagttcaccgattttggctcgccattcgcctgccctaacttgtcttcgactttcacagtccataggataaagtctaatcactaaactataatatttggtactattacactatcccaatacagtaggtgcaacaatctcttgccctctgcaatggcgactgatccaaacaagtacaaatggggccgctttcctcgaactaacaaaatactacgaaacaagcttacgcgactacagattgtataatatccatcttgacctatgtatacctagggggaggatatgggatgtggcttgggatgggagcatgggaatgtgggctgggatttgtggatggaggagggaaggatatcagggataaggaaggaccataaaaataagtgtgcatagcttaaggtagcgccaactaacgtcgcttcctactcctttttcgccgccagcttggcctgggcagccgcctccttcttgtagttggccacatagaaggcgctgaacatataggtgaagagtccagcattgaaggtcaggagtgcggcaatggacttggggaagttgcagttgggctggaactggatttgcagtgtgtgcacgaagatgatcaggaattggacctacagagaagaggggaacatcaaaccaaatccaagcttttcccatattaaagaccacttacaatctgcaggatggtgatgtacttcttccaccacagatacttttgcaccttgggtcccatcgcggagagcaggtagtaggcgtacataatgatgtggatgaaggagttaatgaatcccagaagggttccatggccaccggcaaagtacttgaccccaatgaaggcacacacgggcatcagagtgtggtggtacaagtggaggaaggagatctggcgctgtttcttgcgcagcacaaagaacacggtgtccaacagctccgtgatcttggcaatgtagtacagccacacggcacgagccatctagcattggtattgaaattatatctaagatttgattttaagatacatagatatttagagaccataccctcatggaaatcggatccgattcgtaagtcaccggctggcacttgaagttgtagtggccaccccagccgcccttgtatccctcgtagaagagcacccagctgaggagcacttggaccgcattgtagaccaggagagtgttcttcagctcgaagggcttgcgatcgcgcatgtaacgaggtcctgcgtacaggcagaagtacaggtaggctccaaggatcatgaacagcggtccgggggcattcgaaaggaaccattgctaaaagaaacccatttaattagttaaaaacaaaacagctttgtgcgttttgtgggcgttatagtgggcgtgggacagcccaataccaaccttggtgcgcagatcctcgtgctccacgaagaagttgaccatccggtcaacaatggtcgtcgtctcgttcagtctgaccgacatattggctggcagctggaagagtggggtaatcaatagattagttagattatgcactgccccctggattagcaccttctacgcgaccgtggatctggcggagtagaaggtggaagcaaaacgcattcgatctgtgtttgatttacgcggcgtgagcatttcctgttaatcagccaggcacacaaacttaaagtaatgctgcccaaggcgaaaccgcgcctacgcttcgccagatatatttatatatatatatatatatatatatatatacatatatagatatatgctcgttgagagtgcgaaatgtcatattagtagaatcgtgtaaatcaggcatagcgttgcaaatttccgaatgccaataacccggcgaattctgttaaagttgcggaaaaagccgccaggcaaacagtttaaaatgtaatttatcgcgggcttattcgagctcttagacccaaaacgatcgcatcagcacttaaacgctgcgcatttaattctttttaccacaattatgaattacatatattgttaagtgactgaggtagtcaacgacagggatcgggccaaaaacaagggacacattgtagcttacgtgaacagaactggtttcgacgtgattgctatggctgcgttaacttggccaaattagccggtagattgccccgcgcctcctgatgactagtttttgttgaggctttttggaaaaacccaggaagcaggatagtccaaggacaaactgtcaggttcatgcatcattaatggctttatggctttaagatgggggaaccggttgcttctgattattggtttgctaggcacaaatcaattttcagtcttaaaacttaaaacataagtgatatctgcgccaatcttttacatatatttacgttataagaagctcacattacttcgcccttttctgcgtcctcgttcctggctattttcgttcaaaacttacgagtagtaaacaaagctggaggcaaggacaacagaaggaattttatgggcattgttccgaaaccgccgaaaccagtttgggacgcagattctgcaacagatgatgatcgtgattatcggttggtcggtccatcccaaattctttagcaatgctgactaggcggtttcaatgtctgctgatttcggtcgttaactaaccataatgatggccaacaacatcaatggcttgtcttgacgcactgcgacttgggaaaatagctggcccagtttggttttgtcgaagccacttgcccactggaatcatcatttagcctgggcgatattaattatttgagcacctgccatgtgggactcaggttcgcactacaagtgaacgccatcatcgaattacccagcgttttctgtgcagtcatcgcgtttggcggattggcggagttgagcgccaaaaatgcattcattcggctggatattgagatattgactaacgagaatttcgtctgacttatttgcattatttcgagtgcctttgccgagtgtttttgcaaggccggcactttcaatcgaccaactccagccagccaatggtgttttcgagggtgtgaagatatttcgcaagaaatccgccaagccaacttacattctacaaattctacaattcccaaccgctaaggatagagctaggaataagaattgttttattaaatacaggaacttagctttcaacgacatagtattattctatcttgcagatctctatgctaattccaaacttgttttatttgacagccagcgtaaataatattataaacattattccgtgttggtttttatggctgctccactaacctgttgatgcaaagtatactcgaatttcaccggcaaaactcaaataaaataataaatgaaaataataaatattatataatgaaatcaaaatattctaccggtttgccagcactgaaatttaattctgatttattcggtggtcgagtgttgaacttggacttggtttttgctttggttttgggactttcgactgcgaagctcttttatggccacttagcagtcataaatagttagataatatgtgtataattccagttttgtttcaggaggccacggcttccatgagtgtttctcccgcccatcagaaccttccggtctcagagatcagtgaataggcatatttgtttgcctattgattttcagaatggtccgatgttcaaatgcaaatcagtgcaaaaattcaaaaaaaaaaaaaataaggcgatcaaacgatgaaccaatggttagatagaccctgagatctgctctcgttttgcataatcataaaccaaaacattgcgcaaatcctagccacttttccaacaatgttgacggccgtttgcatgccaattagcaattgacagtgaacgagagtgcgtggcagcggcagagtaaatattaaatgaagccaaataatgacaaagtaaataaatattatatatagaagtatcacccgctgccctgacgtcacattccagtttattattatgcgataatcagcgcggttagaagtcgcccgataaattctagacacgcgccgtgcaaaagattcgcacgttttgttctgtcgccaagctgggcaccatttttggtaagccaagcacatggggcgtatgcgcaatgcgcggctcattatgctagggattcaaaagtcgggttttattctatttacagactttgtggacaaactctaggctgataagaggccgcatgggaaggtctgagcggcgaacaaaatggtttggaatgttgaggacggcactcaaaggtggaacactcaaaaaaaaaatgtacaataagggtatactattatcaaagtctggattcaatatctcaaagcaataaaatattaatacgtatatagttttctttctctgctggttttgagcttttaatggatgattttgttgatggctaccataaattataaacaaaatgcaggtttcattttttgtcaagtgtattccaacaaaagagaagacaaaatattgaattcgaagacggagcggcagcctctgatcaagcgattgaatggacctaaggcaatggcatcggcatcggcaacgcatgaaggtctctgcgaaggtcgcacgttttgaggaaacaaaaagcgaagtcgagacccgatctcttgcattggagagcagcttgattttcgtccacattatccgctcccagttgcggatgcggatctttcgggcgtggctagccaaacacatacatatgcgtgtacatacatatatgtatgcgtgtacaaagtgggcaccgtaggtaccataaacattggaggcgtattatctgtggctcagtctcttttcgttcgctgatttgaatttttattggcttaactattttacattagccttagtttgtgctctgaccttgaactagtggctagtgggagctgctgcaggcgcataaattagtcgatttaagctaaaaccacattactgacttccgcgtggcgggctgaattgaaatgaaatgaaatgtaaggttccagaaggaatgccagttaaacagactcccggcattcctgtctccaattaactggactcgacaaagtttccattactgcaaatgtctgtaagtgctaattgagtcaactcattggcaatatgtctagatcgatcgaggtatgatgtgtgggatatacgacggcgaatcgattagatcggctgttctacaccctctgccattgacaaaggcggcacgaatgtaaattattccatatgctttcttctgttattcgattatttaaatattggcaatttgtctttataaatatgcaattacctgtaaatatttcccaatgcaattgcacacgaaaaacaagtcaaagttcgttgccagagtctttcgtttggccagcagcagaataaattataatgtagaaaaacagtcactaattgcgcatgccacaaatcaaatcgctcaatagacagtcgcatcgatcaccgtcccccgtttgacgggcccttcttttaattatgatcaattagattggagagtctgggaaaagtacagcgtaaattaatagcttttcataagcagtcatcaagtgtttctttactcaatgatcattacactgcctactgtttttccaccgatattaatgtcattgcacttgcgttcgcaagaatcatttagtccagctcaagggtgcccagattgacctagtcattctcacaagcaaaagcatatgcattcttctgacctccaatatttgccattgtcatcacctacatcatcattgtcatcatcgccatcaccatcgccttgttctgactggcgatttgtttaccttgccattataatcagctcttttggccaaaactaccccgtgccgccttgttgagcatacaaggcacttggaaacgcactcggccgagggaaagatgaagaaatcccaaaacgagatggaaatttggtcgattttttttattgtaggtgtgaccgccagcgcatgtgaccccaattggattcaaaatattaaaatgtaatttggcagggcgacaaatgtcaccgaaatgtcgcataagcatatacaagcacaaggtggagtcacccagaaagacgccaacgtgcgaacggatgtgcagcagaaaccttttgtggaccccgatcccaagataccgtggtaatttcgctccccgcctgactaactatctccggtccgggtgttgacgccaagaaaacaacaataaaatcataaataaacaaattgtgcgcatgcgtgaacgtcatcatcgccgcctctttccaagggcaattccagccgaattatatattggtgaaaaattgctggccactgtatgatcgcacgaagcgtgatattcaaattaaatcattccatgaatgaaatgtgcgtatattcgtatttcgaaataaaagatcaacagtctgacgagcccaataaacttgtcatgttcttatcatgtcgcaacttcgcccaaagtataaacgtaatggccaagttggttttttttctttttttttttggggatttccgtcgatgtgtatcgccacatttagcacttcttctgattgttatttatatggcaagcttgtccagttgttcccattgtgtcgaaagtgtaacgcgaaattcagggctaaatcggagagttgagagatgatataatgccgactgaaatcggatgcccgatgcacacgaaaaatttaactgaaaatacctcagaaatcacacagattaagtattagctacatttgcacaataatatacagaatttaactaaaacttcgggcccaggatattaagcagtgattaatgtgcccaaaattggaaaggaactaataggacctataatttttttatatttatattcgatttatcttatctagttagcttttttcgctgtgcacgaaacagttgtaatgcaactggtagtggcatcttgtatcaggtccagatgcgttcgagttcatctgcgagggattacagtaacgtttaaaattgatcaatcgctatgcgatttacatatgagccacattggctacatatgtgattgacttggcccactcgtatcgacttgttggccatcttcatctgcgggcaccacagctggttttgtaagcctcctcttttttttgtcttgtctctcctctcttccatgttatttatttatacaatatttagtttgtatttttctttcgaattcgtccatgcccgggtctttgggcttgggtgtcgtttcgcaatgaccccaaaaaaaaaaaaatgtctcaaatctttaacaggttgccatcgtgtgcgcataacttagcataaaatctgaacacacaattttccattgtatttcttctatagttcttaaacacttgcctttctgttgaataaatttgtggggggagccaacaaatattgaatggatgtctgtgatttatttgcggcacgacacagaacacggcacaaacgagcacacaaacaaacggaagcagcgaaggacaaacactaaaagcactttctgttatccttcgaggcaatatcacgcatacgcgtcgttgtcgatcagatcagaacacacagaacacacgaggaggctgatctcgagatctccagctccacgagtacccagcgaatacttggcagttgaggcgccgacagcagactaagcgatatcccagccctacaagcggtcttgtagcgatcgtatcacggatacgacgaatacgaccgcctcgctttcggccaagattcgcagtcgcagtcacagtcgttgacgtactcggccaagatcgtatggctattgccgatgatcgcgacagcaacaggtgagcgggcagcagcacttcgtttcggccagaatccagctccagctgactggcggtcattgcatgtgcttaagggccagttctaggatctcctcagttaattacccatcgggtaatgtatttaatgtatgcagaccgcaatgcgaagtcgataattaacttaatgcgatttgcaactacttatgagaaaataagcgcatatattgcagctggcagtggagcaaatcataactgaaaccaaatagtaaacctgactgcatttatcatcgactggcccatatgcctttgcctttgccattgcaggtagtgtgtgtctttgtaaagtgtgcaaaaatgattgtgcaattaaacggccccaaaatgcctccggcccagagcttccagtggccacttgatggatttcagccgcgtcattccctcattcactcggaaagtcacagttttcaggcacttttgcaccgaaacactgcattacgccgaacggactaacccacagcgtggggctaaacagaagtttgctgggttccatagacgcactgactacgggcacaaatgcatgtctgacatttgcccaccagtgctaattgctcaatcagaaggaaaatacaacaaagttgggaataattcagccaactgcggttcattcgtaaattgatcgatgcgacgacacaccccacgcatttgtggatccaatgtgcactccactccatcgcgattcaccgtgattccatcgattcattcacagatcgctgtctttggattccaatccggccgatgcccaattcgattccgatgaagct

SEQ ID NO: 11075 - DNA, 1083 bp, DROSOPHILA
gtactcgtggagctggagatctcgagatcagcctcctcgtgtgttctgtgtgttctgatctgatcgacaacgacgcgtatgcgtgatattgcctcgaaggataacagaaagtgcttttagtgtttgtccttcgctgcttccgtttgtttgtgtgctcgtttgtgccgtgttctgtgtcgtgccgcaaataaatcacagacatccattcaatatttgttggctccccccacaaatttattcaacagaaagatgtcggtcagactgaacgagacgacgaccattgttgaccggatggtcaacttcttcgtggagcacgaggatctgcgcaccaagcaatggttcctttcgaatgcccccggaccgctgttcatgatccttggagcctacctgtacttctgcctgtacgcaggacctcgttacatgcgcgatcgcaagcccttcgagctgaagaacactctcctggtctacaatgcggtccaagtgctcctcagctgggtgctcttctacgagggatacaagggcggctggggtggccactacaacttcaagtgccagccggtgacttacgaatcggatccgatttccatgaggatggctcgtgccgtgtggctgtactacattgccaagatcacggagctgttggacaccgtgttctttgtgctgcgcaagaaacagcgccagatctccttcctccacttgtaccaccacactctgatgcccgtgtgtgccttcattggggtcaagtactttgccggtggccatggaacccttctgggattcattaactccttcatccacatcattatgtacgcctactacctgctctccgcgatgggacccaaggtgcaaaagtatctgtggtggaagaagtacatcaccatcctgcagattgtccaattcctgatcatcttcgtgcacacactgcaaatccagttccagcccaactgcaacttccccaagtccattgccgcactcctgaccttcaatgctggactcttcacctatatgttcagcgccttctatgtggccaactacaagaaggaggcggctgcccaggccaagctggcggcgaaaaaggagtag

SEQ ID NO: 11076 - protein, 277 aa, DROSOPHILA
MSVRLNETTTIVDRMVNFFVEHEDLRTKQWFLSNAPGPLFMILGAYLYFCLYAGPRYMRDRKPFELKNTLLVYNAVQVLLSWVLFYEGYKGGWGGHYNFKCQPVTYESDPISMRMARAVWLYYIAKITELLDTVFFVLRKKQRQISFLHLYHHTLMPVCAFIGVKYFAGGHGTLLGFINSFIHIIMYAYYLLSAMGPKVQKYLWWKKYITILQIVQFLIIFVHTLQIQFQPNCNFPKSIAALLTFNAGLFTYMFSAFYVANYKKEAAAQAKLAAKKE

SEQ ID NO: 11077 - DNA, 4682 bp, DROSOPHILA
ccgccatgtcagccccacactcgccagggattgcaaagggacacggaagacaagcgatcggatgcacttactcatctgtgtggactgatcccagagtgccaggaactggagtacatactcatggaaaacgtcaagggtttcgagagctcacaggcgcgaaatcagtttattgaatcgctggagcggtcgggattccattggcgggagtttattctaacgccaacgcaattcaatgtgccaaatactcgatatcgctactattgcatcgcccgcaagggtgcagactttccatttgccggtggaaagatctgggaagaaatgccgggtgctatagcccagaatcagggtctttcacaaattgccgagattgtggaggaaaatgtatcacccgatttcctggtgcccgacgatgtcttgaccaaaagagtgctggtcatggacataatacatcctgctcaaagtagatccatgtgctttacaaagggctacacccattacaccgagggcacgggctctgcatacacaccgctttcggaggacgaatcccaccgcatcttcgagttggtcaaggaaattgacacaagtaatcaggatgcatcgaagtcggagaagattttgcagcaacgcttggacctgttgcaccaggtgagactgcgctatttcacgccacgggaagttgctcgtctaatgagttttccggagaattttgaatttccgccagaaacaacgaatcgacaaaagtatcgactgctgggaaatagtattaatgtaaaggttgtcggtgaacttattaaattgctgacgataaaataaaacaaaatacaacatatttgcttgcttattttcactttaatacatttattagctaggaaattactctgcgctgttatcattaaaatatttatttcaaatccacataattttcccgcccagtgttgcctatgccacaaaacgcaacggttgtgtgctgtgtgatattccatactacttgtcaattggtcacactgcactgaattaaaaaaaaaaagaatataagtttacgcagaaaaacaataataattgcaattatcgctaattgaaagagtgccaaaatgataccaaaaaagacgacggttaaggattcacacattgtgaaaatagccgtggagcgagaggaccatatagcgcagttgataaatctggatcaaaggcatccgctggcaagtgagtaaatagcggataaaaacaaagatttttcgcttgctgagcagcagttttaaagagaatctgctttaaacatgtaaaacaaagttccaagaagttaataaaccagaattatgttgaaagtagcaaaggaacccatcataagggaggaacttccaaccaacgcccttcgctatgtttaagtgttatcgtgatgtcagcgcactcatttcctctttctcatttatatgcaaatcatacaattggtcaggaagttgctatttacagcgtattaatgccgccttcgcttgcaggtaaaatccaggaaatttgcaatggttggtccatcagcgatcaccagaactatgcactccagttctacgagcccactaaccgaaagtacgtgaccgaaaagaatcgcaatgagatcaagaatggctccgtactgcagctgcagtattcgccatccaagactgcctgcgatgccatggaggtgctgctcaatggcagtccacaggagaaggcgctgcgtctaaaggagctcacttccctaagcaccgatcacacatttgccctggagttcatcaaggagaagggtctcgacacactcattaagatgattgaggatggcggccagaccaacgaagacattctgaaatacagcctggccagctttgtggagctgatggagcacggcacggtgtcctgggaggtgccggaaaactcattcgtggcccgcaacattgagatcgtgcgaaactttcagaaatatcctacgaactgtggtgagagcgccctgtccaacttggagaacattgttatgtgcagcaataaacatgtgcttgttgccgaggacatcaagctgcaggatattctccgattgcttcaggatgtcaattcgccggtgatgcgacaaaatgccatagccctgctgaacgctctgttcgtcaaagcagacgagggccgccgcaggaccattgctcaaactattagtgccaagcagttccgcctggcccttatcggcaatggactgggcacagagatgacccaccagctgtacgtgctgcaaacgttgactctcggcctgttggagaagcgcatgcgtatgaagatgaacgcgcaggaccaggacgcgcacgagaagatcaaggagctgcggcgcattgccttcgacgataataccaacgctttgaatcaaaacgacgatcacatccgtcgtggcggtggctccggagctggcaatgtcaacttctcgcagtactacaaaaagctgggcttcaagtgcgatattaaccctgcccaggatttcattgagacgccgccgggtaagaatatgttcttatattaaagctattttggttgataatccgaaacgtatttctcaggtatattagcgttggattgcatggtgtattttgcacgcaactacacgcaacagtatgcgaagatcgtcagggagaactcctgccgtgcggatgagcacgagtgtcccttcggacgcacctccatcgaattggtcaaggtgctatgtgacatccttcgcatcggcgagccaccagccgagcaatccggtgactttcagcccatgttctttacgcacgattcgccgttcgaggaattcttttgcatatgcgtcattacgctgaatcgcacatggaaggatatgcgtgccactgccgaggacttcagcacaaccttcagcgtggtgcgggagcagatccagcgcactctaaagggcagacccgagaacctggacgatttccgaaacaagatcgctttgttgacctatcagcagatcacaacactgcgccagcaggagcgcacttcgaaggaggagtgtgattccacagcttcggcgattgttaagctcaaagagaagatatcaccgcaaattcttgagctaatcaagcagcaacggctctcttttctggtggaaggtacaatttctaataaatacatttcaagggcaatcttaacatggataaatcttgcacttataggtacacattttgcaaaatacttgcgaggcactcgaacaaaggacaagttctggtacgctcgtctttcgccgaatcacaaggtgattcattacggagattgcgacgagaagacaatacccaccatggaggagttgcccaagaaactgcccatcagtgagattaagcaattgctagagggcaaggaatgcccgcatatgaaggaaactcgcattcggaaatcggcggtaaacctggccttttccatcaccttcgaaaacatggagcactctacgttggactttgtggcacccgacgaaagcatattcaactactggacggatggaataaacgcgctgctgggtcaaccgatggtcagcaagcaaaagaacgaggacttcgacactctgctgtcgatggagatcaaattgcgcctgctggacacggaaggtgtggacatcagcaaggacccaccgccaataccggaggatcccgaaaactatgatttttgctttgagagctaagcataacgagcacaattacttcacgaattattcgattcattctagactcccccatcacccaagatacatgccaaagtgtacacacaacataatcgtattctccgatctgatcttctactagtattacttgtgcaattccccgaacacaaaatgaacaaactggtgacggtcacgtccaagtgactaaccgctgcctagccatttagtgaactttacaccatttatgattataataggtatataatatatagagatcattaaataacacattttatacataacaattttgtacaaaaactaacaagagaagcgtattcttatccaagcctaaaaggtaattagttagttaaaaaaagcaaaaagcacggctggccgatgctttgaacaccattgcggaaggaattgatttggagccgttaacaataatggaatcttagcaatgtaatttattgatgctctgaattgcacttggaatttgctatcgatttgtccttccgcaaggatatgttgattgcaattgtaaatgataaaacacgcacttgacgacctttggttcgaactttaaagcattcgagtaagcagtaagcctgcggagcaaaaccaaactggcagcctacccgagtgggtctctggctgcctcctcgcaacattatccacgcacgggcagcttgcgccggcgagcaggggctcgatcctagatccttaatcaaatgttatcctccagcaggagatcgttgtcatcgccccggtccggcaggcagacaaagaattcgagtaaattcaggatgggaccacgcgagaagggattctgatatcgtccgcgtttgtcccgcaagtaaggataacgcttgtagttaaacatctcgtttgtggtgagattcatgcaggcgtgcaggatctgccagtgcaaatgatgtcaaaacgattaatatttttggaaaagaagcacttaccgaagtgcatgtgagtatccaacccaagccgcagaacacaaccgcct

SEQ ID NO: 11078 - DNA, 2266 bp, DROSOPHILA
cacactgcactgaattaaaaaaaaaaagaatataagtttacgcagaaaaacaataataattgcaattatcgctaattgaaagagtgccaaaatgataccaaaaaagacgacggttaaggattcacacattgtgaaaatagccgtggagcgagaggaccatatagcgcagttgataaatctggatcaaaggcatccgctggcaagtaaaatccaggaaatttgcaatggttggtccatcagcgatcaccagaactatgcactccagttctacgagcccactaaccgaaagtacgtgaccgaaaagaatcgcaatgagatcaagaatggctccgtactgcagctgcagtattcgccatccaagactgcctgcgatgccatggaggtgctgctcaatggcagtccacaggagaaggcgctgcgtctaaaggagctcacttccctaagcaccgatcacacatttgccctggagttcatcaaggagaagggtctcgacacactcattaagatgattgaggatggcggccagaccaacgaagacattctgaaatacagcctggccagctttgtggagctgatggagcacggcacggtgtcctgggaggtgccggaaaactcattcgtggcccgcaacattgagatcgtgcgaaactttcagaaatatcctacgaactgtggtgagagcgccctgtccaacttggagaacattgttatgtgcagcaataaacatgtgcttgttgccgaggacatcaagctgcaggatattctccgattgcttcaggatgtcaattcgccggtgatgcgacaaaatgccatagccctgctgaacgctctgttcgtcaaagcagacgagggccgccgcaggaccattgctcaaactattagtgccaagcagttccgcctggcccttatcggcaatggactgggcacagagatgacccaccagctgtacgtgctgcaaacgttgactctcggcctgttggagaagcgcatgcgtatgaagatgaacgcgcaggaccaggacgcgcacgagaagatcaaggagctgcggcgcattgccttcgacgataataccaacgctttgaatcaaaacgacgatcacatccgtcgtggcggtggctccggagctggcaatgtcaacttctcgcagtactacaaaaagctgggcttcaagtgcgatattaaccctgcccaggatttcattgagacgccgccgggtatattagcgttggattgcatggtgtattttgcacgcaactacacgcaacagtatgcgaagatcgtcagggagaactcctgccgtgcggatgagcacgagtgtcccttcggacgcacctccatcgaattggtcaaggtgctatgtgacatccttcgcatcggcgagccaccagccgagcaatccggtgactttcagcccatgttctttacgcacgattcgccgttcgaggaattcttttgcatatgcgtcattacgctgaatcgcacatggaaggatatgcgtgccactgccgaggacttcagcacaaccttcagcgtggtgcgggagcagatccagcgcactctaaagggcagacccgagaacctggacgatttccgaaacaagatcgctttgttgacctatcagcagatcacaacactgcgccagcaggagcgcacttcgaaggaggagtgtgattccacagcttcggcgattgttaagctcaaagagaagatatcaccgcaaattcttgagctaatcaagcagcaacggctctcttttctggtggaaggtacacattttgcaaaatacttgcgaggcactcgaacaaaggacaagttctggtacgctcgtctttcgccgaatcacaaggtgattcattacggagattgcgacgagaagacaatacccaccatggaggagttgcccaagaaactgcccatcagtgagattaagcaattgctagagggcaaggaatgcccgcatatgaaggaaactcgcattcggaaatcggcggtaaacctggccttttccatcaccttcgaaaacatggagcactctacgttggactttgtggcacccgacgaaagcatattcaactactggacggatggaataaacgcgctgctgggtcaaccgatggtcagcaagcaaaagaacgaggacttcgacactctgctgtcgatggagatcaaattgcgcctgctggacacggaaggtgtggacatcagcaaggacccaccgccaataccggaggatcccgaaaactatgatttttgctttgagagctaa

SEQ ID NO: 11079 - protein, 724 aa, DROSOPHILA
MIPKKTTVKDSHIVKIAVEREDHIAQLINLDQRHPLASKIQEICNGWSISDHQNYALQFYEPTNRKYVTEKNRNEIKNGSVLQLQYSPSKTACDAMEVLLNGSPQEKALRLKELTSLSTDHTFALEFIKEKGLDTLIKMIEDGGQTNEDILKYSLASFVELMEHGTVSWEVPENSFVARNIEIVRNFQKYPTNCGESALSNLENIVMCSNKHVLVAEDIKLQDILRLLQDVNSPVMRQNAIALLNALFVKADEGRRRTIAQTISAKQFRLALIGNGLGTEMTHQLYVLQTLTLGLLEKRMRMKMNAQDQDAHEKIKELRRIAFDDNTNALNQNDDHIRRGGGSGAGNVNFSQYYKKLGFKCDINPAQDFIETPPGILALDCMVYFARNYTQQYAKIVRENSCRADEHECPFGRTSIELVKVLCDILRIGEPPAEQSGDFQPMFFTHDSPFEEFFCICVITLNRTWKDMRATAEDFSTTFSVVREQIQRTLKGRPENLDDFRNKIALLTYQQITTLRQQERTSKEECDSTASAIVKLKEKISPQILELIKQQRLSFLVEGTHFAKYLRGTRTKDKFWYARLSPNHKVIHYGDCDEKTIPTMEELPKKLPISEIKQLLEGKECPHMKETRIRKSAVNLAFSITFENMEHSTLDFVAPDESIFNYWTDGINALLGQPMVSKQKNEDFDTLLSMEIKLRLLDTEGVDISKDPPPIPEDPENYDFCFES

SEQ ID NO: 11080 - DNA, 4142 bp, DROSOPHILA
agtttgccatagttctgcatggatggatccaaagttgttcggacgagtgggcgctgtcgcttattgaaagtgagcattttttgcatttttttcaatgccaaagttgaaagctactcgaaatatgcattttaggactcagttactaccgcggcggatgcgtgatatgcatagactacagtgtggtcgccagttcctcgtacatgcggtgggtagtagtagtagtctgaccccaaattctcattatccgacttttaaaggctgtacacaaactttgacaccctcaccggcgccatatcgtccattatcctaacactgttcaggcagggattcgatccaaaacgaggctatatgtttggcttcagcttcggcggacaactggcttcggcggtgggaagatccctacggccacaccacattatcgagagcatagacagtcggtatcttgagcgttatcttagccacacccagtaattattgtattgaactgcagcgtgcgatatggccggacccgggttcgatcccattgcagtcgaccactccaaggccggcaagcatgtgcagtgcttccactcgagccgcgacaagggcaccttcgtctactcctgccaccgcaacataatgctcggcagctgcggcctcaagcagccctcggtggccagtcagcttcacctgggcagccatggtctctgcgtcgacatatacatcaacacgttcgactatcccttctacgccgtgaactacacaccgccggagtgcttcacctggcaaaagacggccaagataccagatggctacacggtgggctacgaggagaacttcgacagccaggtcacggggcagatcttcgtgcccactagcctgcactacccctacaacttgtccaagaaacagctaaagctgctgaccaaaggcggtgcttgactgagtattgggagaaaacacttggttcaagaatagcaacctcaggaggcttatgttttttaaatcaaagtcaaccatattctaatatcatgtaggtttattcgagttcagctcatatcgtttgtaattgttgtttttatttttattcaccaaaaatatatttcaaatcaaatttgaattatgtatatacattacacatgtgtaatccagccacatcaacctactgattcgggcagtcgttgggcgactgcttcttgataccggctgatttggggccctttggtggcggtgcatcgtcgtcgtcgtactcatcctcctcgttctcgtcatactcctcttcgtcctcatcgtcctcatcgtcgacgatgtcgccagtgtagtaaagcactgcttttggaataattctggcgcgcaagaagtgaccaatttcgaagtcggtggccaggatctgcgaggaagcgaacacggatgagcaagtggccttgcggaaactgttgttgggtgagcttacctgctgggagtcgtcgtcgacttcctcctggtcgctcgggacctctggtgggctgaagaaattgaagaaggaatccgtcggaacctgcttcacaatggtgcgcactgcgccgcgctccttgtgcttctgcttcttgcggatggtcttcacagtaaggttcatcttcttctcccagttaatggtgcacccctgtaattggttttgtttcgattagaaatcccttgttgccctcgagagtgcagatagctcaccgtgcacttgtagatctctgggccttcaaatgcgaacggatcgttgggatccacggtggacttcaaaacgtactgctttgtgagaactgagttggagaagtactcgttcttgtcgaagtgaaactccaaggtgtacgaatgctaatgaataaagaagcggtttagacgggcaggactactagaactattggccagcaaactcaccccgttgtcgtacttgatggaaatatcgattagcttgcggatggcgggctcgtcgtgcggctgcaccatctcagacattatggccgtgttgcggaacaccgtcagccagaagccgggaatgcccttggcatccttgggaatacttttcaaactgctcagggcctcgcggaagtgctcggcatcggcctcgttgtcggtcgacgactccggttccttccactggggcttctcctcggcggggtccaccttgccctcgatgatctccctgcgcttatcgaacaacggctggtactgcacctggtacttctgctccagcttgtagacgtcctcaaagaactgggcctcgatattcaggtgctgcagctgtaggtttttcaggaacacaatccgattctgcactggagccggcagcatcttgaccatttgctgcagatactgtcgccgcatgaccgagttcatgtaggcgggcctgaaaagtgggttgtgtgtgtcattcccctgattttttgcttgctttcgcttgccaaaatgttgccaccccctctttctactcacatcgactggcagtccgagccggacttctcgtcctcgatttcgttgcaggactcggggtcaacgtgtccttcggctggggcgtccattgttcaataaatgctgatctcactgcaagattctcgattagtgtctgttggcaattgtttgcaccccgaaacgttttcgcaagtgatgtacagactgatgtacacatgtgcacatgcatatgcatatgtgcacattcttatacagaaaattcccactgcgctgccatcccagactgggtgcacttgcgaaaagggagccgcatatttactcgagcagctgaatttcacagactatatagcatattcgcaccgatagaagggcgttgtaaaaactaatacgccattcggcgaatctgcctgcgtgtgtgtgtgtgtgtgtgcatgtgcgattcaatcgaattaccatacaacgcgcttttgcaaaacacgtggtggaccgaaataagctcgaatgtagacgaaattcgagggctatcggcaactttgaccactgtcgcgagctcccagtgcctggccggtgagttggcccccgaattgctgtcaatcagtcagaaattcgccacttaccttcggttagaacagacgcacgatgagcaccgccacgaaaatgtttaaaaaggaatgctgcgctttggcggtgaggggtccattttctttcgaaacgtgctatttcatgacaggctgtggtcacactaccttcccagccgagacgcaaaccctcccagtgcaacaatatttttaatttttttttttaatttttagataataatttgaatgttctatttacaagttgtactcgcatagctagttaacctgcacatttaaaattcatttatttgttaaacaacaagcaaagcctcacctttattgcaccagatcagtaattagtttaatcgttgtatgctaactaatttattaaatttaatattttttaacaaactgaactttattttcgaaatatagcggtaaattttaagaatcgagatgcttgtgatcctgaattgcctatcgatactatcggctaaaacaaaccaaataaaacagctgtggcttaagttataactatatttaaaataacttcgctttaaaataaaagcctaagttggaaaaatataaacattctgaaacgctcctaacaaatcggatttcttataagacgtcaagcaagagatttggatatgctcgcccaactatcggctaacttagtaactactgaattctaagcaatttaaggatttttgccaaataaaaacacaggatcaatgttattacgtttaatccgttcccattaacgggtttattgacttctttagcaaaaaaaaaaaaaaaaaaaaaaaaatacgttgcatgaatgtactgtgcaaatttggaaattataccaaaatgcgccgttctgcaaattaaaaatatttttagggacccaatatatatatgtatatatgcatatgaatataatatgtatttacatacgtacacccacatcggcgcacatcagatgcccatagcccatatagccaattagactcttttcactgccttgtaaacttagcgcggaatcagtaattttatgcgttcacggacgccaaggcggaatcatccataagatggtatcatgggtgctaattgcaataaacatatcttgggggacgtgttttccaaaatacaatcgccact

SEQ ID NO: 11081 - DNA, 1374 bp, DROSOPHILA
tgaaatagcacgtttcgaaagaaaatggacccctcaccgccaaagcgcagcattcctttttaaacattttcgtggcggtgctcatcgtgcgtctgttctaaccgaagcatttattgaacaatggacgccccagccgaaggacacgttgaccccgagtcctgcaacgaaatcgaggacgagaagtccggctcggactgccagtcgatgcccgcctacatgaactcggtcatgcggcgacagtatctgcagcaaatggtcaagatgctgccggctccagtgcagaatcggattgtgttcctgaaaaacctacagctgcagcacctgaatatcgaggcccagttctttgaggacgtctacaagctggagcagaagtaccaggtgcagtaccagccgttgttcgataagcgcagggagatcatcgagggcaaggtggaccccgccgaggagaagccccagtggaaggaaccggagtcgtcgaccgacaacgaggccgatgccgagcacttccgcgaggccctgagcagtttgaaaagtattcccaaggatgccaagggcattcccggcttctggctgacggtgttccgcaacacggccataatgtctgagatggtgcagccgcacgacgagcccgccatccgcaagctaatcgatatttccatcaagtacgacaacgggcattcgtacaccttggagtttcacttcgacaagaacgagtacttctccaactcagttctcacaaagcagtacgttttgaagtccaccgtggatcccaacgatccgttcgcatttgaaggcccagagatctacaagtgcacggggtgcaccattaactgggagaagaagatgaaccttactgtgaagaccatccgcaagaagcagaagcacaaggagcgcggcgcagtgcgcaccattgtgaagcaggttccgacggattccttcttcaatttcttcagcccaccagaggtcccgagcgaccaggaggaagtcgacgacgactcccagcagatcctggccaccgacttcgaaattggtcacttcttgcgcgccagaattattccaaaagcagtgctttactacactggcgacatcgtcgacgatgaggacgatgaggacgaagaggagtatgacgagaacgaggaggatgagtacgacgacgacgatgcaccgccaccaaagggccccaaatcagccggtatcaagaagcagtcgcccaacgactgcccgaatcagtaggttgatgtggctggattacacatgtgtaatgtatatacataattcaaatttgatttgaaatatatttttggtgaataaaaataaaaacaacaattacaaacgatatgagctgaactcgaataaacctacatgatattagaa

SEQ ID NO: 11082 - protein, 370 aa, DROSOPHILA
MDAPAEGHVDPESCNEIEDEKSGSDCQSMPAYMNSVMRRQYLQQMVKMLPAPVQNRIVFLKNLQLQHLNIEAQFFEDVYKLEQKYQVQYQPLFDKRREIIEGKVDPAEEKPQWKEPESSTDNEADAEHFREALSSLKSIPKDAKGIPGFWLTVFRNTAIMSEMVQPHDEPAIRKLIDISIKYDNGHSYTLEFHFDKNEYFSNSVLTKQYVLKSTVDPNDPFAFEGPEIYKCTGCTINWEKKMNLTVKTIRKKQKHKERGAVRTIVKQVPTDSFFNFFSPPEVPSDQEEVDDDSQQILATDFEIGHFLRARIIPKAVLYYTGDIVDDEDDEDEEEYDENEEDEYDDDDAPPPKGPKSAGIKKQSPNDCPNQ

SEQ ID NO: 11083 - DNA, 3861 bp, DROSOPHILA
ggcaagagacatttgatggccatcggatcatttttcacttcattcattcattccggaaaacgtaatttatgatgggaaattcctaagacggatcagcaggcgataaatttacagtttgcgaaacgttattaattgctaattacctccgaacatgattaatgcccttctagccgccgcgttcatctgcatttcagtatgctcattgatgtgccatttacacatagaggtaaaataacatagtattaattactggagacggaagtttctaaatatggcatgcattttgttttacatactgggaaaaccgcagatcgatttctaaatgattctatattgagatattcttgtaactatttatttttatttattaataattctaaaaagatgaagaaaataaatatacattttcctcaatgtggatgaaagccgtccgagtttccgctcgatccaaacgtcagccacgtgtgactttctttcgggctggccgagcttgaaactgccgtgtaatgtaattattgcaaaactattcatcatgttttgggcaccgctcggagcgaacagcagccacttggttgcgcgtctggggtctgtcaaacgcggcgtatgagcaatgtggcgccaaacgcactggcacacacacactcacacacacgcacaggcgtgcgaggttaactaattagcatgtcaaagccatccatattgccacaacgaagccatttcaaagtgttgcctccattgaaaagaaaagccaacccaaaggcgcaaatcccatttaattatgcttttatattcataatccccttccatgttttcagcataatgctatccttaaaagacactcatgcacgcaagcatacgcacactaacgcagctcacactcatctatctgttttaattaatcctttgtcaatggctcggacttaaggcgagcaactaatttgctctcaatgggccccaagaaagggcatgctgtcgtaaaacaaaacaacccagcacacacaatataaaattaaattaaatttgtcaagggctcgatggtgaaggaccattaaatgtccataatagccatatgtgtttgggttgtgtttgtcgaacattgttggaaaacgtattccctattggctgccagagccaagagttagtagagtttgtaggaataatattcacttcgggcatttgtattatagaaagtcgaaagaaaccacagaggaatggcaagctcacagtagacaccaggtttttgaaaattctttattagccgagtataatgtttgaactagtagttgagtttctatccttgtgcttcgtgtcgatgcctcaattggagtccatagacgtggtttgtgtgcttgtaatttcccgttttacccttctttggatggcattgcccatccttcccggggctctcatatgggcgacactgacggtcgcttcggagcagcctgcccggcaggatgtaattctttcggggaatattatgccccgaaatggggggacccaagtatggctgcctttttcctttttcgatcttgaccttttcttgatggacgctacgtgccgatccgtaattggagtgcaccacctgctcgcggtacaagctgctgtggtgcactgggactcgatctgattctctgtgcggtgggtacggtggcgttgagcagccaaatggagtcctcacctcaccatccctgcactctatcccatcgaccaggccagctcttgcctttgccttgccgaagccttcgtcctgccaggatctgaacatgatcttgtttagaaagttctcgcgatcaacgcagccattttcggaaagaatttcattggacttgcacttggatgaacctgaagcttctgggttactactcttgggagcttcttcagctgctacacttgctgctggcgatgcagttgtttcagtgggcggtaccttagtttcatcttgggaaaatgcactacagattaaaaataagtatataagaagaccgcagaagaagcggtgaacttgcatcttggggtgcaagaggaagcggactgaaatgaaaatcttacagaaaataaagtgtaacgagttaaatggactgcgaaattaatttgttttgcattgccataaagtttcggatttcacttcagggagccctaaagtttttattaagctaaacttttgataatactagtaatacaatttattgactctgttcgttttcgattgtttgattttgtcgttggccagctaaccgtttcctatggatgcagcgattccttcttcccaggacctcattagcccgacatgtgtgtccctttccaatactccttcccggcaagaatacgtactttcgtgggcgcttgtttccagttatcggaggtcctaccactctaggttttcgaatcggtttttgttccacatcttccacgtggtgatagagtttataaatacccttgtcgtgaacaatccgttcgccatttagtctgctgtggtgaactggcacccggtttacgtccacgtgcggtgggtacagtggctttgagcagccaaatgcagtcctcaactccccatccctgcactctacgccatcgaccaggccagctctggccttcgccttttcaaagccttcatccctccacgatctcatcacgatcttgttgaggaagttttcgcgatccacgcagccattttcggatagaatttcagttgacttgcacttagacgctgtggaggatttggaagcctctgcagtactgtttcctggagcttcttcggctccagcaggctgtggagttggagctggagttgaagttggagttgtaagttgtattaaaattagtattaagcccagcactacaagggatctattcccctccatcctactactttcctgttgctcagcttgttttaaactacagtattttattgtgtttaatgatcccggaaatcgatttgtctcccgtgaaatttaaagttaatacgctttagatatatacatatatatatatataatatgcatcaagcttctagtaaggcaaacaaattaataggtaactagcacattttacatcaacttctcgttgtaccatacactcgtttttcggagtcgcaagctctcaaagttttaaataggaacattattgattttcagtagttggtgaaataataaccgaaatcaattggaggacacgtgaaactttcaaggtgttgctggggccatttgcttctctttggggcttgttgtttcgttctgcaatctcaatttcccccacaataaaattaatgttttacgtagccaattccgaatcgtttatttcacataaaaatgcgataaataagcgacgcatcctgtgcgacgccgtcgaagacgccaaggataagccgttgttgttgttgttattgtgcgtggggtttcgatggttgttgttcctccttgctcctccatgctcctccttgctgggctgtagtgttgttgtgcctgttgttggtattttactcgttgcgcaccttcagcatcgtgtatttgtagcgctaacaatggaaaggatgttgtgcaaggacatacgcgccggattactgcggagcgtgaaggggcagcgtggaaccatggaaaagggcttacgaacaatgcgacgccacgccccctcttctcttcagctatccgcctttctcctttgactgctggttaaaaataaagaggaagcttacttcacgggctggttacccaacgaaaagtaatgggaaaccaagggaagatcgaaggttgaaatagtttagatggggttaaatcattttcaaggcattactatgaaattattaaaaattttgcatatttcagcaaaatgttttaactattctttgtatattttgtaagaaat

SEQ ID NO: 11084 - DNA, 1482 bp, DROSOPHILA
atggaggggaatagatcccttgtagtgctgggcttaatactaattttaatacaacttacaactccaacttcaactccagctccaactccacagcctgctggagccgaagaagctccaggaaacagtactgcagaggcttccaaatcctccacagcgtctaagtgcaagtcaactgaaattctatccgaaaatggctgcgtggatcgcgaaaacttcctcaacaagatcgtgatgagatcgtggagggatgaaggctttgaaaaggcgaaggccagagctggcctggtcgatggcgtagagtgcagggatggggagttgaggactgcatttggctgctcaaagccactgtacccaccgcacgtggacgtaaaccgggtgccagttcaccacagcagactaaatggcgaacggattgttcacgacaagggtatttataaactctatcaccacgtggaagatgtggaacaaaaaccgattcgaaaacctagagtggtaggacctccgataactggaaacaagcgcccacgaaatgcattttcccaagatgaaactaaggtaccgcccactgaaacaactgcatcgccagcagcaagtgtagcagctgaagaagctcccaagagtagtaacccagaagcttcaggttcatccaagtgcaagtccaatgaaattctttccgaaaatggctgcgttgatcgcgagaactttctaaacaagatcatgttcagatcctggcaggacgaaggcttcggcaaggcaaaggcaagagctggcctggtcgatgggatagagtgcagggatggtgaggtgaggactccatttggctgctcaacgccaccgtacccaccgcacagagaatcagatcgagtcccagtgcaccacagcagcttgtaccgcgagcaggtggtgcactccaattacggatcggcacgtagcgtccatcaagaaaaggtcaagatcgaaaaaggaaaaaggcagccatacttgggtccccccatttcggggcataatattccccgaaagaattacatcctgccgggcaggctgctccgaagcgaccgtcagtgtcgcccatatgagagccccgggaaggatgggcaatgccatccaaagaagggtaaaacgggaaattacaagcacacaaaccacgtctatggactccaattgaggcatcgacacgaagcacaaggatagaaactcaactactagttcaaacattatactcggctaataaagaattttcaaaaacctggtgtctactgtgagcttgccattcctctgtggtttctttcgactttctataatacaaatgcccgaagtgaatattattcctacaaactctactaactcttggctctggcagccaatagggaatacgttttccaacaatgttcgacaaacacaacccaaacacatatggctattatggacatttaatggtccttcaccatcgagcccttgacaaatttaatttaattttatatt

SEQ ID NO: 11085 - protein, 396 aa, DROSOPHILA
MEGNRSLVVLGLILILIQLTTPTSTPAPTPQPAGAEEAPGNSTAEASKSSTASKCKSTEILSENGCVDRENFLNKIVMRSWRDEGFEKAKARAGLVDGVECRDGELRTAFGCSKPLYPPHVDVNRVPVHHSRLNGERIVHDKGIYKLYHHVEDVEQKPIRKPRVVGPPITGNKRPRNAFSQDETKVPPTETTASPAASVAAEEAPKSSNPEASGSSKCKSNEILSENGCVDRENFLNKIMFRSWQDEGFGKAKARAGLVDGIECRDGEVRTPFGCSTPPYPPHRESDRVPVHHSSLYREQVVHSNYGSARSVHQEKVKIEKGKRQPYLGPPISGHNIPRKNYILPGRLLRSDRQCRPYESPGKDGQCHPKKGKTGNYKHTNHVYGLQLRHRHEAQG

SEQ ID NO: 11086 - DNA, 3971 bp, DROSOPHILA
tttccaattgattgactataaactctggctggaaggtcatgtagatattgtccttctgccagttggccaaaatgccccagctgctgaactcctctttttgcgatttaatggcctcccaagcaaaggcacgagctttaggaaataataaagaattagcaaagaatctatactaatgggattaactcacatttctggcggatttcttgagcactctgacctggagcagtacttgtggccttcagttctattggcaggccatgacaatcccagccaggaatgtagttgactcgctggccatgtgctacccgctggcgcagagtgatatctttaaggatcttgttgacggcatggcccatgtgaagttgtccgttggcgtagggcggtccatcgtgaaggacgaaggtgggtttccccttctccgccagtcgctgctcctggtacgcataggaaactgcaatcttgttctgcaatgtgataaagtgatacataagatttggttacttcacatatccaacaacatgcctccagaactagacgctcctgttcctcgcgttttgctgcggtgagacgattgggaaacttggtctttggcaggtttatggtgtctgtgtatttctttgcatcctttttggccgctttcatagaatataagcggtttccaacgcgaaagtagaaaatcctaagcattttgctgccgaataagaagagacacaacgtaacaacagccggcaaagtggaaatcatatggtcttgtggaacgtaagcactgttcacacagtgcacagcccgcgatgtagattgtaagtttaaaatgtaatttgaattgatattattttattttgtaactactttaatataaattgaatataacaatgtaaattcaaaataaatacaaattaagttaaatttaataaaggaatattattttttaagatatcaaaaatgcacaattgtaaaattggttatgtttaatggttggtggaattgctgatcgaattccttaatctttcttttccggttcttttggcttgtcatcctttgcctcctcctttttgtcttctcccttgggcggctcctccttcttgccctcctctggctttgtgtccttcttttcgtccttcttggcttccgccttggctggaggagcatcccctgacatggaggcggccagttgggtggccttggccagcacctcttcggcatctccgaccatgtagaaggcaatctccgggatatcgtcatattcaccattcaacaaacgtttgaagccctccacacacttctccacaggcaccagctttcccgggtgtccagtgaagatctcagccacttggaacggctgcgaaaggaaacgctgcatcttgcgagccctggccaccgtcaacttatcctcctcagacagttcatccattcccagaatggcgatgatgtcctgcagcgacttgtaagcctgcagagtcttctgaactgctcgagccacattgtagtgctcctcgcctacaacatcgggatcgaggatgcgggacgaggagtccaagggatccacagccggataaatacccaactcagcaatgggacgcgagagcacggtggtagcgtccaaatgcgaaaaggtagccgccggagcaggatcactgagatcatcggcgggcacgtagacagcctgaacagaagtgatggaaccgttgcgggtactagtgatccgttcctgcatggtgcccatgtcggttcctaaggtaggctgatagcccaccgccgagggaatgcgcccgagcaaagccgacacctccgatcccgcctgggtgaaacggaaaatgttgtcaatgaagagcagcacatcctgcccgtccacgtcgcggaaatattcggcgatggtcagtccggtgagcaccacacgggagcgagcgcccgggggctcgttcatctggccaaagaccagaaccaccttcgaggagtcatcctccagggagatgaccttggactcgatcatctcgtggtacagatcgttgccctcgcgggtacgctctcctgcgcccacgaacacggagtagccgccatgggacttggctatgttattgatcagctccataatgagcaccgtcttgcccacgccggcgcctccaaacagcccgatcttaccgccctttacgtaaggagccagcaaatcaatcaccttgatgccagtgactaggatctctggcttcacgctcaagtcggtcagctccggggcttcgttatggataaaggagtagaaatccgacttgacctcaccgcgatcgtcaatgggatcgcccaccacgttgaggatgcgtcccaaaacggccttgcccaccgccacacggatgggatagccggtatcgaggaccggctgaccacgacgcagtccttcggtggaatccatggccacgcaacggacgatattgttgcccagatggtggaatacctaagaaatcgattaatagaagttaagtttaataatttttaaaacttttcgaatctttagaagttatgttaaaatccgttttaaaattttaattaaatattagataatataatatgaatgtcgtccgtcttaaaattggttaatcctttgacttacctccagcactaggttagcaatgggagcatcctgcacctggagcgcgttgagcacctccggaacctcctcctcgaagtagacatcgatgacgggaccgatgacagcatggatgacacccttgcgacccttgctctccagcttcttgcctccgccgtcggacttcttttcctcacactcatcctcggcttcatccttcttcttaaccagttccgcgtccgtcttgcagacttcctgcggctcgggctcgcactcatcgcccgactttttcttatccttgtcatcccaaagggacagggaggcatgaaggtagcggggaaacaccacaggattaccaagatagttgccccggtaacccccggtacccgggcccatcttcaggccaatccttgcacatgctaacatggtttttttcattttcagaggaagctggtcatgtgaaataggttcattcttcttacctgtagccattttagcccatgataccaacatttttactttagttttttattctttcgctgcttggacgtctttgctgcaaataaaacttgcttgtaatgatagattcctttgacagatgacagcaatgcctactataaaggattcccttaatgcactttaaatgggttgtcacctatttattttttagggatatttgctttctaaaacttcttaaaagtttgcaatataaatcctaaagttttcttaattaattaattaatataatatgatttcttatattttaatttattttcaggctgcattagattaagcttggattcataatcgatcctcagatatgttttcctttagctctattttagggttgagtcagttggtttccaaggataccgatagccacaaagctctgaagccaaaacagtaaggttttcaagctgatggaaaatggacgtactatcgcattacagctcacccatagttgaatttccggccacgcagcctttggagaagcagcatgccctggtggacaactgtacgggcaccgatccacctcctcccagccaagatgccgccacaggaacgcaggagaagctgcatgtggccacacaaacagagcaacgagtagttagtagtaaggatgtggaatacgatgagagggctttggcgaagtggttgcgacagatctgccccatggtcgaacgggagctaatgaatcccacgcctctgatggaggatctaacgatgagccagtgccgcttggaggagaaactgcaggtgtacacgtaccagaaactgataatgggtggtgcagaaaactcgcaaggactggctatctggctgtgtgtgcatacgaataacgccccagttctggtggccaccactgtagctccccatgatgactggtgcgagcatg

SEQ ID NO: 11087 - DNA, 1815 bp, DROSOPHILA
atgggcccgggtaccgggggttaccggggcaactatcttggtaatcctgtggtgtttccccgctaccttcatgcctccctgtccctttgggatgacaaggataagaaaaagtcgggcgatgagtgcgagcccgagccgcaggaagtctgcaagacggacgcggaactggttaagaagaaggatgaagccgaggatgagtgtgaggaaaagaagtccgacggcggaggcaagaagctggagagcaagggtcgcaagggtgtcatccatgctgtcatcggtcccgtcatcgatgtctacttcgaggaggaggttccggaggtgctcaacgcgctccaggtgcaggatgctcccattgctaacctagtgctggaggtattccaccatctgggcaacaatatcgtccgttgcgtggccatggattccaccgaaggactgcgtcgtggtcagccggtcctcgataccggctatcccatccgtgtggcggtgggcaaggccgttttgggacgcatcctcaacgtggtgggcgatcccattgacgatcgcggtgaggtcaagtcggatttctactcctttatccataacgaagccccggagctgaccgacttgagcgtgaagccagagatcctagtcactggcatcaaggtgattgatttgctggctccttacgtaaagggcggtaagatcgggctgtttggaggcgccggcgtgggcaagacggtgctcattatggagctgatcaataacatagccaagtcccatggcggctactccgtgttcgtgggcgcaggagagcgtacccgcgagggcaacgatctgtaccacgagatgatcgagtccaaggtcatctccctggaggatgactcctcgaaggtggttctggtctttggccagatgaacgagcccccgggcgctcgctcccgtgtggtgctcaccggactgaccatcgccgaatatttccgcgacgtggacgggcaggatgtgctgctcttcattgacaacattttccgtttcacccaggcgggatcggaggtgtcggctttgctcgggcgcattccctcggcggtgggctatcagcctaccttaggaaccgacatgggcaccatgcaggaacggatcactagtacccgcaacggttccatcacttctgttcaggctgtctacgtgcccgccgatgatctcagtgatcctgctccggcggctaccttttcgcatttggacgctaccaccgtgctctcgcgtcccattgctgagttgggtatttatccggctgtggatcccttggactcctcgtcccgcatcctcgatcccgatgttgtaggcgaggagcactacaatgtggctcgagcagttcagaagactctgcaggcttacaagtcgctgcaggacatcatcgccattctgggaatggatgaactgtctgaggaggataagttgacggtggccagggctcgcaagatgcagcgtttcctttcgcagccgttccaagtggctgagatcttcactggacacccgggaaagctggtgcctgtggagaagtgtgtggagggcttcaaacgtttgttgaatggtgaatatgacgatatcccggagattgccttctacatggtcggagatgccgaagaggtgctggccaaggccacccaactggccgcctccatgtcaggggatgctcctccagccaaggcggaagccaagaaggacgaaaagaaggacacaaagccagaggagggcaagaaggaggagccgcccaagggagaagacaaaaaggaggaggcaaaggatgacaagccaaaagaaccggaaaagaaagattaa

SEQ ID NO: 11088 - protein, 604 aa, DROSOPHILA
MGPGTGGYRGNYLGNPVVFPRYLHASLSLWDDKDKKKSGDECEPEPQEVCKTDAELVKKKDEAEDECEEKKSDGGGKKLESKGRKGVIHAVIGPVIDVYFEEEVPEVLNALQVQDAPIANLVLEVFHHLGNNIVRCVAMDSTEGLRRGQPVLDTGYPIRVAVGKAVLGRILNVVGDPIDDRGEVKSDFYSFIHNEAPELTDLSVKPEILVTGIKVIDLLAPYVKGGKIGLFGGAGVGKTVLIMELINNIAKSHGGYSVFVGAGERTREGNDLYHEMIESKVISLEDDSSKVVLVFGQMNEPPGARSRVVLTGLTIAEYFRDVDGQDVLLFIDNIFRFTQAGSEVSALLGRIPSAVGYQPTLGTDMGTMQERITSTRNGSITSVQAVYVPADDLSDPAPAATFSHLDATTVLSRPIAELGIYPAVDPLDSSSRILDPDVVGEEHYNVARAVQKTLQAYKSLQDIIAILGMDELSEEDKLTVARARKMQRFLSQPFQVAEIFTGHPGKLVPVEKCVEGFKRLLNGEYDDIPEIAFYMVGDAEEVLAKATQLAASMSGDAPPAKAEAKKDEKKDTKPEEGKKEEPPKGEDKKEEAKDDKPKEPEKKD

SEQ ID NO: 11089 - DNA, 2544 bp, DROSOPHILA
catacaaatattatgtggataaatggtcagatgctgatgaatcgggagaatccaaggatcaggagtcctttgctcattaccaacgcaaccagcagcgctctaaggcaaaggccaccaaggaatctattagtgacatgagagaggtgaggttccccttacatccaggacttcttttggtctttacttgccagttctctcctacagatcatccgacaagccttcaggagctctgaagtgaagagcctgcgatttctttttggcaacaatatgttcatgccctcggaggcctatactctgcacataccacatgattccatatccagagatcactattgcgagcaccatgctctgcccgaaggtcgcatcaaccaggcgctgctccgcctgctcacctgcgaggagctgtacaggctattctccaccgaactaaaagtcaccaacgtgtttctagaaatggagctccttacagactccgatcgaccccaaggatcccattgtgactcctttaatctaatcccaaagcatatattaagccaacttccgcgcagctgcaagaacatacacctgcatctactgcattgcagtgaaaacacaccgaatgaattacgctgctgcaaggagatggatatttaccacgatcttggcgtgcggaatctggataaatctggggaagacgttagccagaccaacgaagagcatgacgttttgaaagcagcaaatgaaaccagcggttggtggcaggccgaggtcatagttcgcggtttcagagctcctggcaaccaaaaatcgggagatttgtggtctagctaacattttataacttggattcttgctattcggcgtgtttgtgtcaaaaataaagtttcgaatcgtttatatttcaagtattaagttattttattatgtatataattgtttaattttatttttggtttcgatttattgagaatgttttgaaaacccaaggcactcaaagatgatccatcgtggtattggtattatcatcttaggtagtgataatcatggaaactggtgcactgcgctctcgctgcttggccacaatcttgttggctatgcgatccaagttacgttgtccttgcggagtcagcttacgaccaccatccgggtgcctctccaccatgttagcagcttccaaggcttgaagagcctgctcatgtgttagatacatgctaagtaatattaaatataaccttaaagtacaaccatttcccactcaccttgcgaatacagccatccgatgagcgacagtgcttggacggacgaacaccgttgcgcttgcgcccgctatagaccttggtgaaggccccaacgccggcgggactgcgcaggtacaggtgtctcataatagaggcgcagcgagtgtagaaccagtcgtcgtcggtaggagcagtctccttgaacttgccagtcttcatatagacggcctgttcgggcacaaaaatttttccggattttttgagaaaagcagccatgtttttggtcagaacgtgctgatcgatttcctttactgtgactccaggcatgttgctctctacgttcttgaaagcacgtttttaaggctcatgggtccgatatatgtatgtatgtatttaaaaaagtcttaccttttgagaagaaaaaggtttgcttccggttagtttgctgactttagtcaaaatggacgattggcaagtgacgtttgaaagagggaccaggtcattgaccccaaaggattactttccgatagttttgtcgtgcagtattggtgaacttggcaattcttttcgaaaacttaacctataaacttggaaaggaacgcaatgtagcaaaactactgttcttggtgacagggggtttaaggtagactaacaaggacaattttatgacactgaagccctatggagtaagaatcaaagaactgctgtattttggtttgtataaatgaataaaacgttctacgctaattgaagagcattcgaagaggtttgaatacagcgccatagggtgaccagcttgtggagcattgaaggtatttcttgttttaagaatgatcacgggatggtcacactagaaatacagccaaacaaaacaacaaaaagcatttcgagcgctaacaaatatatatctttcgacttgactcattcgcattccggttgaccgtgtcgcgcctgcagcatgtctgaaaagccgactgttctgattttgggtggtaagtggtcccgctgcatcctcctcatcgtcatcctgcccccgctccccactccacacttccgcttatcagcatcgctgactgcatcgctgctcttcctcttcccgcaggctgcggcttcattggacgcaacttggccacttatctgctggacaatgaactggcgcaggaaatacgactggccgataagacccctccgcagatggcatggctaaacgaggagcagacgcgggtcttcgagagcgatcgggtggagttctgcagcgcgaacctaataaacgccggtaggtaatcactacattagggtggctcgttccaccaggatgcggatcaca

SEQ ID NO: 11090 - DNA, 474 bp, DROSOPHILA
atgcctggagtcacagtaaaggaaatcgatcagcacgttctgaccaaaaacatggctgcttttctcaaaaaatccggaaaaatttttgtgcccgaacaggccgtctatatgaagactggcaagttcaaggagactgctcctaccgacgacgactggttctacactcgctgcgcctctattatgagacacctgtacctgcgcagtcccgccggcgttggggccttcaccaaggtctatagcgggcgcaagcgcaacggtgttcgtccgtccaagcactgtcgctcatcggatggctgtattcgcaaggctcttcaagccttggaagctgctaacatggtggagaggcacccggatggtggtcgtaagctgactccgcaaggacaacgtaacttggatcgcatagccaacaagattgtggccaagcagcgagagcgcagtgcaccagtttccatgattatcactacctaagatgat

SEQ ID NO: 11091 - protein, 155 aa, DROSOPHILA
MPGVTVKEIDQHVLTKNMAAFLKKSGKIFVPEQAVYMKTGKFKETAPTDDDWFYTRCASIMRHLYLRSPAGVGAFTKVYSGRKRNGVRPSKHCRSSDGCIRKALQALEAANMVERHPDGGRKLTPQGQRNLDRIANKIVAKQRERSAPVSMIITT

SEQ ID NO: 11092 - DNA, 2760 bp, DROSOPHILA
ggagtggaagttatcgttgtgaattccgcaggtgaatacccaagctcatagctatccctatgcccgcacccatctgcatcccacatctccgttctcatcccgcattaagatggcaaaaaagcttgcggcttgcggcatctgccgaatggcggtgcttaaaccacccaaaaactagcgacgaacgacggagcacataaattgattaccaagacattctacgacaaattcggcatataacaacaatccgcatgacggaaacactggggggattcaccccaaaattcacttgccaacttaatcggttgtacaagacaacagtttctggaagcaaaagagactcgttgatgtggcaatggcaatgccgcaagtcgtctgtggaatttcgtaagctgcgacaaccaatagtcaatatactcaatactcaatacccaataccctataaccaatacccagttgccaaatcaatcgcgacaactgttgagccagtcagtcagttggagattacaccgccgatggggattcagcttgggcacttgactgggaatggtgggttcaagaggcgaccatacagattgatgcaaccaaagcctagggaaaaagtcttaaaggaattcagtacgaaaatgtgttttcttcaaaatctcaaagggttacaaatgggctaaaatggaaccattcgaattctagtacgatttcttcattagtaattgcataattatttatattaatgcatgtaaagttttagaaaatcacaaaatgctttgattttagcgtcaacaatcttttcattttcgtagacagctttgtagctcagtcgtcattgtattctatacttatttggatagcagtcgcaataagttatttcagaaggatagttttgccgagaaattgttcaaaaattgcacacgaaaaagagtataattgtttttttttttttttgtttaattttgctacgctttttaaaaaccaaaaataggtcccaaaaattagtttcatcataatgacgtcttctcggcaaaatcttcataaaatctgtcgctatcgattgcgtggaaattgtcgtttcgatgatttatgccgatactcacacgatgtgttacaaaatgacaacctgaggccgcagatatcaaacaatgcggatgaagtcgtggggcatgcaaacaggtacagtcggccgatgaccggggcaaatgcaacagaggagatgaagctatcctttgcaatagccaaatcccaggacaagatgtgcggcatttgtttggaaaccgtcgtgaagaagagggggcgtgaatgtcgctttggcatcctgcctaagtgcaagcacatattctgtttgacgtgcattcgcagatggcgtcaggccgagtatatcgaggacaatgtgaagcgtggttgccccgaatgtcgcgtcttctcggaattcgtgtgccctagtgcctactgggtggatacaaaggaggagaaggacaagttgctaagcgaatatcgcgcggcaatgggcgccaaggattgcaagtacttcaatgggggcttgggcaaatgtccctttggaacaaattgcttctacaatcaccgttctctggcgggtgataaccgcattcaacggcattcaatggaggatgacgacttttaaatatattgattttaatgatgacatgacatggcatgtgaccggtcgatcccatttctcagtgactcgagcgatacgttcatttcaaagcaaatcaaagagaacaaagcaacttttgttagacggctgaggagacacggtttatagacttagtcttggtccttgccagagactataatgtacaacactgagcttaatatagcttcgttcatccacatatcgaccaatttagtgcattactatccccatatagccgaattcaagcatttagcaatataacccttacaaaataaaacaaatactcaagcaccaaatttttgtttagatgtctccgacatcgtcacggtgaagtggccaatagcactggaaaataggtgggagttaaaattattagcacatcacatcagtttcacaataatatcattaagtttcttaaacacaaatccatataattgtgaatatcactcaacacttgtacaaaatgaatatgaaagaccactaagtcttctgtggattttagtttctttttgatatttcttaaaattttttaaaatcacagaaaaaaatctcaaatggtctaaaatataatcattcgaaatctagtgcaatttcttaattacaaattgcataattatttattttaatgcattaaaagaatgctttcattttagcgtcaactatctttttattctctttgacatatttctagcttagtcgccttagaatttaatacctatttttaaatcagtcgctaaaagttatttcagaaggatagtattgccgagaaattgttcaaaaattttacacgaaaaaaagtatatttttttttaaattttacaacgctatttaaaaaccaaaaaataaagttctcaaaaatactttcatcataatgtcgtatcgccgtagtcaaacaatctgtcgcttccatttgcttggaatttgtcgttttggtgatttatgccgattctcgcacgacgagacgacaccaaatgacaaccagagtccgcagatatcggaaatcgcggatgaagtcgtggagaatgagcaagtggtggcctccaccagtagctacagtcgccagatgacctgggcaaatgcaccagagtttgttcccaggtacaaagccaatt

SEQ ID NO: 11093 - DNA, 760 bp, DROSOPHILA
atgacgtcttctcggcaaaatcttcataaaatctgtcgctatcgattgcgtggaaattgtcgtttcgatgatttatgccgatactcacacgatgtgttacaaaatgacaacctgaggccgcagatatcaaacaatgcggatgaagtcgtggggcatgcaaacaggtacagtcggccgatgaccggggcaaatgcaacagaggagatgaagctatcctttgcaatagccaaatcccaggacaagatgtgcggcatttgtttggaaaccgtcgtgaagaagagggggcgtgaatgtcgctttggcatcctgcctaagtgcaagcacatattctgtttgacgtgcattcgcagatggcgtcaggccgagtatatcgaggacaatgtgaagcgtggttgccccgaatgtcgcgtcttctcggaattcgtgtgccctagtgcctactgggtggatacaaaggaggagaaggacaagttgctaagcgaatatcgcgcggcaatgggcgccaaggattgcaagtacttcaatgggggcttgggcaaatgtccctttggaacaaattgcttctacaatcaccgttctctggcgggtgataaccgcattcaacggcattcaatggaggatgacgacttttaaatatattgattttaatgatgacatgacatggcatgtgaccggtcgatcccatttctcagtgactcgagcgatacgttcatttcaaagcaaatcaaagagaacaaagcaacttttgttagacggctga

SEQ ID NO: 11094 - protein, 210 aa, DROSOPHILA
MTSSRQNLHKICRYRLRGNCRFDDLCRYSHDVLQNDNLRPQISNNADEVVGHANRYSRPMTGANATEEMKLSFAIAKSQDKMCGICLETVVKKRGRECRFGILPKCKHIFCLTCIRRWRQAEYIEDNVKRGCPECRVFSEFVCPSAYWVDTKEEKDKLLSEYRAAMGAKDCKYFNGGLGKCPFGTNCFYNHRSLAGDNRIQRHSMEDDDF

SEQ ID NO: 11095 - DNA, 4844 bp, DROSOPHILA
gtgcttccgaatgcattgcagcatgcgtcaaagttgagagaacaataatactcgcaaagagctatagctgataccagcaatgtcaacagcaacaaacataagcaggatcaacgatgcgaccaacgcgtgcaacagtatcaacatcatcttacagctgcaacgacagcatcaacaagttgttgcatttgcctcatattgttgctgacgatgacgatgacagcatgccaacatggtgactgatgtgcaacagccctgtgactgtctttggtgtgcagtggagtcgttgatatagccaatttgtgatggccgggcgcgcagccgcctgaaacttgatgcgatattattatccccaaagtacagtaattgctgaaaagtcgaaattggtcaactcatctaaatgaaattgaaaggaatacagtcacattacttacgagtacaccactggtgttacttgaggttatcgaaaacagccaggagcgggcaaagcttattctaagcgtcagaaaaaagaacggtatttccaaacttggagtcccgtgttaaaacacattgcaacatttgctttcgtttcgttcctaatcctcttttcccgtgtggatattatacaataaatcgccaggggttttattcggatggttttgtatagaaaaaaattgcgggtcaaatggttttaatgtctatctacaagctatgaggtacacgccaaggaaaagagaaaattcgcacataaaaaagtcaattctacccacttgttccactatttatcaccgctctctgtgtagctacagaaccggtattccggtttgcttatccgtccgtccacgaccacaaagaatgaagtgggtgctttttcgttggagttacgggttcgggtgatctggagggaggaaaaactacattgtggatagccccgcattgtctgcccagtaaaaagtagaataagtgtacttcttcaactgtcattttacttttttcatatgtgttccccttctttgtgtttttcagcgctagccaggagtaagcgatcgatcggtcccgagaagatgtctccgcccaattgtctgctggctgttctggcgctcacggttttcataggggccaacaacgccctgcctatcacctcgcgccccatcgaggggaatgtccagagaatggtgtgggaggattgggtgaacctggacccagagcagagaaaccttaccaaggagaagaagataaccgccaagtcaatattcacgctaccgtttcgccactgtccgcagggtcatacgctgttcaaccagctttgcatcccacagtccaacattgatcccacggatctggtcaaacaggaactcatcttggccgggggctccaatggcagtcccccaccgccacccattggagactatgactacggcgacgatgaggagagtgaagaaatcgtgtacgatctttcggtcatacctacagccatgcaggatggtttaccgcccagcgttggcaccggggatcaagccctgcccagcgaggatgcaccactgaaatttaatatttttgagaagaaattccccacgggcacgggtgagcacgaggagatgccactaccgccggacatggcggctgcaacatatgccaaaaacatcagtaccacaccagaaacatcaactagcatcacgcccacgtcaacgacgacttttgccgtaccgtctgttccttcgggagaggccagtaaccgcattcccggcggcgtcgatttgctggcggcccccagtgatgccttctccacatcgacaacacttagcatgccgaccagcaacaccaccaccaccagcaacaaggacattggccaagtagagtccattgttttgccagcggatcaggagcacgatggccttgtgcacctggtgaccagttctctttccgacaatgacagtgatgactcctccaccacattgaatggatttaacgcggaggcggatctggctcaactgctcaaggtcgacgccttttggccggtctacgatggcagcattgagttgttgccgccgcttttcagtcatcgcaaggtggcgccgccgttaagcgcagaccaggatgtaaaaaccaaacacgcggttgatgctgcagagaaggtaggagcggagctggaagaggaggtgggagaggaggaggtgaccgctacggacatattaccaagtgaggaagacgagtataccacagagacggcaacaaccacaggggacacaacggttgcggaggcgtcaatggatacatcgactgccacctccacctctggccaatcatcaccacatccgccagaagaacccgagatagatgaacgtgaaaatcgcctggtcttgataaaatcgaaagtgcaaccggttcagttaacgacaacaacttcggcaactgcaacaactgcagctgatgttgctaattcaagctcctcaactgaccggtttcactatcagcattttgtcgaagatgagagcagtactacgacggcaacaccagagcccagcagcagcactcccggtgatcctatcgagcagtccgatatgccggcgagtgacaatgacaatttaatgacaaatacaattggcggacgtggcgacgacgatgatgatgggggacataaggctaccagtgaaattcatgtccaacaggaactgcggctcatcaacgagctggtaaagggcaagcaacgacagcagcatcagccacaaaaacaacagcttgagccaaccagtacagaaataacttcagcgttaacatcaacatcaactgaggatgccaccaccaccaccaccaccacaacagcatacacaaattggtcaaaggtgatgccgcaattaggacagagcacatctgaaacagcagccaccacagagacagttgctacatcgggccaggttaatgaaatcagcttgacagcaacgtcagcatcaacagaagtaaaacattttagtattactaatcgtagctatagaaatagtaaaataattagagaagatcgcttgaccgtagagccggaaggaattgtcgaatctgcagcaagtacggaatcagcaggaaccgccgccacaactcccaacagcagcagcaacccagatggctatacgcccttgtggtggctaccgagtattgggtggcgtctggaccgccatctggatgggaatggcgaggatcagtcgctgttgttgcggttcttcagcacatttcgcggcagcaacacggcagcaaccacacgctaaaagcaacatcgtcaacaacagcagcagcaactcctggctctggctagcgattagagccacaggaagtagctgagtgccgtatagtctagtgtagtgcaggatagtgtcgtgttagcaacagcgtttcaatagcgtgttgaagtttgttcacagttatctcactttcacacttttcccttttctgagtaaatatttattgtcttttaatgttttaatcgaatgtcacttgtacatagcatgtccaaaacacactacttaacaaccacttttgatttttttttgccttggcgttatatcataccatattttttgtgttattgcaactgctttcttttttaagttgttgatttaattttaggggaagttttttttacattacaatagttttatatgtgagcgctgctgtcgctgttgcgagccttagcaatatttcattgtgattacttaggcatatgaattgatcgttagacttaggaaatcttatttgtatatccagaatcttttgatgtatctttttttttactactattattaccattgtaactcatatattcattgtgcgtacagtctgagcatttgttgtatatacattagtgaagaaacctttcaaatccaagcatttttaacgcatctactgaaacaacacgtgtatctatacctagcatgtaagcgcaacagttatgctaaccattgcaaacacaaatcgaaactaaagcctaaaaaatagtgtaatgcatgtatatatttatagaaaatgcgtttcgatccattaactcaaacgaatcgaattgaatcgaacgaaacgaatcaggcaaccagcatgtttttgtcaattgaaattcaaccagcaaccaaagttcagaagaaaaacaaatgcaaaaatgcaaaaaatcgtatattttcattggcacaatggcgattgtgcggctggggccttcctcttaatttgatagctggccaaaagtctgcggtaagtatcccactaagaattcggtgctggattagccacaacttcgaaagagagccccgggcgaaactcattcaaccgtactgcaaaccgccactcggcttggactttatgaagattcctttattgttcaccttaacagtttgtccgaaagtcggacgcttaactcgttccgcagcgaattggccaaaacgacaaaaaggcagacgcaaaataaaccaaatattcaagtgcaggtcgataggaggactttcaactgcgtaatgggctttgtgtgtcaactggccaaaggagatgccaaagagaatttcgttgcaccccagctttggcgatacactaagcaaaagagtaccgggatatattccctggagtgagttgcaattctgatcagaaatcagaaatcacgctctagactattaggctaccacaacaaaatttagctgttttccaatgtcttttcaaacacgggttgcttttgtttattaaaacgcttataccagccagagaagatctgcgaaataaatgtaccaacaactgaatttatccaccgttttagtcgttcttctctgtgaagctagaggcaaataaggcgctaaacgacgggttccagccactgacgaatcgtcagttgcgggagaaaa

SEQ ID NO: 11096 - DNA, 2844 bp, DROSOPHILA
ttcagcgctagccaggagtaagcgatcgatcggtcccgagaagatgtctccgcccaattgtctgctggctgttctggcgctcacggttttcataggggccaacaacgccctgcctatcacctcgcgccccatcgaggggaatgtccagagaatggtgtgggaggattgggtgaacctggacccagagcagagaaaccttaccaaggagaagaagataaccgccaagtcaatattcacgctaccgtttcgccactgtccgcagggtcatacgctgttcaaccagctttgcatcccacagtccaacattgatcccacggatctggtcaaacaggaactcatcttggccgggggctccaatggcagtcccccaccgccacccattggagactatgactacggcgacgatgaggagagtgaagaaatcgtgtacgatctttcggtcatacctacagccatgcaggatggtttaccgcccagcgttggcaccggggatcaagccctgcccagcgaggatgcaccactgaaatttaatatttttgagaagaaattccccacgggcacgggtgagcacgaggagatgccactaccgccggacatggcggctgcaacatatgccaaaaacatcagtaccacaccagaaacatcaactagcatcacgcccacgtcaacgacgacttttgccgtaccgtctgttccttcgggagaggccagtaaccgcattcccggcggcgtcgatttgctggcggcccccagtgatgccttctccacatcgacaacacttagcatgccgaccagcaacaccaccaccaccagcaacaaggacattggccaagtagagtccattgttttgccagcggatcaggagcacgatggccttgtgcacctggtgaccagttctctttccgacaatgacagtgatgactcctccaccacattgaatggatttaacgcggaggcggatctggctcaactgctcaaggtcgacgccttttggccggtctacgatggcagcattgagttgttgccgccgcttttcagtcatcgcaaggtggcgccgccgttaagcgcagaccaggatgtaaaaaccaaacacgcggttgatgctgcagagaaggtaggagcggagctggaagaggaggtgggagaggaggaggtgaccgctacggacatattaccaagtgaggaagacgagtataccacagagacggcaacaaccacaggggacacaacggttgcggaggcgtcaatggatacatcgactgccacctccacctctggccaatcatcaccacatccgccagaagaacccgagatagatgaacgtgaaaatcgcctggtcttgataaaatcgaaagtgcaaccggttcagttaacgacaacaacttcggcaactgcaacaactgcagctgatgttgctaattcaagctcctcaactgaccggtttcactatcagcattttgtcgaagatgagagcagtactacgacggcaacaccagagcccagcagcagcactcccggtgatcctatcgagcagtccgatatgccggcgagtgacaatgacaatttaatgacaaatacaattggcggacgtggcgacgacgatgatgatgggggacataaggctaccagtgaaattcatgtccaacaggaactgcggctcatcaacgagctggtaaagggcaagcaacgacagcagcatcagccacaaaaacaacagcttgagccaaccagtacagaaataacttcagcgttaacatcaacatcaactgaggatgccaccaccaccaccaccaccacaacagcatacacaaattggtcaaaggtgatgccgcaattaggacagagcacatctgaaacagcagccaccacagagacagttgctacatcgggccaggttaatgaaatcagcttgacagcaacgtcagcatcaacagaagtaaaacattttagtattactaatcgtagctatagaaatagtaaaataattagagaagatcgcttgaccgtagagccggaaggaattgtcgaatctgcagcaagtacggaatcagcaggaaccgccgccacaactcccaacagcagcagcaacccagatggctatacgcccttgtggtggctaccgagtattgggtggcgtctggaccgccatctggatgggaatggcgaggatcagtcgctgttgttgcggttcttcagcacatttcgcggcagcaacacggcagcaaccacacgctaaaagcaacatcgtcaacaacagcagcagcaactcctggctctggctagcgattagagccacaggaagtagctgagtgccgtatagtctagtgtagtgcaggatagtgtcgtgttagcaacagcgtttcaatagcgtgttgaagtttgttcacagttatctcactttcacacttttcccttttctgagtaaatatttattgtcttttaatgttttaatcgaatgtcacttgtacatagcatgtccaaaacacactacttaacaaccacttttgatttttttttgccttggcgttatatcataccatattttttgtgttattgcaactgctttcttttttaagttgttgatttaattttaggggaagttttttttacattacaatagttttatatgtgagcgctgctgtcgctgttgcgagccttagcaatatttcattgtgattacttaggcatatgaattgatcgttagacttaggaaatcttatttgtatatccagaatcttttgatgtatctttttttttactactattattaccattgtaactcatatattcattgtgcgtacagtctgagcatttgttgtatatacattagtgaagaaacctttc

SEQ ID NO: 11097 - protein, 730 aa, DROSOPHILA
MSPPNCLLAVLALTVFIGANNALPITSRPIEGNVQRMVWEDWVNLDPEQRNLTKEKKITAKSIFTLPFRHCPQGHTLFNQLCIPQSNIDPTDLVKQELILAGGSNGSPPPPPIGDYDYGDDEESEEIVYDLSVIPTAMQDGLPPSVGTGDQALPSEDAPLKFNIFEKKFPTGTGEHEEMPLPPDMAAATYAKNISTTPETSTSITPTSTTTFAVPSVPSGEASNRIPGGVDLLAAPSDAFSTSTTLSMPTSNTTTTSNKDIGQVESIVLPADQEHDGLVHLVTSSLSDNDSDDSSTTLNGFNAEADLAQLLKVDAFWPVYDGSIELLPPLFSHRKVAPPLSADQDVKTKHAVDAAEKVGAELEEEVGEEEVTATDILPSEEDEYTTETATTTGDTTVAEASMDTSTATSTSGQSSPHPPEEPEIDERENRLVLIKSKVQPVQLTTTTSATATTAADVANSSSSTDRFHYQHFVEDESSTTTATPEPSSSTPGDPIEQSDMPASDNDNLMTNTIGGRGDDDDDGGHKATSEIHVQQELRLINELVKGKQRQQHQPQKQQLEPTSTEITSALTSTSTEDATTTTTTTTAYTNWSKVMPQLGQSTSETAATTETVATSGQVNEISLTATSASTEVKHFSITNRSYRNSKIIREDRLTVEPEGIVESAASTESAGTAATTPNSSSNPDGYTPLWWLPSIGWRLDRHLDGNGEDQSLLLRFFSTFRGSNTAATTR

SEQ ID NO: 11098 - DNA, 3384 bp, DROSOPHILA
gcatggatccagccaagtaagttaatagctatagacttaaatgataagaactatcagttcattgaggtgtgtccttagtgttagctaccacgacagttgaaagtaacttgtttattatttataatttaacaatatttctttccgtagactcgctgagaactctgtaaacctgaacctgaaactaatgaagtggcgccttgttcccgatctcaatctcgaaatcatctcccaaacaaaatgcctgctctttggagctggtactttaggatgcgctgtagctagaaatctgctggtgtgcttttatacgaaatgatttaactgatctgataactaatagtttatttattttgtagtcctggggatttaagcacataacccttttggacagcggcaaggttgggttctctaatccagtgcgtcagaatctctacacgcatgcagatgctgtggcaggcaatcggatgaaggcgactacagctgctcagagattgaaagagatcaatccgtctgcggaaacggcgggttatgtgctggagattcccatgcctgggcatactattggagaatcgcttctagcccagacgaaggagcatttgaaggttatcgaaaagcttgtgcaggaccatgatgtcatctttctgctcacagattcgcgcgaaagccgctggctgcccaccctgcttggagcggcaaaggaaaaagtgggaacaatcatatactcacctttcagaagagatgtacctaaaatgtttcccttatagattgtcatcaacgcagctttaggctttgacagttatctggtaatgcgacatggcactacgcgtaaggaagcaggcgacgatggccaagaaatcgaaggacttaagtgcattaatggcgatcaattaggttgctacttttgtaacgatgttacggcccctggaaatgtaagtcccatttgttgtatagtttaagataacatttgtattttcagacttcattagttgggttaacatggttactaaacgcattcgtaatcatggcgggaatatttttcgaagccagcgcacgtaggatcccccgtctgcaggtgatccacaccagttatctgcactaccaggccatttatgctggtcaccttgaaacccactagattcatcatggcattaggtgtgcgccaggtgtagctgaagaagttataaccgtccactgcagtcaaaacctcgcgttccgtaaacgcaagcgccagcttgaattgctggttaaagacgaaggggaaacctccatgacgctcctcgcttccgaatctataaaaagaattagttaacgcccaaagaggtacggcattataaagttaacttactcaaaatttttgttcatggaattgcgcactactgccttctcatcgaaacgcacactgaagtgtagctcttcgcgcttggtatccgagtccatgaacttgattatgaactgtccctttttattctcgaaacaccgagctgtaaggacaatcacatggcccggactaaacaaaattggctgatcgttactgaacgccttaaagtagtccgaggcgtgaacggctggccacggatttggaaacacagtacgatgatccacctgtttaatgacttggatctgatcacggatctccagagcacgaatcgttcccaacggcatgcggtagcggaatctgcagaactctcggctatttatcgagatggcaaagctgtcctcgcaacaaagaatgtagaccaaaaagaactcgccactgacgatgggattgggcagggtgttggggtccatgacatgggactcctcctcgccccaggcgccgtttatccgggaatttcgaacgatcacatcgttccgaaaatagcatgagaagcgtagcccaatatctgcgttcggatcgaccgtgctcttggccgtgcagaggttaatgtggaacctatccgaaccaaatgatcacaatcgattagtcacgtactgataagaagcccaatttgacaagtaattagtcagaaaacggaaaagcggtcttacattaatgccggacaacacttacctggctgctccatcgatggtcttggccacgacctccagaacatgaccaaactccagcggatgcgatagattgccagcgaattcggtcaacatgattccttcctgcaattaccaattcaactaactatcgcctttgtactgaacaatcaagcgcaaaatgtgttttatagttccgtgggagagtccggagttctccggctctcccaaatgttaaaactttatctaatcagtgatgggcggagcggcgggttgctcaagtaaccgatacaaacgccgaagttttctatatcttgtgtttttggtttttaagcgctgctatttgttttgttctcgcccgaaggcgtcatctttgtttgctcggagcatgtgtttgtggacacagaaaagctttcaaaagctcttgatcgtactactgcaccggcgtcgaatgtgctccaaatcacactgaaaaaaactctgtataaaaaaatctcttatagactcgctttataaagttgtacgtacaaatttggatacagatactcattgcatttcgttctattccattttcagtcgctcaaagaccgaactttggatcaacagtgcacagtgacacgacccggagtatccaacattgcggccagctatgcggtggaattgttggtggctttgctgcagcatcctcgtaaggagctggcacccgcctactatgcacagagtgggcgtggcaggtcggaggagacggaagaaaaggtgccggagggtctgctaggaattttgcctcactccatccgtggaatgctgtgcaactacgagaatattctgcccgccactcaaaagtttgctcagtgcatagcctgttcagcggtaagatttgacaatcttttaaaatggttttgatagcgttttcaatattgttaaaattttttttttaatatattcgcttacaggccgtcctaaatgaatataaaaaagagggtcatgctttcctgtttaaaacttttgaaacagccaagtttctggaggatttgacgggaatctccgaattcaagcggttaaacagcgaggtttgtttgtttcctgtgtttaatctaatggagatatttaaaaattattcatatttttgcacagattatcgattttgatgatgaagaatttgacatgtccgatagcgacgaggattaggttccacaaaattggtcaagttttatcttcaaagcaaaatatcttaaatatgaaattcagcttattgtggctttaattttctgcagcatttatagttcaatgtctataccaaaaatgtgtgtacttcaatgcttttattctatctagtcgttaagcaaattgtgaatcattcaa

SEQ ID NO: 11099 - DNA, 1211 bp, DROSOPHILA
tcgggcgagaacaaaacaaatagcagcgcttaaaaaccaaaaacacaagatatagaaaacttcggcgtttgtatcggttacttgagcaacccgccgctccgcccatcactgattagataaagttttaacatttgggagagccggagaactccggactctcccacggaactataaaacacattttgcgcttgattgttcagtacaaaggcgatagttagttgaattggtaattgcaggaaggaatcatgttgaccgaattcgctggcaatctatcgcatccgctggagtttggtcatgttctggaggtcgtggccaagaccatcgatggagcagccaggttccacattaacctctgcacggccaagagcacggtcgatccgaacgcagatattgggctacgcttctcatgctattttcggaacgatgtgatcgttcgaaattcccggataaacggcgcctggggcgaggaggagtcccatgtcatggaccccaacaccctgcccaatcccatcgtcagtggcgagttctttttggtctacattctttgttgcgaggacagctttgccatctcgataaatagccgagagttctgcagattccgctaccgcatgccgttgggaacgattcgtgctctggagatccgtgatcagatccaagtcattaaacaggtggatcatcgtactgtgtttccaaatccgtggccagccgttcacgcctcggactactttaaggcgttcagtaacgatcagccaattttgtttagtccgggccatgtgattgtccttacagctcggtgtttcgagaataaaaagggacagttcataatcaagttcatggactcggataccaagcgcgaagagctacacttcagtgtgcgtttcgatgagaaggcagtagtgcgcaattccatgaacaaaaattttgaattcggaagcgaggagcgtcatggaggtttccccttcgtctttaaccagcaattcaagctggcgcttgcgtttacggaacgcgaggttttgactgcagtggacggttataacttcttcagctacacctggcgcacacctaatgccatgatgaatctagtgggtttcaaggtgaccagcataaatggcctggtagtgcagataactggtgtggatcacctgcagacgggggatcctacgtgcgctggcttcgaaaaatattcccgccatgattacgaatgcgtttag

SEQ ID NO: 11100 - protein, 321 aa, DROSOPHILA
MLTEFAGNLSHPLEFGHVLEVVAKTIDGAARFHINLCTAKSTVDPNADIGLRFSCYFRNDVIVRNSRINGAWGEEESHVMDPNTLPNPIVSGEFFLVYILCCEDSFAISINSREFCRFRYRMPLGTIRALEIRDQIQVIKQVDHRTVFPNPWPAVHASDYFKAFSNDQPILFSPGHVIVLTARCFENKKGQFIIKFMDSDTKREELHFSVRFDEKAVVRNSMNKNFEFGSEERHGGFPFVFNQQFKLALAFTEREVLTAVDGYNFFSYTWRTPNAMMNLVGFKVTSINGLVVQITGVDHLQTGDPTCAGFEKYSRHDYECV

SEQ ID NO: 11101 - DNA, 4508 bp, DROSOPHILA
gcaaaattaaaatcgaaaccagctgagctgttgccaagcggctttgttcggcaaatgccggatgaacaaagtctggtctttcagccagtcagtccgtccgtctgcacggcttcgttttatatcaaggggtggggtgggattgggttcggggttttcagagatatagccggggaatgagtaagcatttgcctcgccttttttgccttgcaaaaacattatgccaacgagcagaggctcactaaaaaaaaactactgaatttactactcggagcgcctattcagcggaaagctggtgatttgtacttcaaagttgaaaccgatgagggctttttccatttgcttacagtgaaaactcgctttcttttttcgcacaggtttcgcttttcatcgaacacccgacccgaacgaacagcagttggccaacagtctagttagtcaattttcgtatcgctttctgctgctttttttgcacactttccatcattttgtaacacactccgatcgcgaatttaacccagatacacctgaactagcgcagagagcaacggcgtctgtctcaaaaaaaaacatttgcgatccgatccgcgatcttcggtggattcggatccagttcgaaaacgatagcgcttttatcggcgctcggatggtgggtactatcgatatttctacagtcacgcaaatcgtgacatttcagcaagatagtttctacgtagaataccgtgtcaaatgtagatatttgaaactattcaagttaatatattgtaattataattataaacggtataaagtgaataacattttcaaaacaatttaccataattcgagtatataaaccattgtatgctgtagacattagacttggaaatgtaaatgctataatttattaaattcaaacaattacatttcattattgctgctgaagttacattattgggttaagaatgctaatgattttcatatggctagagctgtaataaacttttgccccagattcgttgacttattgagatcgctgaccgtaggtgtcattaaactttttctgtatcagttcataggcgctgtatactcttggggtttaaaataaaaccatgtaatataatatttacgaataaatattagaatactcacttgtcctcactctttgcctccccttcactcaacagatcgttgggagatatcaagatcgagttattgggatggcagaaatatgctatggagtgtctgccacgggttcttataagttcttgttcaggtatgacgacgcgatgaggctagaaaaggatatagataagattagtctaccggaaagttccagtttataggaataacctaccagggcgtggtaacgctgcttcgtccagatggacagaagttccccgccgtttataagtatggcaccaggtaaatgacccacccgttcccatttttcgctgcccggcaattgcacctccaagccaccttcggaatcctgggcgagcagcgtgaaggtgccgtagtccacatgggcaccacaacggatggcaccctcgctctggcccggctcatcatccacaatcgccggatagtagagcatcctgagggtggtcatgtttaggtcatctccttccaacatctgggagtgtttgtcgatgaagaaggacggcggaatctccagggccacctccatggccttcattatgtacaaagacatggctttcaaatccgtgcacagtgtggtaatgccttcggcaaattctggcagtgcctcccttggaatattctgtccatccagtttgcaaacattgtaggcgtgacgcagttctggagtacttccatcaaatcgctccatcccgggactaacatatccataattaacaccgtcctttcgtctgtaacgatcctgaacctctgctggcagatccaagaagttgtcaaattgatcccaaacagctttgatctaagattaagaaatcattgaaaatagcatagaaaagaaaatcaaaattaccttgtcctctgctatcccatggttaaccagaaacgcaattcccttttcggtgaaagccttgtggagttgctgacccacccgatggacaagggacttgcctagaaagtgtaagtaattattacaataaaatgtaaggagttccttaggctcttttttaatgtgtcgagagggtttggatgttatcaaggcacgccttaaaaagattttaatggtgcctgcacaaacccaaaccaatttttacatatgctggtacgtataactattattttaggtttttccttctaattaatttgcatttattttaataggctggtgactggaaaacttaccacaatgggcaagatcgatgatcggcacagaacttcgcgagacaagtgtttccaacttgtcctctcttatcttgctgtttatcattcttggtaaataagccccgcgtaggtaaatcaaatacaaatagattgcttctgaaaattatctggaaactcagagctccgaagagacgatgtgaacacgacaagccactccggcagactgacccaaacaaacgccggcatttgcaataatattattgtctaatcggtatatacatatcatacaagtaaccattgatgtaacatacttttgggtgtaaggaatatatagttgaaaagtaattcagaaaacatgcaataactacaatttattaaatattaaagtatcttgctaagaataatgatgtgcaaatgcgccttttgccagagccatagttatatcatatgcgttttgtattctaaaatataaaaccaaataagatgaagttaatatattcgtagtactttaaatcctgacttacacgtcacttgtcgtctgcttagttgtaatatttaaatcttttggattaatcagtgcagagttatcaggatgacagaaataggcaatggagtgccggcctcgatggcgaatatcaacctgatcgggaatcactactctatgttgctgttaaattaaatcaaatatgtaataagtgatcttaagccatgcttatagtcataccaaagcgtggtagaactgatctgtccagatagccatggtttcaccgcagtttatgaagagtgctcctggcagatgacccactcgctcccacttgtcactgccccgcagtttgacctccaatccaccctccgaatcctgagccaacagagtaaaggtgcagtagtcggcatgggctccacatcgtatgaagcttcttccatgatcctgatcttccacgggcgggtaaaacagcatccgtagggtggtcagattaaagcgatcgtcggacagcataaacgaatgtttatccgtgaagaacgaaggtggagcatccaatgaaattgccagagccttaagaataaacctacccaattcattgaagtcatcgactaaggagttaatgtgcctgctaaatcctggtagctgctgttcaggcagaaatttatcctgcagcttgcatatattgtaagcatggcgcagctccggtgtcctgccatcaaatcgctccattcctggactcacgtaaccatgattttcgccatctggagctttgcttctctcaaatgccaatttaacttcatcggtcaggtcgacaaagccatcgaaatacttccaagcttttttaatctgagtgattttagattcagttcttgatggtcaaaggttcattaaattgtataccttctcatttgaaataccgtggtttattagcagagcataccccttttcagataaagcctctctcagatttgtcgccacgtcctcgatggtattttctaaatctattataggaacagcattttgcaagagcagagtctcagtttctgatttcattgtttaaaaaagtatcttatcaagtgaacttattccaacctcaagcaaaataggactgaagtcaaaacaaagaatactattcttcaaagagattgtgtgagagattgtagcaatggttaatttttcatactatacttttgggttatcattgtaaagtaaactcccgtagaaaccgtgtcataaatcaagaactatttttaaccaaccaaataccagcatacaatcaatatggattatcaatccatagctatatagcagttatcatacgcaaataaatacaatcaccacttacatacatacgaatcgtttgtttattgtttgcaaataaaatatacaaaattacatttcatcatcgagttgggcatgacaataatgcggacagttcggcgcggtgttgtcgacaggcaaaagttcagagttcaccgattttggctcgccattcgcctgccctaacttgtcttcgactttcacagtccataggataaagtctaatcactaaactataatatttggtactattacactatcccaatacagtaggtgcaacaatctcttgccctctgcaatggcgactgatccaaacaagtacaaatggggccgctttcctcgaactaacaaaatactacgaaacaagcttacgcgactacagattgtataatatccatcttgacctatg

SEQ ID NO: 11102 - DNA, 1629 bp, DROSOPHILA
atggagcgatttgatggcaggacaccggagctgcgccatgcttacaatatatgcaagctgcaggataaatttctgcctgaacagcagctaccaggatttagcaggcacattaactccttagtcgatgacttcaatgaattgggtaggtttattcttaaggctctggcaatttcattggatgctccaccttcgttcttcacggataaacattcgtttatgctgtccgacgatcgctttaatctgaccaccctacggatgctgttttacccgcccgtggaagatcaggatcatggaagaagcttcatacgatgtggagcccatgccgactactgcacctttactctgttggctcaggattcggagggtggattggaggtcaaactgcggggcagtgacaagtgggagcgagtgggtcatctgccaggagcactcttcataaactgcggtgaaaccatggctatctggacagatcagttctaccacgctttgcaacatagagtagtgattcccgatcaggttgatattcgccatcgaggccggcactccattgcctatttctgtcatcctgataactctgcactgattaatccaaaagatttaaatattacaactaagcagacgacaagtgacgtaatgataaacagcaagataagagaggacaagttggaaacacttgtctcgcgaagttctgtgccgatcatcgatcttgcccattgtggcaagtcccttgtccatcgggtgggtcagcaactccacaaggctttcaccgaaaagggaattgcgtttctggttaaccatgggatagcagaggacaagatcaaagctgtttgggatcaatttgacaacttcttggatctgccagcagaggttcaggatcgttacagacgaaaggacggtgttaattatggatatgttagtcccgggatggagcgatttgatggaagtactccagaactgcgtcacgcctacaatgtttgcaaactggatggacagaatattccaagggaggcactgccagaatttgccgaaggcattaccacactgtgcacggatttgaaagccatgtctttgtacataatgaaggccatggaggtggccctggagattccgccgtccttcttcatcgacaaacactcccagatgttggaaggagatgacctaaacatgaccaccctcaggatgctctactatccggcgattgtggatgatgagccgggccagagcgagggtgccatccgttgtggtgcccatgtggactacggcaccttcacgctgctcgcccaggattccgaaggtggcttggaggtgcaattgccgggcagcgaaaaatgggaacgggtgggtcatttacctggtgccatacttataaacggcggggaacttctgtccatctggacgaagcagcgttaccacgccctgcctcatcgcgtcgtcatacctgaacaagaacttataagaacccgtggcagacactccatagcatatttctgccatcccaataactcgatcttgatatctcccaacgatctgttgagtgaaggggaggcaaagagtgaggacaaagtatacagcgcctatgaactgatacagaaaaagtttaatgacacctacggtcagcgatctcaataa

SEQ ID NO: 11103 - protein, 542 aa, DROSOPHILA
MERFDGRTPELRHAYNICKLQDKFLPEQQLPGFSRHINSLVDDFNELGRFILKALAISLDAPPSFFTDKHSFMLSDDRFNLTTLRMLFYPPVEDQDHGRSFIRCGAHADYCTFTLLAQDSEGGLEVKLRGSDKWERVGHLPGALFINCGETMAIWTDQFYHALQHRVVIPDQVDIRHRGRHSIAYFCHPDNSALINPKDLNITTKQTTSDVMINSKIREDKLETLVSRSSVPIIDLAHCGKSLVHRVGQQLHKAFTEKGIAFLVNHGIAEDKIKAVWDQFDNFLDLPAEVQDRYRRKDGVNYGYVSPGMERFDGSTPELRHAYNVCKLDGQNIPREALPEFAEGITTLCTDLKAMSLYIMKAMEVALEIPPSFFIDKHSQMLEGDDLNMTTLRMLYYPAIVDDEPGQSEGAIRCGAHVDYGTFTLLAQDSEGGLEVQLPGSEKWERVGHLPGAILINGGELLSIWTKQRYHALPHRVVIPEQELIRTRGRHSIAYFCHPNNSILISPNDLLSEGEAKSEDKVYSAYELIQKKFNDTYGQRSQ

SEQ ID NO: 11104 - DNA, 5022 bp, DROSOPHILA
tccacgagattctccacctcgctgacctctccgttcttgataatatcgaagatgtcgtccaaactcacggtggtggcaccatcgagcccctcaaagaggagcacattttcgtggtcctcgacgccgctactgccgtgtccaccgtccgtgccgcgacccgttaatggcggcgaatgcggtcgatgatccaaatggatgtcgtcggcgtgggcatggccatcctcctccgcgacgaccatgttgcaggaggaggaggcggttaggggcaacgcccacacactgcgcgccgcccccggacttggatgcaccttcgaggccatgtagaactcgaagtccacgcccagacggtccgccgttccaccgttgccttgatgcagggggttttccagtaggtgtgcaatcttgtcgcctttttccgttacgctccgaccgaaatttgtactctgtttggccaatcttaggcgtggaatgctaggtaaacacgactgcactcgatggcgaggaaattatgtcagcactgtgagaaaatcaatatttgtcccgaatcgcaggactcgaattggggccactttcgaactcgacttggcgccaaacaaatcaacagctgaccgttattttcgcagttgggcgcgcagtgttgccaacacatactggtaattaagacttttctcagcgaggggtgatttaagatttaagtcaagaagtattaaagaaaaaatatatatatttaatttgttggaaggtcaattgttgaaaccgaggtatcatttagcttaacttaaatatactagaaatctcgtggcataagcaaactaaaaaaaaaaggtttatcaactgacttttatattagttttaacattattgggaaacatttgttttccgccgctagaaacctttaaaatgtatactactatattgcttggtacgaatgttgcattttgaactgatgctagcattgcattttgtaaggttcccatgtctctgttattttgccacctggtaacactgtgcccctttttgataaatttgtttcgtaaaaaatgggcgacaacgtggtgacggaactaaataacttggatttgaacaatcaaaaggcatgttaaactcttttcgaactgcattcgagtgtatgagaagtgctagttagccgaattatgttgaagttggcgccgcagggcggcagatattatagccaaataagccgcatttgccagtggattttgccgaaaattcagacgcagtcgaagccaccaaaacaacaacaacaacagcaaccacaattgaaagaacaacaacaacacagctacgcaactttggttggtgttttaagctaaaaagaattgacctaaacttcaatttaaacgcctgttactgctggcacgtgtaaatgttatgcttgtctgtgtgagtgtatgcgattctccaatgaatcagtgccgccggctgtgacgtcactaacaaccaaccaacttcatgagtgtctgtttttttttgctactctattgcatcagccataaaacgacgaagatacgctcaaagacggctcgataaaacagagataggagcaccgaaaacatagcaccgaaaagtgctcattgccatgtccccaattgtttaaacaataagaaaacatcagtcgaaagtagataccgaaaaagagcatttgtctaattgcatacgtagcacacttgtggccacttgaatatctccggtttatattgatttttaacctatttccgatggatttgcaggctgccaagatgaagaaggagaaaaaggagaagccatccggcggtggagatactcgcaagggtaagtaattctaactaagaattaaaaacacaaaacgcacttccgtctgtaagatatgtagcatatctttaagattagctgccttcttctctctaatacctgaaattccactgatctctgctatattgatttcagaactcagtcccttgcccaagtacatcgaggagcgcaatgtcttctgggagaagtgcaaggcggaatacgaggccgaactggcggccaagaagcgtgagcccatcaaggtgacactgcccgatggcaagcaggtggacgccacctcctgggagaccactccgtacgaagtggcccgcggcattagtcagggtctcgctgacaacaccgtcatctccaaggtgaacggcgaggtgtgggatttggaccgtgtgctcgagggaaactgcaccctgcagcttctcaagttcgacgaccctgaggcgcaggccgtcttctggcacagctctgcccacatcatgggtgaggccatggagcgcatctatggtggacacctgtgctacggtccgcccattgaaaacggcttctactacgacatgcatctggagggcgagggtgtaagtaatttgtgatgttcagtaagaattaaattaaattgaacgcccaattagatctccaccaacgactacggcgccatggagggtctggttaagcaaattgtcaaggagaagcagaacttcgaacgtctggagatgaagaagtccgacctgctggagatgttcaaatacaatgagttcaaggtgcgcattctcaacgagaaggtgaccaccgaccgcaccactgtctacaagtgcggttctttgatcgatctctgccgcggacctcatgttcgtcacaccggcaaggtgaaggccctgaagatcaccaagaactcctctacctactgggagggtaaggctgacgctgagacactgcaacgcgtctacggcatctcgttccccgacccgaagcagctcaaggagtgggagaaacttcaggaggaggcggctaagcgtgatcaccgcaaaatcggtcgcgagcaggagctgttcttcttccatgaactttcgcctggctcatgctttttccagccgcgaggagcgcacatctacaacaccctgatgggcttcatcaaggcggaatatagaaagcgtggtttccaagaagtcatttcccccaacatctacaacgctaagttgtggatgacctccggccactggcagcactatgccgagaacatgttctccttcgaggccgagaaggagaagttcgccctcaagcccatgaattgtccaggacattgtctcatcttcgataaccgcaatcgatcctggcgagagctgccactgcgaatggccgacttcggtgtgcttcatcgcaacgagctctccggtgctttaaccggattaactcgcgtgcgtcgcttccagcaggacgatgcgcacatcttctgtgcccccgagcagattaaaagcgaaatgaagggctgcctggagttcctgaagtatgtgtataccattttcggattctccttccagctggtgctgtccacacgcccggataattaccttggcgagttggaacagtggaatgatgcggaaaaggcgctggctgaatcactcaacgagtttggaatgccgtggaaggagaaccccggcgatggcgccttctacggaccgaagattgatattaccattatggatgcactgaagcgtgcccatcagtgcgccaccatccagttggacttccagctgccaattcgttttaatctcagctacatcgccgacgatggcgagaagaagaggccggtgatcatccatcgcgctattcttggctcagtggagcggatgattgccattctcacggagaactttgctggcaagtggcccttctggctatcaccgcgccaggtgatggtcgttccagtgggtcctgcctatgatcagtacgcccagtcagtgcgggatcagttgcacgatgctggattcatgagcgaggcggattgcgatgccggcgacacgatgaacaagaagatacgcaatgctcagttggcccagttcaacttcattctggtggtgggcgacaaggagcgctcctcgaataccgttaacgtgcgcactcgggacaacaaggtgcacggcgaggtctccgtggcggaactcatcacaaagctgcaaaagattcgcgacgaattcatcgccaacgaggacagcttctaagactctatttcgaactatttatcaaaagtatacttaacatttgcatagcaaagcaagtacgcatttttgttctttctatgtatttacgcttacgaaaccggaattcacaaataaaaaaccaaatccaaacacattttaaggtgtttcaaatagaagagaagagcatgcaatcaaataaaagcaattcgattcaatatacgattattaagcttccccaactaaaaatcgtatttttctgatccaccttaagccgcctatttcactccagtttcttgacgaatcagtggaatttgtcagcaattgaggactagtcatgccgacacagaggtgcgctgtagtccattcaggaacgatttggaatgataagataagtcggcccacatttggcggaaaactttttgggaaaggtgtgcgtgcacccacaacgtatgagtcatgttttgaatttatttttttgtattaatttattgctagtatcttgtatacttttcattttcataatttgatttattaaaaattgcatcaatagtttatgtttttattcaattatcaattttgtaagcttttgcttttcgcgtaaaaaatgcacaaagttctctcgctaatcgaagcaaaaatcgttaataatattgttaagtgtttgctctgctcgtgctctgcttatctgtttcagttttagtcataaaaatacatattttatatttgtgtatatttattcataagatgcacgtggccaagtcctatgccatccacagttccagttagcagtcgcgttcgctgtgctaaaaaaaaaaccgaaatcctaaccaaaactggcgaaacaaaagccgcaaacagaacagaacgggggctaaaattggaaacaaaatgcctggctggtggaatcattgaacacagactggctgcgtggtatctacgactgctggagatgccgagagctggaatgtcggaggatcctgggaccgcctggcctgacataagtacatggtcttgggttttt

SEQ ID NO: 11105 - DNA, 2176 bp, DROSOPHILA
taacactgtgcccctttttgataaatttgtttcgtaaaaaatgggcgacaacgtggtgacggaactaaataacttggatttgaacaatcaaaaggctgccaagatgaagaaggagaaaaaggagaagccatccggcggtggagatactcgcaaggaactcagtcccttgcccaagtacatcgaggagcgcaatgtcttctgggagaagtgcaaggcggaatacgaggccgaactggcggccaagaagcgtgagcccatcaaggtgacactgcccgatggcaagcaggtggacgccacctcctgggagaccactccgtacgaagtggcccgcggcattagtcagggtctcgctgacaacaccgtcatctccaaggtgaacggcgaggtgtgggatttggaccgtgtgctcgagggaaactgcaccctgcagcttctcaagttcgacgaccctgaggcgcaggccgtcttctggcacagctctgcccacatcatgggtgaggccatggagcgcatctatggtggacacctgtgctacggtccgcccattgaaaacggcttctactacgacatgcatctggagggcgagggtatctccaccaacgactacggcgccatggagggtctggttaagcaaattgtcaaggagaagcagaacttcgaacgtctggagatgaagaagtccgacctgctggagatgttcaaatacaatgagttcaaggtgcgcattctcaacgagaaggtgaccaccgaccgcaccactgtctacaagtgcggttctttgatcgatctctgccgcggacctcatgttcgtcacaccggcaaggtgaaggccctgaagatcaccaagaactcctctacctactgggagggtaaggctgacgctgagacactgcaacgcgtctacggcatctcgttccccgacccgaagcagctcaaggagtgggagaaacttcaggaggaggcggctaagcgtgatcaccgcaaaatcggtcgcgagcaggagctgttcttcttccatgaactttcgcctggctcatgctttttccagccgcgaggagcgcacatctacaacaccctgatgggcttcatcaaggcggaatatagaaagcgtggtttccaagaagtcatttcccccaacatctacaacgctaagttgtggatgacctccggccactggcagcactatgccgagaacatgttctccttcgaggccgagaaggagaagttcgccctcaagcccatgaattgtccaggacattgtctcatcttcgataaccgcaatcgatcctggcgagagctgccactgcgaatggccgacttcggtgtgcttcatcgcaacgagctctccggtgctttaaccggattaactcgcgtgcgtcgcttccagcaggacgatgcgcacatcttctgtgcccccgagcagattaaaagcgaaatgaagggctgcctggagttcctgaagtatgtgtataccattttcggattctccttccagctggtgctgtccacacgcccggataattaccttggcgagttggaacagtggaatgatgcggaaaaggcgctggctgaatcactcaacgagtttggaatgccgtggaaggagaaccccggcgatggcgccttctacggaccgaagattgatattaccattatggatgcactgaagcgtgcccatcagtgcgccaccatccagttggacttccagctgccaattcgttttaatctcagctacatcgccgacgatggcgagaagaagaggccggtgatcatccatcgcgctattcttggctcagtggagcggatgattgccattctcacggagaactttgctggcaagtggcccttctggctatcaccgcgccaggtgatggtcgttccagtgggtcctgcctatgatcagtacgcccagtcagtgcgggatcagttgcacgatgctggattcatgagcgaggcggattgcgatgccggcgacacgatgaacaagaagatacgcaatgctcagttggcccagttcaacttcattctggtggtgggcgacaaggagcgctcctcgaataccgttaacgtgcgcactcgggacaacaaggtgcacggcgaggtctccgtggcggaactcatcacaaagctgcaaaagattcgcgacgaattcatcgccaacgaggacagcttctaa

SEQ ID NO: 11106 - protein, 690 aa, DROSOPHILA
MKKEKKEKPSGGGDTRKELSPLPKYIEERNVFWEKCKAEYEAELAAKKREPIKVTLPDGKQVDATSWETTPYEVARGISQGLADNTVISKVNGEVWDLDRVLEGNCTLQLLKFDDPEAQAVFWHSSAHIMGEAMERIYGGHLCYGPPIENGFYYDMHLEGEGISTNDYGAMEGLVKQIVKEKQNFERLEMKKSDLLEMFKYNEFKVRILNEKVTTDRTTVYKCGSLIDLCRGPHVRHTGKVKALKITKNSSTYWEGKADAETLQRVYGISFPDPKQLKEWEKLQEEAAKRDHRKIGREQELFFFHELSPGSCFFQPRGAHIYNTLMGFIKAEYRKRGFQEVISPNIYNAKLWMTSGHWQHYAENMFSFEAEKEKFALKPMNCPGHCLIFDNRNRSWRELPLRMADFGVLHRNELSGALTGLTRVRRFQQDDAHIFCAPEQIKSEMKGCLEFLKYVYTIFGFSFQLVLSTRPDNYLGELEQWNDAEKALAESLNEFGMPWKENPGDGAFYGPKIDITIMDALKRAHQCATIQLDFQLPIRFNLSYIADDGEKKRPVIIHRAILGSVERMIAILTENFAGKWPFWLSPRQVMVVPVGPAYDQYAQSVRDQLHDAGFMSEADCDAGDTMNKKIRNAQLAQFNFILVVGDKERSSNTVNVRTRDNKVHGEVSVAELITKLQKIRDEFIANEDSF

SEQ ID NO: 11107 - DNA, 3110 bp, DROSOPHILA
ttgcgctacttcgaggacatgcacctgcgttttctgttcctgcagtacccaagcattcgtaatctggaattacacttcattggaagaaccgttgggcgcatcgaccaagtggatatcaaattcagcgacaggagctttgaacaaaccgtggtgaaatgcttttaccccctgtcattttcacaatattcctgtattctaaatgtggatcccaccttgattctcatcatgcaacccgatttcttcggagtcggtaaagtaacccagagaatttctaggtatatgaaaaggaaggttccactcgaaaacgaatggaagccttgcttgtcaagtgttattcgatcttttggtgttcccatttgctacacttcgatttcaagggctcaggcaatttccgatttcgcggccatcacattgtccgctgagaagagcaagattgccatcgagagagcctacaatataatgggcaatccctatcgtgaaatattgccactgcacaatccagcaccagaagataccgagaggattgtgtatgccaataactacctcgaggttattttcacaagcaaaaaaaaatgccaatgactaccaaagactatataaggcttagtttagtacacataataccttcgacaatactgacatttgttattaaacagctgctcgtcaaatacatattctaagttacctgattactgccacaagtatcaagttagatgcattaaaactacccaagactgtagaataactacaattagttgataatatcgagaacagtattcagtttcgaacgcggctttgaatgtcgccctttaatttaaacatgtttgtttatccatttacatttttggtaattctttaagaataaattgtttaactagttgatagcctacatttgtaataagtataaatgctcagtttctcaatgcagccacttaactctacgaggaaaacggttacaataacttcagaagggttctttttaggatgtggaagctttgatctagaatgtcttcttggaaatgacaacaattaaatcgattaaccaatagaacgactggtggagatcaccctcgcacaagtacggcgccttggtccatgcctccacgcggtagccacagttctccagcagctccataaacctggccgcctcctcctcgaacgacgcctgtcgcccgttgttctccagcagcgggcgcagcggcagatgcgaggtattcgtctccacgtagtgcatgtagggaagtactaaggccacaactgctcgaccattgggagctagtgccaggtgaatgtcctcgagcagcttgaatgaatcgaagcagcggtccaatacgttgaggcacagaatcaattccaggttctgcagaccgtctatctcggtgattacgttgaagttcagcttcttcagccgatcgcgcatggtccaactggcctcggtggcgaagacccgcagcccggcacttccgctcagctcggaaacggtgttggccacgcgcagcgaaatctcaccgtccccggctccgatatccagcaacgtgacctacgatatgatggcagatgagtagtggtcaagactaaaggcttttactcatcttacaggttcttgaccgctggcaggctgaaagccgcctgctactagcagcttgcgaaactgttcctcggacagtatgaacatggagccgcgcttcaggaacccgttgatgtccgtctgggtcatgaagaactgcaggattgagcgagccagggcgtgccacaagtgggtccagatgtttgccgaaagcgccttggtgcgctccagccagctcacggtggtggcatccggctcgagcggcacgaacttggactggaatctcggcggcagctcgtggttcaggcagtaccactgaaatgcatccagaatttaggaaaaatcatattgtttcgggatttcgagttaccttccgagtgtctatgtcctccagagagttgtcgttgtggaatttggcgtggattaccctggccagggtgccgcggggacgatacacagccatgctaacagaatagtctataattgtgcttttatttacattttctacttctgtgtgtttaacttagttgtgccatcatttttccagtttgaagaactggagtacggtatttttccagggctggattgcagagttgcactttgatcagctgaatgcgattggtaaaggtatatcgatatgtaggcgtgacagcctaatgtaagtgtattattatttataatgtataatttcagaaattaattaattaatttgtagccgcataaaaaaaattaaaatatgatgttatatttgatttgccatttaaaagtataaatactttgtaatataaggaagacttttatatttatatctaataattgtactactcgctctgcaaacgaacgcacatcgttctcgacaacattgacgcctgttcgataacattggggcgcgatgcacgttgacattttatttagctgtcgagtaatgtatacaaaataagcggcggctattttttgttattttaatgaaacgcatcaatccgcgatgagcacgaacgttgttgtgagcatggaggagaaggcggtggccgacgacctgccgtacttcccggagaagtttccgggcaaggtgtgctgtttatgcaatctcggcgagaagagtgccttgggccagggcgagattctacaactgaaggcgcccgcgcccgccgagatcaaggataaatatccgacggatcggctgagggaggacggatccaggctgttatacgggcctaagcaggccgcttctagttcgggcgattgtcactacgagctggacaagattggacagccggacgtcgtgcatcccgccgaatttcttgacgaggggttcgtctacgtgcaccgcatgtgcatcatgtggtcgctgcgcaaaagtcagataagcgatgcagatggcgcgtactttgccacccacttcgcggagttcctggagcaaaagtgcaacttttgtggacgctacggggcctccatcaactgcaagatgaactgccgccaggtgcaccattggccgtgtgccgccgctgctgggtgccttctgatcctcgagagctttacggtc

SEQ ID NO: 11108 - DNA, 998 bp, DROSOPHILA
aaaaatgatggcacaactaagttaaacacacagaagtagaaaatgtaaataaaagcacaattatagactattctgttagcatggctgtgtatcgtccccgcggcaccctggccagggtaatccacgccaaattccacaacgacaactctctggaggacatagacactcggaagtggtactgcctgaaccacgagctgccgccgagattccagtccaagttcgtgccgctcgagccggatgccaccaccgtgagctggctggagcgcaccaaggcgctttcggcaaacatctggacccacttgtggcacgccctggctcgctcaatcctgcagttcttcatgacccagacggacatcaacgggttcctgaagcgcggctccatgttcatactgtccgaggaacagtttcgcaagctgctagtagcaggcggctttcagcctgccagcggtcaagaacctgtcacgttgctggatatcggagccggggacggtgagatttcgctgcgcgtggccaacaccgtttccgagctgagcggaagtgccgggctgcgggtcttcgccaccgaggccagttggaccatgcgcgatcggctgaagaagctgaacttcaacgtaatcaccgagatagacggtctgcagaacctggaattgattctgtgcctcaacgtattggaccgctgcttcgattcattcaagctgctcgaggacattcacctggcactagctcccaatggtcgagcagttgtggccttagtacttccctacatgcactacgtggagacgaatacctcgcatctgccgctgcgcccgctgctggagaacaacgggcgacaggcgtcgttcgaggaggaggcggccaggtttatggagctgctggagaactgtggctaccgcgtggaggcatggaccaaggcgccgtacttgtgcgagggtgatctccaccagtcgttctattggttaatcgatttaattgttgtcatttccaagaagacattctag

SEQ ID NO: 11109 - protein, 305 aa, DROSOPHILA
MAVYRPRGTLARVIHAKFHNDNSLEDIDTRKWYCLNHELPPRFQSKFVPLEPDATTVSWLERTKALSANIWTHLWHALARSILQFFMTQTDINGFLKRGSMFILSEEQFRKLLVAGGFQPASGQEPVTLLDIGAGDGEISLRVANTVSELSGSAGLRVFATEASWTMRDRLKKLNFNVITEIDGLQNLELILCLNVLDRCFDSFKLLEDIHLALAPNGRAVVALVLPYMHYVETNTSHLPLRPLLENNGRQASFEEEAARFMELLENCGYRVEAWTKAPYLCEGDLHQSFYWLIDLIVVISKKTF

SEQ ID NO: 11110 - DNA, 4455 bp, DROSOPHILA
atagcagtcgaatggagacggcacaatgcccactgcgttctgcaggaacttcaagcttttgtagagcttctccgagttcatggtgatgccacccatgaccacatccgtatgaccgttcatgtacttggtcagggagtagcagaccagatcagcgcccagctccaagggtcgctggaagtaggaggtcaggaaggtgttgtcgacggccaggacgatatcctcgcgtactccatggaccagctgcgcaatagcctcgatgtcggctacctttaccaatggattagttggtgactcgatccacaccaacttggtctccggcttgatggaacttttaattagatccaacttcgtgggatccacaaaggtggctgagattcccagacgggtggcaacctgtcggatcaaacggttggtgcctccgtaaacatcgtcgcccatgatgatgtgatcgccgctgctcagcatagttagcacagcggtggtggctcccaatcccgatgagaacgtgaggccgtatttggcattatccaaggcggcgaagcacgtctccagcacgttcctagtgggatttccactgcgggagtactcatagcccctgtgctcgcccggtgcatcttgcttgaaggtggtgctcagcgatatcggcggaatcacggcagcactcttccactggtcggggctctggcccgagtggatggacttggtggcgaagccgctcggctggactctgtagctcatcttgtctgggtaggaggatcgttgggaactgactgacacgtggagagagaccgtcgcgaatatatatactcctgccagatgttatcgcctagccggtaattaaatatttcgaccgttacaacactacattcgccgacagtgatggagctctagctattaaacggctagaaaacggaacccttcaaaagtaacgatacatatatgcattgaaacgatggatattcttactttccttagaacttcttcgattatttatacaataatttatttgttgataaagcacaataatattacaatcgcagcttaagagtaaatacgatactgaacagaaagggacatgcggaatgggttgggaactatactccaaggtctaccacagtttgtcgctgaacacgatctccttgaagatgcaatcctgcttggcgatgctgaccattgccttcttcgacttcatggcatcctgcaccttctcgcgcacctcggccgccttcacatcgttgcgaatgtaaaagagccgtaccaggtggtcctcgttcagagacggatagctgcccagcaaggtgtgcaggtccaagacgagcagttcgatatccgagctaagcagtgccgatagcgtggatataagatccaatggagagtcgctgagggaaatcttcggcgcgattttctcaaagaagagcttaaaccgcttggcttcggtcttgatttttcgcgtaatggcatcgcactcggcccgtggcttagacagtcgcttggatagcagtgccctaatgtagcgcttggccagcagcttctgggcctcgttgatgaccatctcgaagttattgggtcgcaggtgattatagtcctggaagtaatcgtccagcgttacacaaatggtgtccacggcaatgttactggccagccacttggcagtgaataggtcgttaaagtgacactccatgtccaggaaggcttcctccagcaagtaacttgcggcatgagcccggatccgctggaatgtggcaagcaaacgttcgaaatcctcataatgctcagtacgtgacttgggccagtagagttgtttcatctgctgcgccagttcaaccatttgctgactgttattcacgatggtgatgatgtagtgagtgaagtatttgatctggtcccgattgcgaaaatggtgttccttcagctcgattacgttcttaagatatgtctggccaaagatctccacctgctgaatgctcattaccaacgccttgaacgtcagttcctgatgaattgtgttggtcacctgcagatgctggtcgatcatctggaatatgatgacaggcgctgaagtgtggtagtactcctcatcctgatcgggcaccgtctcagtaaaccactcctgcttctccgtttctgcggccttggtcatccattcctggaagtttctctgcatattttgcagatattcatcttccagcgctttgagatgttccggacgcagcagagtacctatctgtcggtgtacatccacattaagatccggatgggacatcagctcgacgccaggataggtgtgtgtaacccaagccatcattgatacatattcattgccctccaagcccgagcgcacaatgttgtcaagctggaattagtaaatattagtggtataaaaacattaatcaatttaaatgattgacgattactcacatagctagaaagtccttcgtgatagaacttgacatattcgccgaaaatgtcgtagtgcggcgggaagcagggcacacaaagggacttcacaacgcgcagatcctcgagaatgatttgacgcaatatctccaggtctcgtactaaccacatcttgttatcggcccgctcctctagcttggatccctctatgcgcgttatcaccgactgttgtagcacgtccatgatcatgcggcgccaagcctttggtcttccaggcggcaggaatcctgtgaccttttgctgctgcaacgcgaactggtcgtttttctcttcccgctctatgatgcgtagggcggtaacgatgatggtgggcttcttgcgcagagtgttcagcgtgcggctaagaatgagtcgcagctttttctccagctcttgggataccgtgtcaaccttctcgaagtgacgctttagggtgatcttgtcggacgcatgctgcttgggctgcttgtgcagttcgtagagaagatcatcccgcgaattctccagatccgccaggcactgatgggcattaagcagcttatcatcctcgatcagcgccatcgtcttttgtacgctggcatctacgttgaagatgtgcttcagattctccatggcggtggcgtactgggagtgctttgtgttttcctcccgcacaacttccaaagcgtcgtagacttcgggaacgcccctcagcaggcgctccacctcgtccattcgacgccttacctcgcgcacgtcctgcatgcaggtctccaactgcttaagtcccaccctgaccccgtccagctgtccttgcattccggtcttaaggagcgcctcaacggatgccttcttccgggcgattcggtggcgatattgttccaccttctccagttgacctggtcgctgcaacatgttctgtatgtccttgagcgctgcctggcgagcctgctcctccagctgctgtaaatccatcttcaatttatttggatcactttcagtctctgttttggtcaatcttcgtcagcagtggaagtgctggtgtgaccatatagcagtgcggctgacaatctcacttccaagaactacagtgtaacttgacaataagctatattctactcttaaaattattatagttttattgtgtcttaaaatttttattttattcttcaagcttaaaaaattatgaagttaaagtatatcttttagtttgccaaagcaacagaggattcgacctaagtatggaaaactgtacttatcgataagttatcttctcattggtctatcgccatcgagagctttgtttgtttataatttgcagccaaacgtttgaacgtaaacaacgccctaagcaaaacatgagcacggaaaaagagataattttgcaatttgctccgtgggaatcttttgtgtcgcccactttctggcacaagctagcggagcttaagctcgaccacgatcgcctgtccgactcgaaacgctccattactggacactacacaaatcgtaatgcaagtggatgccttttggaagtagactacacggcctacaacaggtgagcttgaaaactacgagtttgatgaaaccagcgcttgaccacccacattccagaatggcaaagcctccaaaattcagccattccgctataggcaccatctacaataagaacacaatcgaagagttcaaggccctggacaaattacaactgctggccgatgagggcaaggaactgctggctgatatgtgcagtggtggcgccttgagagatcccagtctattgacccggttctttgttctctcctttgccgatttaaagtgtcacagctactactattggttcgcctttccgtgcccgctgacgcccaccttaaagcttcagggagccgtccaaaaactgcgggacttgcccaatagtagtagctatataatggctctaaaggccttacccactgagtcacagaacttcttcattctgtatgctaatgtggagaagaacattttcgaagcccgtagtttaagttcccttgacgataaaaatgt

SEQ ID NO: 11111 - DNA, 2219 bp, DROSOPHILA
agcacttccactgctgacgaagattgaccaaaacagagactgaaagtgatccaaataaattgaagatggatttacagcagctggaggagcaggctcgccaggcagcgctcaaggacatacagaacatgttgcagcgaccaggtcaactggagaaggtggaacaatatcgccaccgaatcgcccggaagaaggcatccgttgaggcgctccttaagaccggaatgcaaggacagctggacggggtcagggtgggacttaagcagttggagacctgcatgcaggacgtgcgcgagtacgccaccgccatggagaatctgaagcacatcttcaacgtagatgccagcgtacaaaagacgatggcgctgatcgaggatgataagctgcttaatgcccatcagtgcctggcggatctggagaattcgcgggatgatcttctctacgaactgcacaagcagcccaagcagcatgcgtccgacaagatcaccctaaagcgtcacttcgagaaggttgacacggtatcccaagagctggagaaaaagctgcgactcattcttagccgcacgctgaacactctgcgcaagaagcccaccatcatcgttaccgccctacgcatcatagagcgggaagagaaaaacgaccagttcgcgttgcagcagcaaaagtcggtgataacgcgcatagagggatccaagctagaggagcgggccgataacaagatgtggttagtacgagacctggagatattgcgtcaaatcattctcgaggatctgcgcgttgtgaagtccctttgtgtgccctgcttcccgccgcactacgacattttcggcgaatatgtcaagttctatcacgaaggactttctagctatcttgacaacattgtgcgctcgggcttggagggcaatgaatatgtatcaatgatggcttgggttacacacacctatcctggcgtcgagctgatgtcccatccggatcttaatgtggatgtacaccgacagataggtactctgctgcgtccggaacatctcaaagcgctggaagatgaatatctgcaaaatatgcagagaaacttccaggaatggatgaccaaggccgcagaaacggagaagcaggagtggtttactgagacggtgcccgatcaggatgaggagtactaccacacttcagcgcctgtcatcatattccagatgatcgaccagcatctgcaggtgaccaacacaattcatcaggaactgacgttcaaggcgttggtaatgagcattcagcaggtggagatctttggccagacatatcttaagaacgtaatcgagctgaaggaacaccattttcgcaatcgggaccagatcaaatacttcactcactacatcatcaccatcgtgaataacagtcagcaaatggttgaactggcgcagcagatgaaacaactctactggcccaagtcacgtactgagcattatgaggatttcgaacgtttgcttgccacattccagcggatccgggctcatgccgcaagttacttgctggaggaagccttcctggacatggagtgtcactttaacgacctattcactgccaagtggctggccagtaacattgccgtggacaccatttgtgtaacgctggacgattacttccaggactataatcacctgcgacccaataacttcgagatggtcatcaacgaggcccagaagctgctggccaagcgctacattagggcactgctatccaagcgactgtctaagccacgggccgagtgcgatgccattacgcgaaaaatcaagaccgaagccaagcggtttaagctcttctttgagaaaatcgcgccgaagatttccctcagcgactctccattggatcttatatccacgctatcggcactgcttagctcggatatcgaactgctcgtcttggacctgcacaccttgctgggcagctatccgtctctgaacgaggaccacctggtacggctcttttacattcgcaacgatgtgaaggcggccgaggtgcgcgagaaggtgcaggatgccatgaagtcgaagaaggcaatggtcagcatcgccaagcaggattgcatcttcaaggagatcgtgttcagcgacaaactgtggtagaccttggagtatagttcccaacccattccgcatgtccctttctgttcagtatcgtatttactcttaagctgcgattgtaatattattgtgctttatcaacaaataaat

SEQ ID NO: 11112 - protein, 681 aa, DROSOPHILA
MDLQQLEEQARQAALKDIQNMLQRPGQLEKVEQYRHRIARKKASVEALLKTGMQGQLDGVRVGLKQLETCMQDVREYATAMENLKHIFNVDASVQKTMALIEDDKLLNAHQCLADLENSRDDLLYELHKQPKQHASDKITLKRHFEKVDTVSQELEKKLRLILSRTLNTLRKKPTIIVTALRIIEREEKNDQFALQQQKSVITRIEGSKLEERADNKMWLVRDLEILRQIILEDLRVVKSLCVPCFPPHYDIFGEYVKFYHEGLSSYLDNIVRSGLEGNEYVSMMAWVTHTYPGVELMSHPDLNVDVHRQIGTLLRPEHLKALEDEYLQNMQRNFQEWMTKAAETEKQEWFTETVPDQDEEYYHTSAPVIIFQMIDQHLQVTNTIHQELTFKALVMSIQQVEIFGQTYLKNVIELKEHHFRNRDQIKYFTHYIITIVNNSQQMVELAQQMKQLYWPKSRTEHYEDFERLLATFQRIRAHAASYLLEEAFLDMECHFNDLFTAKWLASNIAVDTICVTLDDYFQDYNHLRPNNFEMVINEAQKLLAKRYIRALLSKRLSKPRAECDAITRKIKTEAKRFKLFFEKIAPKISLSDSPLDLISTLSALLSSDIELLVLDLHTLLGSYPSLNEDHLVRLFYIRNDVKAAEVREKVQDAMKSKKAMVSIAKQDCIFKEIVFSDKLW

SEQ ID NO: 11113 - DNA, 3680 bp, DROSOPHILA
actggaatgatcgattcatcatcgatgagctgccttaaaaatataaactccatagcaacccttgcattcgttgaacataaatttcgaacctgaaaggaaattctatatattgcataatgttggattcaactagaagttttgtgctgttccagctactgttgctcttcgcggttgtattgatctatcttagatccacatacccgggcagcttggagccgcaggaagtggaacacctgaaagagcctccgccggcagatcgtttagttgtactcgtaagggacggattatctgctcagtcttttctggccaatcgttgcaccaacgtgccactgttgcgggaactctttctgcaccagggactggtggggattagtcgtccggagacaattacctaccactcgatatcgccatatatttccttgttttccggattcaatgaggatgcagccagcgtggcacgaggctggctaggaaccccagcatccattgactctatattcgatcggtgtaaacgcagttttgcgtggacaacgacagagctaatctcacgctttcccaaaatcgaaagacccagggaattgtcttttgagacatatggagaaggagttacgaagtcgtgctccgaaatggaagatttcgtatgtcggtctgttcaaagatttctgggcggtggatcccgcctcttgctaaataccacaggagtcatatttttcattcacatgaccggtgtggagccatcctgtgaaagcctgcaacggattcaagaaaacgtgtggaacgtctacaaaagttttgagaaaacttttcccgatcaaagaacagcttacctattcacttctaatcttggcgatccccaaacgaaaagtaagattaaaccattctatttaagtactaactaagtgtcctgttctcaggcgagtacagtctggcagttgaatccccgttttttctttggggatctggagtgaatcacattaaatccatgcccgggcgcagctttatggcgaacgaggcgggattaaggctgcccttgcatgtccttaatactcctcacctgacagccttgatgagtgcccttctaggagtcccaccaccggtctatagccgcggaatgctgcccaagggaatgctcaacgccagtttgcgctacgaggccaacgccatgctgattaatgccaagcagctcctggcacaggctcgccggctgagggaactccatcccaaaaggatgcccgccttctggctaagctttcagatgatggacaactttgtaaaggagtctttggccctcaagaagcagcgacgtttcagggctctcttggattatagctgcaattacatgcccgtgctgatcaagggaatggactattttaaggattactatagacatgtctcgattacggcagtgagttttgctggaatcgcttggatatattgcctgcgctgtcatctaacagttggtaaaaagtgcagaaatctaatagaaatccaggaggtaatctcctccaagcgtttggtgtatgcccgaggatttcatcgattgctgacaggtgtgctcgtgattattatgatgctcgaaaggattcctctggtggtacaggcgatcctactcataccctcactgtactggaggacgacgcttaaaattttgggagagagaccaaaaatggtatgccgtaagagtttgatgtccaccgccttactggcattaatctgtttcggtggcttcttccgacgctacatcctggcagtgggctacttgggatttgcttcctataacaacagggaagccttcaagagaaggggacaccagttctacctgtggctactactgctccttggactcaccgttgtgtcggctcttccggaatcgctgggctgttcccagcccggagccctcatgtttagtatctttcttactgtactgcgtcctttggcctgtggcgtgtaccttaaccttctcacatggctgagtaatataccggttctccttgctgccttggagtacatcctgatcggctggcatccgtggatcatgtacttggtatcctggatctatttgggatttcttgtcctttggcagcgtcgcaatctgcaggccagcgaggtgttcttcttcgacctgagcacactatacaccctcacctgcacctcttatgaatcggtggtcatccaaatgctggccatggagttacagctggccttgcggatgaaactgaagagaaatgaaagcattggtccaaagacagccgcccactacatactagtgtacagctggtactcccttttcatcattggcagcttcccggccttcgatgacttcctggatatcttgcacgagacatgttttggatactcacctctcacttacggcctggttatggtgctgaagctaatccttccctggctgcttgtgctttgcatcatggcgggaaactacaagagtctggcctcatacgaacagcaaatctttgtgagactattgcttatgaatagtgccatgtcgctggtgcttttgcatgggattacaaatgttggtccttggcgggatatcctcagcagattcgctgagtttgcggtagtccatgtgtttccacttgtctggctgctactgtggcgattgacacagcttaaagtgggctccaagtggatgtcccagctcccgaatgaattactgtaaggtcactgaaattgttttaataaagcgaagaaggcgccataaaactatttaaaactctggcagcctttacaaaaaaagcgtaaacttgaacgttgccacctggtttttgctctacaaagtatcgataacttcagcgactatcgcacagtagtcgcttcgttgccatcgccaatctcgctctcccttattttgcatagaaaataaacaaaaagctctgcggaaataatgttttcaccttaaaatccaacacatttgtgctggcgcaagtgtgggctggaaaatccaaacgacaaataaacccaaaatcgccttaaaccttaatatcgcctattgcgcattccacggcagcaacaataccagcagagcagcagcaacaacaacaacgagaagagcatagcaaaaggtgaggcaaaaagtttacatgtgaatgtgggggcgggcggtgtggcaacggttagctgttaataacaacaattgccccgtattgttcacacatacatacgcacccacacttaggcactggtttactcattttggagcgcataggcaaaatggcagccaaatgtcagttaagttaagaaatgaatgggcccaaatagttgggtctccaacgcgccaaccgccccctaccccaaacgcccgcccacccactgaagtgacgcgccgctgccgagatatgtatgcgatcttgctttatatcacccgcgactcgataagggttctcgtttagtttcgttccgtttccccgttccgcgatccgtaggcctccaaggtcgcattttgtcggctatcttgcagcctttgctagattgcatttgtgttcgtgtagtgcgtttgcattgagatttcccccattcgctgatttgccaccctttcttagagagggtatgatgtttcggaactcaacacgggattgaaattataacagacactgatcagttacttcgaatgcaaattcaaacgagctaaactattcagtcttaaaaatgtttaaaaggct

SEQ ID NO: 11114 - DNA, 1680 bp, DROSOPHILA
atggcgaacgaggcgggattaaggctgcccttgcatgtccttaatactcctcacctgacagccttgatgagtgcccttctaggagtcccaccaccggtctatagccgcggaatgctgcccaagggaatgctcaacgccagtttgcgctacgaggccaacgccatgctgattaatgccaagcagctcctggcacaggctcgccggctgagggaactccatcccaaaaggatgcccgccttctggctaagctttcagatgatggacaactttgtaaaggagtctttggccctcaagaagcagcgacgtttcagggctctcttggattatagctgcaattacatgcccgtgctgatcaagggaatggactattttaaggattactatagacatgtctcgattacggcagtgagttttgctggaatcgcttggatatattgcctgcgctgtcatctaacagttggtaaaaagtgcagaaatctaatagaaatccaggaggtaatctcctccaagcgtttggtgtatgcccgaggatttcatcgattgctgacaggtgtgctcgtgattattatgatgctcgaaaggattcctctggtggtacaggcgatcctactcataccctcactgtactggaggacgacgcttaaaattttgggagagagaccaaaaatggtatgccgtaagagtttgatgtccaccgccttactggcattaatctgtttcggtggcttcttccgacgctacatcctggcagtgggctacttgggatttgcttcctataacaacagggaagccttcaagagaaggggacaccagttctacctgtggctactactgctccttggactcaccgttgtgtcggctcttccggaatcgctgggctgttcccagcccggagccctcatgtttagtatctttcttactgtactgcgtcctttggcctgtggcgtgtaccttaaccttctcacatggctgagtaatataccggttctccttgctgccttggagtacatcctgatcggctggcatccgtggatcatgtacttggtatcctggatctatttgggatttcttgtcctttggcagcgtcgcaatctgcaggccagcgaggtgttcttcttcgacctgagcacactatacaccctcacctgcacctcttatgaatcggtggtcatccaaatgctggccatggagttacagctggccttgcggatgaaactgaagagaaatgaaagcattggtccaaagacagccgcccactacatactagtgtacagctggtactcccttttcatcattggcagcttcccggccttcgatgacttcctggatatcttgcacgagacatgttttggatactcacctctcacttacggcctggttatggtgctgaagctaatccttccctggctgcttgtgctttgcatcatggcgggaaactacaagagtctggcctcatacgaacagcaaatctttgtgagactattgcttatgaatagtgccatgtcgctggtgcttttgcatgggattacaaatgttggtccttggcgggatatcctcagcagattcgctgagtttgcggtagtccatgtgtttccacttgtctggctgctactgtggcgattgacacagcttaaagtgggctccaagtggatgtcccagctcccgaatgaattactgtaa

SEQ ID NO: 11115 - protein, 559 aa, DROSOPHILA
MANEAGLRLPLHVLNTPHLTALMSALLGVPPPVYSRGMLPKGMLNASLRYEANAMLINAKQLLAQARRLRELHPKRMPAFWLSFQMMDNFVKESLALKKQRRFRALLDYSCNYMPVLIKGMDYFKDYYRHVSITAVSFAGIAWIYCLRCHLTVGKKCRNLIEIQEVISSKRLVYARGFHRLLTGVLVIIMMLERIPLVVQAILLIPSLYWRTTLKILGERPKMVCRKSLMSTALLALICFGGFFRRYILAVGYLGFASYNNREAFKRRGHQFYLWLLLLLGLTVVSALPESLGCSQPGALMFSIFLTVLRPLACGVYLNLLTWLSNIPVLLAALEYILIGWHPWIMYLVSWIYLGFLVLWQRRNLQASEVFFFDLSTLYTLTCTSYESVVIQMLAMELQLALRMKLKRNESIGPKTAAHYILVYSWYSLFIIGSFPAFDDFLDILHETCFGYSPLTYGLVMVLKLILPWLLVLCIMAGNYKSLASYEQQIFVRLLLMNSAMSLVLLHGITNVGPWRDILSRFAEFAVVHVFPLVWLLLWRLTQLKVGSKWMSQLPNELL

SEQ ID NO: 11116 - DNA, 2828 bp, DROSOPHILA
aagaaaccggcgtactacttcaagaatatgccaccgggtaacacgctgggatcgcccgaaatcaaaagccaggttcagattgatgccatgcgtctaagcggcagactggcggccaggatactgcgcgaatgcggtaaactagcaacagttggcacaaccaccgatcagattgatgcctttgcgcatgaaagaattctcgagtccaaagcgtatccgtcgccgctgagatacgccggcttcccaaagtccatttgcacgtcgatcaacaatatcgcctgtcacggaattccggatgaccggcagttggccgatggggatattataaatattgatgtcacagtctttttgaacggctaccatggcgactgttcggaaacatttcgggtgggcaacgtggacgaacggggtggctttctcgtggaggccactaaatcctgtttggatcagtgcatttcgctgtgcggccccggtgtggaattcaatgagattggaaagttcatagacagatattgcgacgaacatgatctggcatcgatagctgctttcattggacatggaatcggtagctatttccacggccccccggagatactacactattgtaagtaagactgtttaagagactcctccattgctaatcaaactgcacatcgtagataatgagattcctggaaagatgcagcccggcatgaccttcaccattgaacccattctgtccctgggcggagcagaaatagcagtgctgcaagatggctggacggccattagtttggatggcgcacgtagcgcccagttcgagcacaccattctgataaccgagacgggaacggagatacttacaagagatcaatagaattttatgtacatgatgcaatttttattcgtgattcccataaagtgttgaatgagtgctggatggcagtcttgtgcattttgtgccgttttaatcgtcgactccgtctggttaggtgctctaattgattgatgatgcatacagaatttagctacaaatcgcattggacttctgcaccggcttctgaatgggaaggaagagcttaaactccggcggcagctcgtcctccgagtagagacgatcggagaagtagacgcgtctgatgcggcaatttgcatgaatctgtacacggagtgtctccacataattggtgccgtatgcgcgacgcgtgaagtcggacaggttgaactggatctggttccatccctcgtccaatcgcatgggcatggtgcaaatgaaaggcttgacacgagttgtcgactggtagttactggccctaaaccttcgccgcacgttcttgtcatcgagaacctgattaggggcggaaatcatggagttactgtcttatgcaagatgacgaagcttacctgaacctcgaaggtgaagtacttcttcatgttcttgatgatcatcaccaggaagggcagcttgatgcccagcgtcttcttcggatctgccggacatgttatgaacgtggtgctgacattggtgccgactatttccaacacgaggctttgtatgtcgttgtcggtgatccgcttgatgtgtccattgcgcaccttcttatcccacagctgcagtggctttgagccaatactgtacagaattgataggaatcccgattggaaagtgtttttgaacatttcgcgactgctgtgcagtgaccggttcgccccacggagagtatagtctcttcgaaatttatatagggccagttaaggttggccgtaaatttttcgcacagccgaaactcgtacaaactacgaacatcaatgcggaacttgattattttctcatgtcaatgagtttgtttagcacggcatcctgttgttgccataacaataagcgagcagggttgccacgtttccaaatgcttgaacatgctcgcatgtttatgtggggtgcgaaattgcgaagttgaaggcctgtctcgcttatggaacggtgaaaaagaaacagcttaaaaaataaataataacatgcgttaatttggaattggctagacaaaaaacatctattattgttaaaaatttttatttatgaattaataacttttaatcaagttaaaatggtgcttattattaacagcatggaaacttaaaatatagaacattaattgtgaaagtaaaacagattgctaaaatgctaaaggtggttaagttattattaacagcaagaaaacttaaaatacagaaaaataattattaaagttgactttcccatattccgatttctgtgaagcaaaaacctaagcagctatcgagttatcgggcaaagtcacatcaccagttgatgtgagtattaaaaaaatatatagcttacagagtacaaatggcatcgacatcgaggtaaaagtcgggtttcctaacaatttgtgaacaccaataatggcttactgcttgcagactggacaacaacaaggtgtgctgctacgcacaccccgaatctccgctcatcgaggactacagggctggcgatatgatttgctccgagtgtggtctggtggttggggaccgcgtaattgatgtgggctccgagtggcgtacctttagcaacgagaagagcggcgtggatcccagtcgtgtcggtggaccggagaatccgctgctcagtggcggcgacttgtccaccataattggtccgggcacaggatccgcatcctttgacgcctttggagcacccaagtaccaaaacagacgcaccatgagcagctcggatcgctccctcatatcagcctttaaggagatatcctcgatggccgatcgcattaacttgcccaaaaccattgtcgatcgggccaacaacttgttcaaac

SEQ ID NO: 11117 - DNA, 772 bp, DROSOPHILA
ctaaacaaactcattgacatgagaaaataatcaagttccgcattgatgttcgtagtttgtacgagtttcggctgtgcgaaaaatttacggccaaccttaactggccctatataaatttcgaagagactatactctccgtggggcgaaccggtcactgcacagcagtcgcgaaatgttcaaaaacactttccaatcgggattcctatcaattctgtacagtattggctcaaagccactgcagctgtgggataagaaggtgcgcaatggacacatcaagcggatcaccgacaacgacatacaaagcctcgtgttggaaatagtcggcaccaatgtcagcaccacgttcataacatgtccggcagatccgaagaagacgctgggcatcaagctgcccttcctggtgatgatcatcaagaacatgaagaagtacttcaccttcgaggttcaggttctcgatgacaagaacgtgcggcgaaggtttagggccagtaactaccagtcgacaactcgtgtcaagcctttcatttgcaccatgcccatgcgattggacgagggatggaaccagatccagttcaacctgtccgacttcacgcgtcgcgcatacggcaccaattatgtggagacactccgtgtacagattcatgcaaattgccgcatcagacgcgtctacttctccgatcgtctctactcggaggacgagctgccgccggagtttaagctcttccttcccattcagaagccggtgcagaagtccaatgcgatttgtagctaa

SEQ ID NO: 11118 - protein, 199 aa, DROSOPHILA
MFKNTFQSGFLSILYSIGSKPLQLWDKKVRNGHIKRITDNDIQSLVLEIVGTNVSTTFITCPADPKKTLGIKLPFLVMIIKNMKKYFTFEVQVLDDKNVRRRFRASNYQSTTRVKPFICTMPMRLDEGWNQIQFNLSDFTRRAYGTNYVETLRVQIHANCRIRRVYFSDRLYSEDELPPEFKLFLPIQKPVQKSNAICS

SEQ ID NO: 11119 - DNA, 10565 bp, DROSOPHILA
acaaaaatacgatttagtttaaacgcgaattgccatgtcaactcacgggagcatgtgactttcgaataaaaaaaaaaaacaactaaaaagctcgcgtaactgtcgacaagtaaataattaaataatggaaattaggcgaagcttacgccgattacagtcgcctagaaaagtatgctgactagtcattattccatgatgcaatacctgataagttgacgattctcgcacattccacacagaatcttcatatgcgaatcccatgggtgacaatgagttgagcaactatttctgccagcgaccgtttgaagaacttatatgactgattcgttttattttggtttactaagttttcacactgtacgttgctagtagaaataccaagtacctaagatgttaccagtataagcatataaatcagctgaaagaagctcaatgttcaaaataaacaaatcatttggagagctcgctgcaatcgaagccaaaaccaaattgatatacattaaatgtccaacagaaacgctgagctgcagcttattttgtaacacaaatacaaactgagtgtctaataataataataatggtagtcagataattgttaaatattgaatgtattatgcatgtgaatagttgaaatcgattcattaaagcgcgaaaataaagagaattttaaaagcagaccacacgaaggtaattacaaattaatgcgaacattcatatattcatacgtaaactcggccacacggcattaaatatgaaatacaaataaaagtgacaaccggagaaaaatgttaattaacttgtgaacaatatttacaaacaacaaaaagtcagatagcacgaatcttgtggtcgattgtcggtcaatttcggaattgtactcagataccttccaagtttcacgagcaaaaaaaaaaaaaagaaacatataaggcgaaaccgaaagtcttcgacttaagtaaatgttaacatgtgcgtttttcagtggaaactatattaaattatacatatatatttattatacaaagggatatgtttacggtgtatgcatgtattgtatatagtatctcgatacatataaattaatgaaatgaagcaattacaatcgtatggaataaaagtaaaggtaataataaaaaggttcaaaacatcatcatatgagttgctgcttttcattttccccatccgttcccacaacgaacttcatcccagcttaggtagagatgcgatggatggctcgaccgactatggtctatggttgttactgcttatgagtgattgttactgctatacgtatctctaaactttttctgtatcaactgataggcattgtagactctgttcaatttacggccaccaatcgtcgggcgataagccaaaaaaaaaagaaagaaaagaaacaaagaactgcgagttagtacaggaaatggccataaaagtggagtgcaatttcacctttctttcgccgccttgaaggacttcttgcgctgcttgagacacgccttgtcctggacggcatctggattgggcagatcggtgggcgatatcgtggtgatgttgtccggatggcagaagaacgctatcgagtggcggccacgagcccgaatagtttcctgctccggtattatcacgcgatgttgctgggggtcgcataaaatagattagggtttttataaattacaaaagaattaactgattagaccagcttgaaagcaatttgatttgtggactttaaagacagtatactcaagaacttcaataaggaaaaatagttttttaaaagtcttcttgtatttgtatttttcacctattgccaaaaacagactcaaacctgctcaaatatgtattattttgcctctttgatcagcatttttgatatatacagctgtgttctagtagtatttgcacagttgtagcaatgataaggaaagcagactttactttaatcactgctgcaattcataatctagtttattggacactcaccaatgccggatatcgtccctgtgtccagatatttaagatctcgccacagttgacgagtatggagccgggcaggtggcccacgcgattccacttttcgctgccgggcagcctcacctccagtccgccctccgagtcctgggagagcagggtgaaggtgccgtagtccacgtgtggtggacactggatgacggcgccgttgcccagcttgtgctcgaacaattggccattgggcccatccacctcgttgaggtcgtcctcgtcgcggggattgtgctccggccggaaatctggctggttggacagacagcgctggtagctgtactggcagcgacccttgatcacgtcgttctggccgggctcgtcgtccactatgggcggatagtagagcatgcgcagggagctcatgttgtcgtggtcgccggacagcatgtgcgagtgcttttcgaggaagaacgtgtgcggaatgtccagggagacggccagcgcctgcagtataaagctggccagcgccttgaagtccgtggccagggtgctgatgtggtccgcaaatcctggcagcggctcctctggcagattctgagcgttcagtgtgctgatattgaaagcgtgacgcagctccggcgacttgccatcgaatcgctgctgctgaccacgactcacgtagccatgtttgtctccatcggcacggatatagtgctgtcggatgtccggcggcagattcacgaagtcatccaggtgatcccaggcagtcttgagctgatccaaaggcaatggagaaactttgtattagtgaaaaggagtacaataaccttgaaactaaatttttgttttatctctacagatacggttcccccaggaatagaagctattaatttcaactgatatgaatgagattttagatttgctgcttgggcaataaattattttggtatttaatcaatattgaataaaaccaatttctttcctaatctaatgtttatatattactagttgtcttaccttctcatcggagatgccatggttgaccagcagggccatgcccttctcggagagcgctttcttcagctggtgacccacgcggttgaccaccgacttgaccggcacctcctcgatgcctggaataaacagaatcggtattagaatcgatgtgcgggcgtgggaataatcagcggaactgccactcaaacgctaattgctttgcggtcttttgtttatggcttctttgaattattttccacctgaacaccataaagtatgggtcgtgtttatggcagattgttcactctgttgccgaaggcgagcacttggccactaaattgaatgtcatgggccattgagaagtgtggctaagtggcgtccacattcccattcacattcatattcacgtgccacccacgagctcgtaagaccctcactttgcaaagataatcggctgcttggaatctcaaataacccaccattgcgaactcgataatgtgcaatggcccaatgcaatggtaaatgcaatcaatttcaatgcaacgaaggcggcattgacaatgcacagcggaaaattaaatagaaaatgccgcagaaaagccgcagcggaagttgcgaggatggcgttccacaccgccaaccatttggcgcgtcaaagttggacttttgaatatataccatatagcagatagatagatagctgatatctggaagaaggatagggtaggagagtgtctgttgtcgtcggagaccttgcaccgaccgctggccaatgtgatcacttactcattgagggacaagtcatgaatgaaatcgaggaatgcaaagtaattatatttgtatacttccccgcgacagtgtcatttcggtgtcacaccgggcgtatgcgcaatctataaatagtttggctagccacaacgggaagccaccttctggccgcatgccctcagttcgcgacttggacagtgacgcagtgcctctgataagggttttcagagaatttttttagcaattcaaaaataataacaattacgccctcttatcatctcattccgggcatgggagctctgtcgccaggcgggaagtgctcgcattgttattattacttgctcaactgggaaccagatgatgttgtcggaatgatgacgatgatgcgaatgatgaggcggcggagaggtcagtcgggcgaattgaatgattccaattgacgccagccgcagatcgcctttcgttttcattaggcagcggtccagttttgcatgtatttttgttatgcttgttttccgtgcgttttgcttccactttttatagcttagtcaatttctgctggcatgcaattcaattagtcggcaattgggatgcgagtcgcttttcaatttgccatttctcagctttcagccagctatgccagctagttgtcagtgctaacttgtctctaatttagctaattgagtcagtagattcagtcgacgaattcgatgaggaggccaagttggccgaagatcatctctatcgaatgccagaatttctcggcgtctcgatttgttttcccccatgttttattgtgttttcgatttgattggcgcttgccgaacaaatttatcgttgaaattgattggctttcatgcatttatggtcagacataaattgcgggcacgcgttaagcgtttctattgtttgtttttgacgccatttgatgttgtatgcttgtaatttaattgcataggcgaatgaactcttaaaacacttgaacaaattctaggactgtgctatgcaaaattcatttggaatgcggcgtaagaaacatatacgaaaatgtttaattgctttttccatcattggaatttccatatacgcatgcgggaaaaaccccttaagcataatccacaaatagattcaaattcaattcaatatttatagaccgatttcagctcgtatatatgtggcagtttagttgcggaattttcgctgagaaatatggtcgtgcagtataacttatttatagaaaactgaattgcggctattggaattggctgaaatgggcttaaatgggggaaaatggttgcagatgtcgggctaatggaaaaataatttcaatgccattgaaatatgcgcacagaagtcaacggcagaggtaattggccagaatagcattatcgcctgcgaatcaaacttggcatcaatgttttgaaggttgcaaaatttgcttggccagctgtcaatttgaattgtcaagagaacttaattcaatttctacccatcaaccaatgttcaggtggctttaacaaatttgtgaggtcaagagaaatccggcagccaatttctacgtatatttcgatggcgaaaacaggcaaaacgcgattgcggccattaagccacgtcagccaagcccagaatcaacaggtttaagccagtttcaatcggttgcggcaaaagtccaactacttaacatgctcgcactgtcgcctttcggtagtatcatcatcatcaaatcaaacaaggtgaggcccatcgatgatgacgccgtggagtgaatccccaaagcaccaaaacaagatgcgtcaccgagtggacaagttgcccaattggtaactggttactggttactggctaatgatcaccggcagtgtgtaaataaagctgcaaccagtaaacaaatattggttcgctcattgcgttcacaccaaaatcaggttccgtaactcgaataattgtaaacattttgatgcgtactgtttgagtttccgcacttgatgaagtgacattgggtcgatagaaattcaggcattccacaaatgccacaagcctgacttccaatatagttcaaaaacctcgcggagctcacaaaaaaacacaacaacaacaaaaaagcacaagtataaacaaaacaaggggaaagaaaaaaaaaatccaattgaagttccgttgacataaaaaatgccgcaaggcagcgatttaattgcttctagctagctgctttgggggtcaatggctctggtggggcgagaaggtcaagagagtgcttccaccaaggccaagccgcactgtactccaagcgaactcgaatctctgggtgagccctcggcgaaacctgcggcccgataagcaaacagtgcgtatgcgctacatttccatggcgtttcattaccgccagaagaagaaactgtgtcacgtatcggcaaagacccagttaacacaatgggcacggctcccaaaaaggcaaatggaaaatttttgtgtggccaaagaagggcagaagaaacggtgaggaacaaacaaagtcattaaatcttttggaacaaatttgaacccagatatctaaaaggttaaccaaagaagttcaaagtagtgtgggcaacacacaaacaatgtcaggaaactcagatatctaatattcttaggaatctcacagatactctaactcacagatacattttttaaagtcagcttgcatatagctgtgtaatgtgtaatgtgatttcttattagcattttaaatatttatcggcataaatatgaatgtgatttaattattccaccacattggtccacttttctccaactaaattgatactctaattatcgaggagtgtgcccgacttgctgcgatctatactgatttaaggagcaattactcaaaaaattactcatgatttgtgatacccagaaatcgcagtaaaatagcaggctataacaacgtgatacttggtttcccggcatacgtatgtacataagtgttatattaaagtacttcatagattaactatctactttcaattagttgacgttgagcgataagttatacattcttcgaaactttacagtcagacttcccccatctcgcccgaagatcccatttgcattattcatttgttttcggatagaaccgcaggtgcagggatcaggtgtccggtgcacaagccggtaattacaacaaattaactacgacgtagttgtagcaccacgaacgaaattaagtaactgcaattaggggagctcgtttagttagccctgaacaattgggaatagtcagccgaacagaactgtcgatgactcagtgacgactgcacttaattgtgccctgagtgcactgaaaaaaccccagacggtattcgaaagattgcccatttcctgctacttaaagaaccgcaatcttatcgatagaacgcgtcatattatttaatcaaaagtgtgaattcaaaatacataaattggaacataaaaaacaaaatatagctgaataaaataaacctaacttgttgtatgtgtttatgacccatcattttgggaatctatgaatcattaagtttctcacaattttactagttgtattcaagtttacgtgtatgtagatacttcataaagcttgcacattagctagtggacttctgctaagtttatacactactgaactataccaatctgtggttttatggcctatacttatttttggattaatataaaagcaatataaacgtataagttgtttatacaggtgagtcttactttttgatggcagtggagtggcctaatcattttcacctctacgagacaagtcacagataagtgctatttttgaatggaggaacttcccattgatgtcaaattcccgcccttttctctccgtgtacgaacgctggcagaaatggctgcctagcaacgagttggagtggcgatcagcgtcatgtttaatgggatgttgtggttccatgggggataccacatatatatagacatagccccatgaaggggggtagggggaggtgggtacttaccacagtgggcgagatcgatgatcggaaccacgctgcgcgagaggagcgtgtcgagtttatcgtcgctgctctttgtttttatcattttgagttggtgtttgtgcttcgagtgacttccagagggtcttcgacgtccaaagttctttggtttctgattggggagagcaatcgaacactcgccgcacttgtgctcgctatatctttatcacaattcgatgaggggggactctgggtaccggagaggatccgggatccggagacgaggtgcacttccagcgatggctgactaaatgaaactgaatggcagcagcgcgcagaattcgattattagactggttatgccgacagcgaaaaagaaaaacacaaacattcgtcgaatcgcgcatccgagtgtttcgtattattgtttttgcttaaatttcgtgctatttgtttttgcaacggctattgtttttgtttggctggcgagcaaaggctttggcagcagaaattaggtgggcagcgggcagggggtctttatgtctttacgatccgatacgatccgcaatgcgaacggctgcctgagtgattggctttggttggatttagaagggcgcgtggcggacgaggggcgatcgaacaatcgcgacgcgcttcttgggcggactaatcgccggctgttcggagcaggggttcctaacttctgggttccgacgcttatcgcacctgaatggccacaattttagctcggtttacgattttattttgcaaaaatgaaactgattgtgtgctatgggtttggtatggcgtgtgtgcatgtgcgtcgcaattagataaaatttaatcaaatcaaaaattgtgataactaaattagcacttgtcgttcagcgcgaagggggtcgggggtctacgtagagtgcttagtactcagtgcccagtacactgggtacagtggatattccggcttatggtgagcagggctcgaaaggtgagactatctaaagccgtcaacaggtagcctcgtctcggtttgcttttgcaatatttgtgatggctattaacgtggctcatgtacatgcatacatacatatgtacaaacaatacccatacagatgcggatgcatgtgcgagatacagatactctggttgcggcgggcatgtatcttgtatcttgtgtctgatgtcttgtgttttgtgttttgtatctggcagatcccgtttgcagtttaacggcactcggactcaggtgtgagccctcctgcccgccttttcaccccctaaaaatgcaaaattaaaatcgaaaccagctgagctgttgccaagcggctttgttcggcaaatgccggatgaacaaagtctggtctttcagccagtcagtccgtccgtctgcacggcttcgttttatatcaaggggtggggtgggattgggttcggggttttcagagatatagccggggaatgagtaagcatttgcctcgccttttttgccttgcaaaaacattatgccaacgagcagaggctcactaaaaaaaaactactgaatttactactcggagcgcctattcagcggaaagctggtgatttgtacttcaaagttgaaaccgatgagggctttttccatttgcttacagtgaaaactcgctttcttttttcgcacaggtttcgcttttcatcgaacacccgacccgaacgaacagcagttggccaacagtctagttagtcaattttcgtatcgctttctgctgctttttttgcacactttccatcattttgtaacacactccgatcgcgaatttaacccagatacacctgaactagcgcagagagcaacggcgtctgtctcaaaaaaaaacatttgcgatccgatccgcgatcttcggtggattcggatccagttcgaaaacgatagcgcttttatcggcgctcggatggtgggtactatcgatatttctacagtcacgcaaatcgtgacatttcagcaagatagtttctacgtagaataccgtgtcaaatgtagatatttgaaactattcaagttaatatattgtaattataattataaacggtataaagtgaataacattttcaaaacaatttaccataattcgagtatataaaccattgtatgctgtagacattagacttggaaatgtaaatgctataatttattaaattcaaacaattacatttcattattgctgctgaagttacattattgggttaagaatgctaatgattttcatatggctagagctgtaataaacttttgccccagattcgttgacttattgagatcgctgaccgtaggtgtcattaaactttttctgtatcagttcataggcgctgtatactcttggggtttaaaataaaaccatgtaatataatatttacgaataaatattagaatactcacttgtcctcactctttgcctccccttcactcaacagatcgttgggagatatcaagatcgagttattgggatggcagaaatatgctatggagtgtctgccacgggttcttataagttcttgttcaggtatgacgacgcgatgaggctagaaaaggatatagataagattagtctaccggaaagttccagtttataggaataacctaccagggcgtggtaacgctgcttcgtccagatggacagaagttccccgccgtttataagtatggcaccaggtaaatgacccacccgttcccatttttcgctgcccggcaattgcacctccaagccaccttcggaatcctgggcgagcagcgtgaaggtgccgtagtccacatgggcaccacaacggatggcaccctcgctctggcccggctcatcatccacaatcgccggatag

SEQ ID NO: 11120 - DNA, 1864 bp, DROSOPHILA
tttttttgagacagacgccgttgctctctgcgctagttcaggtgtatctgggttaaattcgcgatcggagtgtgttacaaaatgatggaaagtgtgcaaaaaaagcagcagaaagcgatacgaaaattgactaactagactgttggccaactgctgttcgttcgggtcgggtgttcgatgaaaagcgaaacctgtgcgaaaaaagaaagcgagttttcacttttcatttagtcagccatcgctggaagtgcacctcgtctccggatcccggatcctctccggtacccagagtcccccctcatcgaattgtgataaagatatagcgagcacaagtgcggcgagtgttcgattgctctccccaatcagaaaccaaagaactttggacgtcgaagaccctctggaagtcactcgaagcacaaacaccaactcaaaatgataaaaacaaagagcagcgacgataaactcgacacgctcctctcgcgcagcgtggttccgatcatcgatctcgcccactgtggcatcgaggaggtgccggtcaagtcggtggtcaaccgcgtgggtcaccagctgaagaaagcgctctccgagaagggcatggccctgctggtcaaccatggcatctccgatgagaagctcaagactgcctgggatcacctggatgacttcgtgaatctgccgccggacatccgacagcactatatccgtgccgatggagacaaacatggctacgtgagtcgtggtcagcagcagcgattcgatggcaagtcgccggagctgcgtcacgctttcaatatcagcacactgaacgctcagaatctgccagaggagccgctgccaggatttgcggaccacatcagcaccctggccacggacttcaaggcgctggccagctttatactgcaggcgctggccgtctccctggacattccgcacacgttcttcctcgaaaagcactcgcacatgctgtccggcgaccacgacaacatgagctccctgcgcatgctctactatccgcccatagtggacgacgagcccggccagaacgacgtgatcaagggtcgctgccagtacagctaccagcgctgtctgtccaaccagccagatttccggccggagcacaatccccgcgacgaggacgacctcaacgaggtggatgggcccaatggccaattgttcgagcacaagctgggcaacggcgccgtcatccagtgtccaccacacgtggactacggcaccttcaccctgctctcccaggactcggagggcggactggaggtgaggctgcccggcagcgaaaagtggaatcgcgtgggccacctgcccggctccatactcgtcaactcaacatcgcgtgataataccggagcaggaaactattcgggctcgtggccgccactcgatagcgttcttctgccatccggacaacatcaccacgatatcgcccaccgatctgcccaatccagatgccgtccaggacaaggcgtgtctcaagcagcgcaagaagtccttcaaggcggcgaaagaaagagagtctacaatgcctatcagttgatacagaaaaagtttagagatacgtatagcagtaacaatcactcataagcagtaacaaccatagaccatagtcggtcgagccatccatcgcatctctacctaagctgggatgaagttcgttgtgggaacggatggggaaaatgaaaagcagcaactcatatgatgatgttttgaacctttttattattacctttacttttattccatacgattgtaattgcttcatttcattaatttatatgtatcgagatactatatacaatacatgcatacaccgtaaacatatccctttgtataataaatatatatgtat

SEQ ID NO: 11121 - protein, 388 aa, DROSOPHILA
MIKTKSSDDKLDTLLSRSVVPIIDLAHCGIEEVPVKSVVNRVGHQLKKALSEKGMALLVNHGISDEKLKTAWDHLDDFVNLPPDIRQHYIRADGDKHGYVSRGQQQRFDGKSPELRHAFNISTLNAQNLPEEPLPGFADHISTLATDFKALASFILQALAVSLDIPHTFFLEKHSHMLSGDHDNMSSLRMLYYPPIVDDEPGQNDVIKGRCQYSYQRCLSNQPDFRPEHNPRDEDDLNEVDGPNGQLFEHKLGNGAVIQCPPHVDYGTFTLLSQDSEGGLEVRLPGSEKWNRVGHLPGSILVNSTSRDNTGAGNYSGSWPPLDSVLLPSGQHHHDIAHRSAQSRCRPGQGVSQAAQEVLQGGERKRVYNAYQLIQKKFRDTYSSNNHS

SEQ ID NO: 11122 - DNA, 3317 bp, DROSOPHILA
gacattcgggtaaacaagttacaaatgatatttagtaagctaattatatacgaattggttaatttttagcggaaatccggtgcctcaaatgggtggaaggccctcagctcttgtttagcggagcttgcgatcagtccgtgctagtttgggatgttggtggcaaacgtggcaccatttacgagctgcagggacataggtatctccaatcttaaataatattcataaaataagatagtaatcggcacttctgattatgtagcaacaaagtttccgccctgtcgtacgcgaatcacacgcaacaactgataagctgtggcgaagattcagtagtggttttttgggaaatgaatgcaatgcggaaagaggttcctggctgggtggataccaacaactgtcagctttgctccaggcccttcttctggaacttccgctcaatgatggatcaaaagcagctgggtgagataaatagcttacacttgagttactctttgttttacaagtaatttctgactgtcaggaatacgacagcatcattgtcgccactgcggcaaagccgtgtgcgacaactgttccaccaatcgcattaacatacccataatgggcttcgagtttgatgtgcgtacctgtgatccgtgctacaaacaacttcagacagtcgagcgcccctcgctggcttcattcaatgacgccaagcattcgatcgtctacatggacctggacgaggacagaaagcgcctgttgacagtgggccaggacaggctcatcaagatctgggatctctccaacatctgggcataaaacatcctgtacgcacacgcacgtaccaaaggtataatcattcacgaggcgtttcggtcttaactggaacacccaattaacgaacgatgtggctggcaacgaccaaatccagtccctgctgcttaggttctcatataattgatgtaaagcaataatcattgtatgtacgtatgcttacattcaacacataaatacacgaatccatcgattaagtggtgttttctaaatgagtttttattagattgtactttatacttaatagccacccctgcccggtggtggtgctccacggatcatgctgggcggcggtccgcgcatcggtggcggagcaccgcgtcccatgtttcctggcatcgagggcatgccgccgggaatcatgcccggtggcggtgcacccatcatcggtgctcgtggcactcctcgtcccatcggagccatgtgctgttgggcgggtccgcccacacctctcacgggaccctggagacccgctggcacggcggacaagttgataggcattccgcgtccggccacgcgaccgattcccggaccaggagctgctcccggaatgggaactcggggcaggccctcctctggcggcggtggtccctccaccgtcagtgaaactatgttctcgccgcgcagcaatacaaagcccagcacgcgcttctcctcgcgctcgggcaccttggaattcttcgagcgaatcttccggaactcctcgcagtcgccgaggatcaagttcatgtgtttgtcgaaggctttgaaggtaccgatgaaggtacgcgagtcctgcagcacgattcgcacccgataattcaggtgctgaatcattttgttgttcttgccgatcgtctgaaataaaggaattcaaaggatttaattgtgaaatacaatagcatgcataaaagtcgcgccatcttttgtaaaccatttcgaccctttaaaaaagccggtatttataaaaattttaataaaccacagagtttgaaatagcaaatctcagcgtaatatcgaagatcactaaaaatcataattttaaacaaatataaaatagttaattagccaaaacaaattgttttatttattcgcatgcatgtttgtatgtatgtatgcctatgtaaatacgaaatcgcaaccgcgaaagtaagaatctatgaattaatacaactaaacaaaacttaaccattgcagtcagatgcttaaaacagtgtttttacttaccattttatttgatttctatgttaattctatcgcttgtaaataaaatacagatgccggaacctcaccacggcttttttcgataggcatgaagaataaatcgagtggcgtgtgcggcggtcagcattttctggtgtctttcaatcgagcctatcgaatataaattttttattgataatccacatgattttttaaacaaacattcgactatccctagcaaaagaagagaaaaaaattaaattttttttaaatcttatgataaaaaacgaaaaaagaaaaaatttgaatcagtatgttttttctcaatttttttcgttagagatggtcgaattttcattaaaaaaatcatgtggcggcacttatcgatatcgataggcagtggccatgttatcaaacttattcttattcatcagccacgtcattgtttatgccgacattctgacaagtttttttccgaagcggcaaagccctcacatctctactcgttggcaaattaggcgaaaagtcattttggtaacgtatgcagctgttgaaacactgaatgccgccattattgctatagtatacactcccattttcatataggcgtgcgttccgtgacgcagccgcagcgaaaggaagtagaacaatcaaacagccaaccgggcagccaagtagccaagtcggcggattagatcacgatgaatatctttcgctttgctggggatctgtcgcatgtgtttgccatcataatactgctgctgaagatatggaagacccgctcgtgcgccggaatatcgggcaagtcgcagatcctgttcgccgtggtctatctgacgcgctacctggatctgttcaccacctacgtgagcctgtacaactcggtgatgaaggtgttgttcctggccacgtccggtgccaccgtgtatttgatgtacgtgaagtttaaggccacctatgaccacaatcacgattcgttccgcatcgaattcctgctggtgccgtgcgccctgctctcgctggtgatcaatcatgagtttaccgtgatggaagtgctgtggacattctcgatctatttggaatcggtggccattctgccgcagctgttcctagtgagcagaaccggcgaggccgagtccatcaccagccactacctcttcgccctgggatcgtaccgtgcactctacttgctcaactgggtctaccggtacatggtcgagtcgcactacgaccttatcgcgatcttcgccggagttgtccagaccgtcttgtactgcgacttcttctacttatacattaccaaagttcttaagggcaagaag

SEQ ID NO: 11123 - DNA, 948 bp, DROSOPHILA
aaaaaacatactgattcaaattttttcttttttcgttttttatcataagatttaaaaaaaatttaatttttttctcttcttttgctagggatagtcgaatgtttgtttaaaaaatcatgtggattatcaataaaaaatttatattcgataggctcgattgaaagacaccagaaaatgctgaccgccgcacacgccactcgatttattcttcatgcctatcgaaaaaagccgtggtgaggttccggcatctgtattttatttacaagcgatagaattaacatagaaatcaaataaaatgacgatcggcaagaacaacaaaatgattcagcacctgaattatcgggtgcgaatcgtgctgcaggactcgcgtaccttcatcggtaccttcaaagccttcgacaaacacatgaacttgatcctcggcgactgcgaggagttccggaagattcgctcgaagaattccaaggtgcccgagcgcgaggagaagcgcgtgctgggctttgtattgctgcgcggcgagaacatagtttcactgacggtggagggaccaccgccgccagaggagggcctgccccgagttcccattccgggagcagctcctggtccgggaatcggtcgcgtggccggacgcggaatgcctatcaacttgtccgccgtgccagcgggtctccagggtcccgtgagaggtgtgggcggacccgcccaacagcacatggctccgatgggacgaggagtgccacgagcaccgatgatgggtgcaccgccaccgggcatgattcccggcggcatgccctcgatgccaggaaacatgggacgcggtgctccgccaccgatgcgcggaccgccgcccagcatgatccgtggagcaccaccaccgggcaggggtggctattaagtataaagtacaatctaataaaaactcatttagaaaacaccacttaatcgatg

SEQ ID NO: 11124 - protein, 199 aa, DROSOPHILA
MTIGKNNKMIQHLNYRVRIVLQDSRTFIGTFKAFDKHMNLILGDCEEFRKIRSKNSKVPEREEKRVLGFVLLRGENIVSLTVEGPPPPEEGLPRVPIPGAAPGPGIGRVAGRGMPINLSAVPAGLQGPVRGVGGPAQQHMAPMGRGVPRAPMMGAPPPGMIPGGMPSMPGNMGRGAPPPMRGPPPSMIRGAPPPGRGGY

SEQ ID NO: 11125 - DNA, 3354 bp, DROSOPHILA
ttaattctcattttgtcattcagctgaagctgcttggctatctaatgggtacgatattaattggagtggctggcgtcgctatttatcgttacaagtactaaggacaagcattgcacacgaactactggttattttaagcaattgaaatgcattttttaagtatatatagaaggcaaaattatgaatgttggaaagtcgcagttgcttattatgatgatatggctctcgttgtacatttaatgctatgcacacttcacaatagtatgtatctttcaaatagtatggttttggatatcgtacatataatgttaaagcttaagtttaatcaactacattctgtcagacaagtaacgggaattgttaaaataaacacaatattctcatcattatgttttatacaattttcaaacgaaataaagcaacacaatcgaaatcagaccatatttatgaacttgcaataaggttcgaaagaaagcatatgaaataccatatgaatgtaatgatactgataagagcagcactgataagaactcctaacttgattttttttgttcgttacttaaataatgcatgatttaactaaactctgctctaatctaaaaggcaaacgaacttttgtaaaaacaaatcggaacatccgttcaagagatataattttcttctatcgcgacttagaatgattaaatgatggtgcgaatttaaacatgctgattcattgtttgcgtatggtaatcgacatgacaatgggtatatttgggtctcccaaggctgtttctatggggggtcgtggaggtaatgcagctgcgatcgtatataaacctatcaagacatcaacaattttcagtatctgatcactatatcaacaataattgtgaaaaaaaaaccagcaataacacaaagctttatttaccacatcttatcagttcgccacaatctgtaatatctattcgatctatccagaaagtctatatgtttacaaacgtatgtttataagcaagtgtttataaatatctttcatttgagacaaaacacttttattggggtgattaatatacaaattcataagctttcggttaaacaaattcctgcgaaaaataaaaaaaatacatgtgatgcgagtaacttaggccttcgatgcaatttcaagggcctgctccagatccttgatcaaatcatcggcatcctccagtccgacggacaagcgaactagaccgtcagtgatgcccaaagttttcctatcctccgctggaaccgaggcatgggtcattattgatggaagctcggccagactctcgtagccacccagactctctgccagggtgaacaccttgagggccttgaggaaagccgaggagtgcttcagctcgcccttaatgtagaaggagaacacgccgctgtatccgtatgcctgcttcagagcgatcttgtgctgcggatgggagggcaaagagggatgcaacaccttctccacgaacggattcgtctccaggtatttggcaaccttcagagcattcttctggtgctgttccatgcgcagcgagagcgtcttaagacttctgttcacctgatagcagtcgaatggagacggcacaatgcccactgcgttctgcaggaacttcaagcttttgtagagcttctccgagttcatggtgatgccacccatgaccacatccgtatgaccgttcatgtacttggtcagggagtagcagaccagatcagcgcccagctccaagggtcgctggaagtaggaggtcaggaaggtgttgtcgacggccaggacgatatcctcgcgtactccatggaccagctgcgcaatagcctcgatgtcggctacctttaccaatggattagttggtgactcgatccacaccaacttggtctccggcttgatggaacttttaattagatccaacttcgtgggatccacaaaggtggctgagattcccagacgggtggcaacctgtcggatcaaacggttggtgcctccgtaaacatcgtcgcccatgatgatgtgatcgccgctgctcagcatagttagcacagcggtggtggctcccaatcccgatgagaacgtgaggccgtatttggcattatccaaggcggcgaagcacgtctccagcacgttcctagtgggatttccactgcgggagtactcatagcccctgtgctcgcccggtgcatcttgcttgaaggtggtgctcagcgatatcggcggaatcacggcagcactcttccactggtcggggctctggcccgagtggatggacttggtggcgaagccgctcggctggactctgtagctcatcttgtctgggtaggaggatcgttgggaactgactgacacgtggagagagaccgtcgcgaatatatatactcctgccagatgttatcgcctagccggtaattaaatatttcgaccgttacaacactacattcgccgacagtgatggagctctagctattaaacggctagaaaacggaacccttcaaaagtaacgatacatatatgcattgaaacgatggatattcttactttccttagaacttcttcgattatttatacaataatttatttgttgataaagcacaataatattacaatcgcagcttaagagtaaatacgatactgaacagaaagggacatgcggaatgggttgggaactatactccaaggtctaccacagtttgtcgctgaacacgatctccttgaagatgcaatcctgcttggcgatgctgaccattgccttcttcgacttcatggcatcctgcaccttctcgcgcacctcggccgccttcacatcgttgcgaatgtaaaagagccgtaccaggtggtcctcgttcagagacggatagctgcccagcaaggtgtgcaggtccaagacgagcagttcgatatccgagctaagcagtgccgatagcgtggatataagatccaatggagagtcgctgagggaaatcttcggcgcgattttctcaaagaagagcttaaaccgcttggcttcggtcttgatttttcgcgtaatggcatcgcactcggcccgtggcttagacagtcgcttggatagcagtgccctaatgtagcgcttggccagcagcttctgggcctcgttgatgaccatctcgaagttattgggtcgcaggtgattatagtcctggaagtaatcgtccagcgttacacaaatggtgtccacggcaatgttactggccagccacttggcagtgaataggtcgttaaagtgacactccatgtccaggaaggcttcctccagcaagtaacttgcggcatgagcccggatccgctggaatgtggcaagcaaacgttcgaaatcctcataatgctcagtacgtgacttg

SEQ ID NO: 11126 - DNA, 1354 bp, DROSOPHILA
ctctctccacgtgtcagtcagttcccaacgatcctcctacccagacaagatgagctacagagtccagccgagcggcttcgccaccaagtccatccactcgggccagagccccgaccagtggaagagtgctgccgtgattccgccgatatcgctgagcaccaccttcaagcaagatgcaccgggcgagcacaggggctatgagtactcccgcagtggaaatcccactaggaacgtgctggagacgtgcttcgccgccttggataatgccaaatacggcctcacgttctcatcgggattgggagccaccaccgctgtgctaactatgctgagcagcggcgatcacatcatcatgggcgacgatgtttacggaggcaccaaccgtttgatccgacaggttgccacccgtctgggaatctcagccacctttgtggatcccacgaagttggatctaattaaaagttccatcaagccggagaccaagttggtgtggatcgagtcaccaactaatccattggtaaaggtagccgacatcgaggctattgcgcagctggtccatggagtacgcgaggatatcgtcctggccgtcgacaacaccttcctgacctcctacttccagcgacccttggagctgggcgctgatctggtctgctactccctgaccaagtacatgaacggtcatacggatgtggtcatgggtggcatcaccatgaactcggagaagctctacaaaagcttgaagttcctgcagaacgcagtgggcattgtgccgtctccattcgactgctatcaggtgaacagaagtcttaagacgctctcgctgcgcatggaacagcaccagaagaatgctctgaaggttgccaaatacctggagacgaatccgttcgtggagaaggtgttgcatccctctttgccctcccatccgcagcacaagatcgctctgaagcaggcatacggatacagcggcgtgttctccttctacattaagggcgagctgaagcactcctcggctttcctcaaggccctcaaggtgttcaccctggcagagagtctgggtggctacgagagtctggccgagcttccatcaataatgacccatgcctcggttccagcggaggataggaaaactttgggcatcactgacggtctagttcgcttgtccgtcggactggaggatgccgatgatttgatcaaggatctggagcaggcccttgaaattgcatcgaaggcctaagttactcgcatcacatgtattttttttatttttcgcaggaatttgtttaaccgaaagcttatgaatttgtatattaatcaccccaataaaagtgttttgtctcaaatgaaagatatttataaa

SEQ ID NO: 11127 - protein, 393 aa, DROSOPHILA
MSYRVQPSGFATKSIHSGQSPDQWKSAAVIPPISLSTTFKQDAPGEHRGYEYSRSGNPTRNVLETCFAALDNAKYGLTFSSGLGATTAVLTMLSSGDHIIMGDDVYGGTNRLIRQVATRLGISATFVDPTKLDLIKSSIKPETKLVWIESPTNPLVKVADIEAIAQLVHGVREDIVLAVDNTFLTSYFQRPLELGADLVCYSLTKYMNGHTDVVMGGITMNSEKLYKSLKFLQNAVGIVPSPFDCYQVNRSLKTLSLRMEQHQKNALKVAKYLETNPFVEKVLHPSLPSHPQHKIALKQAYGYSGVFSFYIKGELKHSSAFLKALKVFTLAESLGGYESLAELPSIMTHASVPAEDRKTLGITDGLVRLSVGLEDADDLIKDLEQALEIASKA

SEQ ID NO: 11128 - DNA, 2962 bp, DROSOPHILA
cggaattcgtgtgccctagtgcctactgggtggatacaaaggaggagaaggacaagttgctaagcgaatatcgcgcggcaatgggcgccaaggattgcaagtacttcaatgggggcttgggcaaatgtccctttggaacaaattgcttctacaatcaccgttctctggcgggtgataaccgcattcaacggcattcaatggaggatgacgacttttaaatatattgattttaatgatgacatgacatggcatgtgaccggtcgatcccatttctcagtgactcgagcgatacgttcatttcaaagcaaatcaaagagaacaaagcaacttttgttagacggctgaggagacacggtttatagacttagtcttggtccttgccagagactataatgtacaacactgagcttaatatagcttcgttcatccacatatcgaccaatttagtgcattactatccccatatagccgaattcaagcatttagcaatataacccttacaaaataaaacaaatactcaagcaccaaatttttgtttagatgtctccgacatcgtcacggtgaagtggccaatagcactggaaaataggtgggagttaaaattattagcacatcacatcagtttcacaataatatcattaagtttcttaaacacaaatccatataattgtgaatatcactcaacacttgtacaaaatgaatatgaaagaccactaagtcttctgtggattttagtttctttttgatatttcttaaaattttttaaaatcacagaaaaaaatctcaaatggtctaaaatataatcattcgaaatctagtgcaatttcttaattacaaattgcataattatttattttaatgcattaaaagaatgctttcattttagcgtcaactatctttttattctctttgacatatttctagcttagtcgccttagaatttaatacctatttttaaatcagtcgctaaaagttatttcagaaggatagtattgccgagaaattgttcaaaaattttacacgaaaaaaagtatatttttttttaaattttacaacgctatttaaaaaccaaaaaataaagttctcaaaaatactttcatcataatgtcgtatcgccgtagtcaaacaatctgtcgcttccatttgcttggaatttgtcgttttggtgatttatgccgattctcgcacgacgagacgacaccaaatgacaaccagagtccgcagatatcggaaatcgcggatgaagtcgtggagaatgagcaagtggtggcctccaccagtagctacagtcgccagatgacctgggcaaatgcaccagagtttgttcccaggtacaaagccaattctgccgatttccaagcaactgaaggtgtccaggatatttgtccatatggtggcagctgtatctggggcagtaagtgctcgtatccacttcacatggagatttgcaagatgtgcgacctttactgcctccacccgatggatcagaaccaacgccgtgcgcacaatcgtgagtgtctggagcagcacgagcaggcgatggagctatcttttgcaatagccagatccaaggacaagatgtgcggcatttgtttcgataccgtcgtggagaagaagggacgtgaacgtcgctttggcatcttgtccaagtgcaagcacatattctgtttgacgtgcattcgcacatggcgtcaggcccatcaatttgaggccactgtgacgcgtggttgccccgaatgtcgcgtcttttcggaattcgtgtgccctagtgcctactgggtggatacaaaggaggagaaggacaagttgctaagcgaatatcgcgcggcaatgggcgccaaggattgcaagtacttcaatgggggcttgggcaaatgtccctttggaaacaagtgcttctacaggcaccatcgtcgttgtgacgataaccagacacaatcaaatgccgtcaattcagactgatggctatgacaatatgactattgattttaatgaaataccattcatggcatttgaccgatcgactgaatttcaatttgatcgatcaatttctcagtgactcgagcgatacgtccatttcaaagaaaatcaaagagaacaaagcaacttttgttagacggctgaggagacacggtttatagacttagtcttggtccttgccagagactataatgtacaacactgagcttaatatagcttcgttcatccacatatcgaccaatttagtacattatatcccaatatagccgatttcaaacatttagcaatagaacccttacaaaatttttgtttacgtaattgtcttttctggacctttttttttttttttttttttttttttttttaatttttattatttattgaatcttccctttgtgttaagagactaacaataagtgttcaaatcttaatctaacttaattaactttcacttagtgatagttttttttttcattaatgccctaataagtttattgctgggctgggaggtcgttgcggtgcagccggctttgactgcatactcggattagttttcttgcgaggggatttgtatgggtggtcagcttttcgttataccttcgtttttttctcagctattacttcgattactaatttgatttttaggtctctgtgtatgttttcgttccgaaggtaccaccggcgctccagtgataattctcagaattcttgactgtgctcgctgaataatgtctatgttacttctggatgcgttgccccacagctcggagccataagtccagataggttttaagacggagttgtatagaagagctttgaactccagactaagggagagcgagcatttatgagccagtggaggttccttgctttaagtttaagatgtttcgatttggcttctatatgtttgcgccaagtgagccgcctgtcccagataactcccaagatatgttacctcgtcggcttgtggaatgcatatgtt

SEQ ID NO: 11129 - DNA, 962 bp, DROSOPHILA
aaattgttcaaaaattttacacgaaaaaaagtatatttttttttaaattttacaacgctatttaaaaaccaaaaaataaagttctcaaaaatactttcatcataatgtcgtatcgccgtagtcaaacaatctgtcgcttccatttgcttggaatttgtcgttttggtgatttatgccgattctcgcacgacgagacgacaccaaatgacaaccagagtccgcagatatcggaaatcgcggatgaagtcgtggagaatgagcaagtggtggcctccaccagtagctacagtcgccagatgacctgggcaaatgcaccagagtttgttcccaggtacaaagccaattctgccgatttccaagcaactgaaggtgtccaggatatttgtccatatggtggcagctgtatctggggcagtaagtgctcgtatccacttcacatggagatttgcaagatgtgcgacctttactgcctccacccgatggatcagaaccaacgccgtgcgcacaatcgtgagtgtctggagcagcacgagcaggcgatggagctatcttttgcaatagccagatccaaggacaagatgtgcggcatttgtttcgataccgtcgtggagaagaagggacgtgaacgtcgctttggcatcttgtccaagtgcaagcacatattctgtttgacgtgcattcgcacatggcgtcaggcccatcaatttgaggccactgtgacgcgtggttgccccgaatgtcgcgtcttttcggaattcgtgtgccctagtgcctactgggtggatacaaaggaggagaaggacaagttgctaagcgaatatcgcgcggcaatgggcgccaaggattgcaagtacttcaatgggggcttgggcaaatgtccctttggaaacaagtgcttctacaggcaccatcgtcgttgtgacgataaccagacacaatcaaatgccgtcaattcagactga

SEQ ID NO: 11130 - protein, 285 aa, DROSOPHILA
MSYRRSQTICRFHLLGICRFGDLCRFSHDETTPNDNQSPQISEIADEVVENEQVVASTSSYSRQMTWANAPEFVPRYKANSADFQATEGVQDICPYGGSCIWGSKCSYPLHMEICKMCDLYCLHPMDQNQRRAHNRECLEQHEQAMELSFAIARSKDKMCGICFDTVVEKKGRERRFGILSKCKHIFCLTCIRTWRQAHQFEATVTRGCPECRVFSEFVCPSAYWVDTKEEKDKLLSEYRAAMGAKDCKYFNGGLGKCPFGNKCFYRHHRRCDDNQTQSNAVNSD

SEQ ID NO: 11131 - DNA, 3294 bp, DROSOPHILA
ttgaaattataacagacactgatcagttacttcgaatgcaaattcaaacgagctaaactattcagtcttaaaaatgtttaaaaggctttaatagtttgtaaaagcatatgatcttcgacaaattctgaaaagtactgggtatcaaaaatctcgtttctacaaattaatagcccttctttctggcttctttcgtctggcggttgcaattatttagccacttgttctggcgcagacacagttgcctcaattagttattgtttttgtggcggccgctgtgttgaagtgagttgttcattaggccaaactcgagcatccggcgctgcatggggaagtggaagtgccaccgccgacagcccgtgccccactgtcattaggcatggaagaatcgcgtgaatatagaaatactcgtactttcactgtcccattccgtttggaggcatctgctgtggatgagtaattaccgccttccagcggtccgattagggaccaatcaacagctgtttacggcgctcttggcttaaatattgcagagtgaactatttagatttccgctcagttggtggacaatgccttttctgtatctttcgccgctgggctgcagtctgagccgactggaactgctccacgaagatgaggtgtgaccatgagcccatcatatttcataatcaattaatagttatcacctcgaaatagcccaaatttatgttaaccaaccaagtactgatagcgataacggttggagattgccgaaaataatgtggagccagcatcacaattacgatttcctcccagcgcgaaggagagcattagtccgcttaattgcgcacttgttgttattcaagcacagagaggctctcgcccagatatttatatctacgtagctgtatcaggaaatttgcattcacaattagtggttgctgttagtgggcgtacatgccgatcgtgtaacgaaatctgctttcagttcaaggtagttgcagccggaaagctggcgttggcgatggccacggcaccgcgatccctggataccatctccctctgctcgaccgtttccagctgcccggaccgaaatggcttctatggcggtttccagcgcacagacaagccaaaggagccgctgtccaaggcacagatcatcgcgcgggagaagaagtggctctacatgatcgacaactggtccatttacatgtcaaaaaactacaaaaaggtaatattgaatttaatgattgtttaaagagtggtgatctcacttttgtgcgaacaaaatctaaaagaagctcatagtattcctattagtatgagaattcgacaacaatctttacaaaacctaatgtttagttctatcatgcagatccgagatcgctgtcgcaagggcatacccaagtcggtgcgacccaaggcctggttctatttatcgggggcgtatctgctaaagaagaagaaccccaacgtttacaacgagcttctggaaaagcccggtaacccgacgaccatcgaagagatcaagaaggataagcatcgccagttcccgttccatgaaatgtttctcgacgagcagaaggtcggacaaatcgagctctttaatgtgctaaaggcctactcgatatacaatcccaaggtgggcttctgccaggcgcaagcaccgatagcagcgttcctattgatgcacctgcccgcggaggacgccttctgggtgtttgtcagcgtgtgcgatgtgtaagtccacctaaaagtcatatttgcgcacttctatttaacgtgtgtatttctatagatacctgcaggactatttcatacccggtttggaggtgatccagaacgatgctggcatcctggagggtctgctgaagaagacatgcccgcccgtgtaccggcacctgcagaagcacaaagtggagccgctgctctacatgaccgactggttcctgtgcgcgatgacgcggactctgccctgggagacactgctgcgagtatgggattgctttctagccgaaggcatccgcgtgatcttcaaggtggctctggtcattattggggcttcactaagccgacacaaggtgcgaaagacgtgtactggtctctgcgagacgttggcagtgctgcgttcacccgaggagcatatcgtggaggaggagttcatcatcaacaatatgatgcgactgaatctgcgcgtagaggacttccagatcgagcacacacgccaaaaggctcgccgtgccaaacagaaggcacagcaggaggcggagtccagcggttccggcaacggacatcggcgcaacatgccaacgctgtgaggaaccgcaactactactactacttcaacaaattgttactaaacacacaaacaacacacaccatgcatagttgcataagatttgtacgtttaaagtcgcataggaggcaggtcgtgcacaaagtggaagcgagttgatgcgagtgaccccaaaactggttcagtcagttggtcagtcaattacggagacatcattccatgcaatcagtttgctaattttaagaccattcttttgttgagcccattccgggctggacttgtatcggtatttgttttcgtattattcatttagtggcaattattacgagtgtgcaatttgtttatgcttttcaaaagtatttattacatatttattattatcgcgtaacatttaaaaccgtagcgttagctttgagttgaggaccccgaacatatcgtatgattatcatgatgattaccaccctgaggcagctgacacaaggactggaggattatatagtttgaaactttgactactttatccgtattaactctgagacgagaatgttgatatttacctacgataatgcgttacgaacgacttctgttgtgcccccgagcctgaaaagtttggagatcagttttgtgactggtctaaggcaaaaataatataaaacttgaatactaataaaacaaaatataccgaaacatttgttttttgttgttgtataagtaaaagcattccagagagttaatttagaattttaaatgttttatttattaacattaatcaaacagcgcataaacgctcacgtgcatagaccaactttttcgagaccaatttcttattagtcgaagcagtggtgctgaaaatataattataattttgataatatcagttaccgttcattgagattatatcgaaaataaatagcttggattcttaatactagcaattaaagagtagcctacagctaaaagtccgtaatcagaattaggcggtgtctatgggtaaactatacgaatactctaattaatctctt

SEQ ID NO: 11132 - DNA, 1092 bp, DROSOPHILA
atggccacggcaccgcgatccctggataccatctccctctgctcgaccgtttccagctgcccggaccgaaatggcttctatggcggtttccagcgcacagacaagccaaaggagccgctgtccaaggcacagatcatcgcgcgggagaagaagtggctctacatgatcgacaactggtccatttacatgtcaaaaaactacaaaaagatccgagatcgctgtcgcaagggcatacccaagtcggtgcgacccaaggcctggttctatttatcgggggcgtatctgctaaagaagaagaaccccaacgtttacaacgagcttctggaaaagcccggtaacccgacgaccatcgaagagatcaagaaggataagcatcgccagttcccgttccatgaaatgtttctcgacgagcagaaggtcggacaaatcgagctctttaatgtgctaaaggcctactcgatatacaatcccaaggtgggcttctgccaggcgcaagcaccgatagcagcgttcctattgatgcacctgcccgcggaggacgccttctgggtgtttgtcagcgtgtgcgatgtatacctgcaggactatttcatacccggtttggaggtgatccagaacgatgctggcatcctggagggtctgctgaagaagacatgcccgcccgtgtaccggcacctgcagaagcacaaagtggagccgctgctctacatgaccgactggttcctgtgcgcgatgacgcggactctgccctgggagacactgctgcgagtatgggattgctttctagccgaaggcatccgcgtgatcttcaaggtggctctggtcattattggggcttcactaagccgacacaaggtgcgaaagacgtgtactggtctctgcgagacgttggcagtgctgcgttcacccgaggagcatatcgtggaggaggagttcatcatcaacaatatgatgcgactgaatctgcgcgtagaggacttccagatcgagcacacacgccaaaaggctcgccgtgccaaacagaaggcacagcaggaggcggagtccagcggttccggcaacggacatcggcgcaacatgccaacgctgtga

SEQ ID NO: 11133 - protein, 363 aa, DROSOPHILA
MATAPRSLDTISLCSTVSSCPDRNGFYGGFQRTDKPKEPLSKAQIIAREKKWLYMIDNWSIYMSKNYKKIRDRCRKGIPKSVRPKAWFYLSGAYLLKKKNPNVYNELLEKPGNPTTIEEIKKDKHRQFPFHEMFLDEQKVGQIELFNVLKAYSIYNPKVGFCQAQAPIAAFLLMHLPAEDAFWVFVSVCDVYLQDYFIPGLEVIQNDAGILEGLLKKTCPPVYRHLQKHKVEPLLYMTDWFLCAMTRTLPWETLLRVWDCFLAEGIRVIFKVALVIIGASLSRHKVRKTCTGLCETLAVLRSPEEHIVEEEFIINNMMRLNLRVEDFQIEHTRQKARRAKQKAQQEAESSGSGNGHRRNMPTL

SEQ ID NO: 11134 - DNA, 6718 bp, DROSOPHILA
tcgatgatgtggtcgcagggctgcatcagcatgaggatgcccttcaccttctgcttcttctcgtcgcgggtcagcttgcccttcatgtcgtccaccagcgattcctcggcgatttggcagccgcgatggaagaaatactcgaccatgtcgaagaagcgcggatccttggcggtgggcacatccttgaggcggtcgggaatctggtgctcggtggcatagccgcggctcgactgcatcacagcggtgggcagtgccttggccagcgtggccagctcctgctggcggcgggcgccctggcgggccagactcttcaggtgatacatgctgctaatcgcttggattcttcgggttccaactctttttttattctgttctacacaaccgctcgctactcgacgccgcaccaaactggccgaggcactcgcatagatatgtatatatatgtcggctttttcggagcgccgagctttttgctctccggcgagagcggtgcaaacttttcaccgaaaagctctgtgggtggagtgcccgctagaaacgcggcaccaccgccggcggattactcgcttcgttgccagggcgagattaggtatttgttatcggtttcacgttcacgtttttctttgactccaagattaagctatgatttatcatcttcggctatatgttgaattcaggggggtactgagtttcttttagaaagcacttgaaaatctaagtaataaacatcgtacagtacaatacaaacgatatatacaaggtatattttatataaggtgtttttttaaaggttttgctaaattttttatttagagctcatactttcaggaatttaccacgtaactttcgggcttatcatgctattgatctttcacacaattcctatgtgactgttttgagttttaatccttagttaaaatagaaataaaacacagctagcttacttaaaaagaaacaaaatcttgtggactatatttgaagtacataattaaagaagagtttatacatgtatggtgctgtttcgctcatggtaaatggtgctgagcgaggatcggatgaaggcatcgctccgttccacgaagccatccaaatgggtccacaggaaccagaagctcagggagaaaaacagcactttgctgacccagtcgaggatatacagccgtcgcaggaccttcctggcctgcggcagagtgtcctcgctctcgcccagtatataggtgcgcatgcccacaatgtagttactgatgtatgtctcccaattgacctgacccaccgacgtgtcgaagaggtcctgatccaggaggctcagctgactgctcatctcctggaagcgctcgtttcggaactcccaccttttcgttgtgtagtactgcagcagcttcagacccatggacactttgcgttggacattgagtaagctggatgggaataatccatgtgttaataggagaacttaaaatttaaccgtttacttacaatggcttttggccaaagacgagcagccaaaagtcgatgaagtatgcgggcagatagtggaagaagatgacgcagaaaaggtggtggtagtagttctttttgatggatccacccggataccagagcgcaaagctgagcggcgtttcgtagaagaatcgacgacccgtctcgatgctgtcgccccaggacatcagcgccttgctggagatgcacagattgcagaactcaacacccgtctgcttgttacccttctcctggctggcctttccgcgctgatagccgcacaggatcatgccgttaatggccttgtctacgggtatcaccgtggaggcgtagtccggattgcagtgcatcgatcggatgactccgcgggcggcgccgatcattaggccggtgggtccattgacgccctcgatccagccgggcaatggctcgtgaatggcggccgtcactgcaatggatttaataaagcaattagccaggaggcacaaaaacagagtagacactatggtatacccaccgatcgagggccttgtgatgattatgggcagcttattgttgtatctgcaaattaaatcttccgacagcgccttgctgtaagcgtacgtgtttggcaagccgtttagtaatctaaaaataagccaaagaaactggttattaggtgccaccaaggtacgcctgtaaaggagcatgaaactataggcacttcattatatttcagccagtatttagatagcccaaatctttataagcgtttgtttactaaaagtaagtgctgctcaaaattcattggacgcgaataataagagcaataatatctgcggctcaggaagagcaatttcaaccacttacttgggtgtaatctccgccagagcttcgtcgtccatcgtctccaccatttcgatgatggagaaggggttctgtggagccgggtaggctcgctcctccagaacgctctcgttgcactggcagtatgaggtggacacgtggaccagagcctgcagctggctcatcttctcagcgaggcggaggaccttcagggtgcccaccacgttcatcatgaccatgggacgcagcggctggtcgaagcgcacattggccgcacagtggaagaccacctcgacgttggaggcgagtgtgttggtgtcattggcgctcaggccaaggtccggctccagcagatcgccctttaccacgcgcaccttgtccacgatgccgggattcttctccagcagcttgccaaagatctgaaagcgaaaacaagaggcggtcggtcattagttaagtgtcatggcgttggaattgcaatttggatccaaatggcctgctgttccactggctagaatcgcgtaatgggccatgtcgctggtttcagcgccggcttaacgtccaacaattaagagtcattgtaagtttttggattttttctaccaataatgatcaccttgacttataaacgccgtggatgtgtttgagtgggttgcattgtggactccacgtaacaccgaatctcagtgtctttgagctgtgcgataatttggtaatttgcgggagttgcgtttgaggttttccccttttttgccggagggcaaacggggtattagttcagttatagcgtataattatatagaatttatatctgagttcacgtgcgagtgcgtcgcgattcggattcggattcggaattgtcaggctgtctgaagtggaaattatggctaacggccggtgggcaaggccataatactgaaacactcatcgcttcgcattttgtaagatctttattgacgtgtggctgaattgaaatggagtgtctcaatctatgactgactcacatatcacactttaaaataagcggaaaaccattatacagtcataaacgaataataaataaatgattaattgtatcaaaactatagtagctatgcaatacgagacttacacacttttgtgcttcatgcaagctaaaattttggggttctcagtcgtaataataccataagcagtattatgaaatatcaaacatttactagggaattacgaaaatagctttagtcatatattctttgtggtttagaattttagttgtgctgttagtaaatattgctcaatactttttggagaacccccggaaatgcttttttttttgcttcagctagtaattattagaaaatccaaatcacacaaatcaatatagttagttttaattggcaacatagcacattatacgattccatggaattttgatgcacttcgttgcactttatatggccattacgcatacgtcatgtggtacaacggagaatggcaatctaagtagctgctaattaagctgcttaaaacgagggggctgggctttatttacgagccataaactattcaatttacagcatttaataatggaatgctttgagttccggtaactggaggcgaatctgaatacttaccacacacttgaagtactgctccttgcgcacactgggatcgaccccttttttggtgcgtatcaatagatatatgacgttcaggtcggcacagctacgcagtagtttctccaccagaaccttgcccataaatccggtggcacccgtaataaggatggttttgtttgcatagaacttggcaatatcggactcgccgcaatcggcatcgctcctcagtatgtccatggttaagcagctgtctgaaatcggaaagtagtctatacattcattatgagagtaaggcttttaaaggatttagtttactttgtaaaatttagcaagggaagttttaatagtttactatttatattttcaagttcgctttactggccgtttgtttgtctaacctactccgcgccagattctatttcaatgtcagcagcggatactggtgaaatacgatcaggcagagacaactgcggagtgttgaccaaccgcgtgtaattgccgcggccaattgggatttcgggtgtccgttcccctggaacccccgaaccccccatcaccattcccatcaccacctgggataccatcacacctcgcacatcatctgtttgcgttggtaaatagtgacaagtttaaaggcctgttagcggccaccgactgtttgtttatttcatgtttggaaagtgtacgtccggcaatgggttaatgtttggaccattgctttattttgggtttttattttcggctctttagtttttagtgtgtgcattaggctcttgggcaatgcaagtgcgggtggaagtccgagcaattagccaggttatgatgacttaagcgatttccacccataaaaagcctctgcatttcactctcgttttatgggcgcactgattaaagtagtttacttttatatgccgacaacaggagaaacataataaacgaaatcttatggaatgtttttctttgtaataaatgcgctgcagctttattttccattgcttaacatttaagaatgaaactgaatcattgattgattgcaaaattatagaatgcagcatttgttaaattattcaaacacaattgtttacgtttccgacaaggcaattaaaacatttataagttattcacatattctagttttccgtactattttttctttggtacaagtgtctcacagtttacttaaaagtgcttacactcaacattttattaagtaaaatacaacaattggttagtttctaacttaacttaacatgaaagtcaaaaagcactttaaaatgtcttgagttgaaaactttgttgtcccaggaaattgtatgtttaaatatgcacaatttggcaatctccttcactcatgcaaatgtttgtctccaaacaaaagacttaagacacaaactcgaaacaatttgctcttttccattctaactgcattaatttccattgaattttattcccattgttatggccgatccgatctcagttttttttaattaactagcacacactatacacagcatttcacgcctcctttttgggcggacggacagattcacgtaacttgaggcacgcaaattatgacattcgcacacatttcgcttacaattgttggattgacttttgttttcattggggcttttcgtgtcaattgtaagggcaaacacacacggagccaaagttcacgtggggattaggatggccaacgactattaggccaagttattagcgcctcgattgaagctgaaactcacttctcaggcgacggtgactggcgaatcttcgagtgttgttggcgatctcgaattgaatcggttgaaaactcagcggcaactgaattgaaagcgggcaattggcttgaagttatactcggctcaaaggaaactcggctctgccggcgtcgctgcctcgccaacgccgcaccaacacagttgaccgctctgtgtgaacgtgtgcgccgacagctgtgtgtgtgtgtgtgtgtgtggccaggtgagcagtgctgctttccgggttgtatcaggcgtaagatgagcttgccctcacccaggcaataaagccgaaaaacacacaccgaatcgaaacactcgaattaaagccaattaaacggcacttaaagtactccaagtcgagcgagggcaatgctaatggattccccgccttcggaatcgggccatacgaactgcaatggcctcacaactctagacggagtccaaaacaaaattcccctcgaccgcaaaaaaaggagccgcaccaaaccaaggccagccacttgaggtggccctaaaaaagcgcatgtcatccatggcagcgaaacagatgcatgcatacagtgaggatcctttataaggaactttctttggagggcttgtctcacacacgcacacacatttttatgaaacatttcatgagttgcattaaaatcattttacattcaagtactggtcacagtactttatttactcttattaaaaacacgtttgtaatgcatctttagctcaaatgataaattcttaaatatgataatgaaatcatttgcttgacacctgtacatttaacctattaaaaaaatttaattaggatttgaaaacctaattgataatcgcatttatttgtgtctccactgtagtggtatatgcacgaattcagacaactcataccagcgcatttccgcgctaaaatgcattcatgcaatttttggctgtagaagagattttttcctcttggaggaacctgatccacggctgcaagctgtgataatggccaggtaaaaaaaaaaagttgccccgtcaggtgagttgttttgtgggctggcgtaatgt

SEQ ID NO: 11135 - DNA, 1696 bp, DROSOPHILA
ttttcaaccgattcaattcgagatcgccaacaacactcgaagattcgccagtcaccgtcgcctgagaaactactttccgatttcagacagctgcttaaccatggacatactgaggagcgatgccgattgcggcgagtccgatattgccaagttctatgcaaacaaaaccatccttattacgggtgccaccggatttatgggcaaggttctggtggagaaactactgcgtagctgtgccgacctgaacgtcatatatctattgatacgcaccaaaaaaggggtcgatcccagtgtgcgcaaggagcagtacttcaagtgtgtgatctttggcaagctgctggagaagaatcccggcatcgtggacaaggtgcgcgtggtaaagggcgatctgctggagccggaccttggcctgagcgccaatgacaccaacacactcgcctccaacgtcgaggtggtcttccactgtgcggccaatgtgcgcttcgaccagccgctgcgtcccatggtcatgatgaacgtggtgggcaccctgaaggtcctccgcctcgctgagaagatgagccagctgcaggctctggtccacgtgtccacctcatactgccagtgcaacgagagcgttctggaggagcgagcctacccggctccacagaaccccttctccatcatcgaaatggtggagacgatggacgacgaagctctggcggagattacacccaaattactaaacggcttgccaaacacgtacgcttacagcaaggcgctgtcggaagatttaatttgcagatacaacaataagctgcccataatcatcacaaggccctcgatcgtgacggccgccattcacgagccattgcccggctggatcgagggcgtcaatggacccaccggcctaatgatcggcgccgcccgcggagtcatccgatcgatgcactgcaatccggactacgcctccacggtgatacccgtagacaaggccattaacggcatgatcctgtgcggctatcagcgcggaaaggccagccaggagaagggtaacaagcagacgggtgttgagttctgcaatctgtgcatctccagcaaggcgctgatgtcctggggcgacagcatcgagacgggtcgtcgattcttctacgaaacgccgctcagctttgcgctctggtatccgggtggatccatcaaaaagaactactaccaccaccttttctgcgtcatcttcttccactatctgcccgcatacttcatcgacttttggctgctcgtctttggccaaaagccattcttactcaatgtccaacgcaaagtgtccatgggtctgaagctgctgcagtactacacaacgaaaaggtgggagttccgaaacgagcgcttccaggagatgagcagtcagctgagcctcctggatcaggacctcttcgacacgtcggtgggtcaggtcaattgggagacatacatcagtaactacattgtgggcatgcgcacctatatactgggcgagagcgaggacactctgccgcaggccaggaaggtcctgcgacggctgtatatcctcgactgggtcagcaaagtgctgtttttctccctgagcttctggttcctgtggacccatttggatggcttcgtggaacggagcgatgccttcatccgatcctcgctcagcaccatttaccatgagcgaaacagcaccatacatgtataa

SEQ ID NO: 11136 - protein, 531 aa, DROSOPHILA
MDILRSDADCGESDIAKFYANKTILITGATGFMGKVLVEKLLRSCADLNVIYLLIRTKKGVDPSVRKEQYFKCVIFGKLLEKNPGIVDKVRVVKGDLLEPDLGLSANDTNTLASNVEVVFHCAANVRFDQPLRPMVMMNVVGTLKVLRLAEKMSQLQALVHVSTSYCQCNESVLEERAYPAPQNPFSIIEMVETMDDEALAEITPKLLNGLPNTYAYSKALSEDLICRYNNKLPIIITRPSIVTAAIHEPLPGWIEGVNGPTGLMIGAARGVIRSMHCNPDYASTVIPVDKAINGMILCGYQRGKASQEKGNKQTGVEFCNLCISSKALMSWGDSIETGRRFFYETPLSFALWYPGGSIKKNYYHHLFCVIFFHYLPAYFIDFWLLVFGQKPFLLNVQRKVSMGLKLLQYYTTKRWEFRNERFQEMSSQLSLLDQDLFDTSVGQVNWETYISNYIVGMRTYILGESEDTLPQARKVLRRLYILDWVSKVLFFSLSFWFLWTHLDGFVERSDAFIRSSLSTIYHERNSTIHV

SEQ ID NO: 11137 - DNA, 2479 bp, DROSOPHILA
caccggtcagtgtttgcgtaaattcgagaaagcccacaccaagggaataacctgtctgcagttctcgcgagataacagccaggtactcagcgcatccttcgactacacggtgagactgcacgggctgaagtcgggaaagatgctgaaggagttcaaggggcattcctcctttgtgaacgaagccacctttacgcctgacggacacagcgtgctcagcgcatcttccgacggcacagtaaaggtttggtcccttaaaacgaccgagtgcgtggccacgtacaagccccttggcaacgagttggccgtaaacacagtcctcattctgcccaagaatcccgaacacttcattgtctgcaacagatccaatacggttgtcattatgaacatgcagggccagattgtgcgatccttctcgtcgggtaagcgcgagggcggtgcctttatctcagccactctttcgccgcgaggagagttcatatactgcgctggagaggatcaggtgctttactgtttctccgtctcctccggtaaacttgaacgtactttgaacgtaagctgctctttaaactatttgttttcaaactgactttaaacgtgatatttattccataggttcatgaaaaggacgtcattggcctgacacatcatccgcatcaaaatctactggccagctacagtgaggacggcctgctgaagctttggaagccttagaccatataagcaattgactttcacacctagttagttttagttggtggtcttatttgagctgccgaaatatacctactgaccccaaagcgcttgcagtttttttctcatgccctcagccattcctcacatcaatatcttcaatcttgcctatatgaaacaaattgactttaattaagcattatgcaaagcgccaatctctcagagcgctaatccacagagtttccctcaattgcctcaatccagcacctaaattagtcgagcagcgacactcagccggttcacttgcaacatgaagagcgacgagatcatcgagaagatacgcaacaagttgaaggaatcggatcctgcccggcgcaccgtcgtcaacacgtttcagttcaacttcaccgatgcggatggtaatctcatcaagagcatgggtgagtgggaaagaggatgcctggttgtgggtcagcccaccgttgaccgtctcatcgtagtctttgatttcaaagcgttggacatctacgaggggagtgccaccagtgtcgatgcacaggtcaccatttccgatgaggacttctacttggtgggcactaagcagaagactttccaggaggtgttgcagcaggagaaggctaagatcgatggcgatgaggaggctatcaacaaaatgctggagaagtttcgcataaattctcaaaactagctcggtgtcaaaagtaattatgcatgcatttcgtttattatatgcgacaatttaacgtttattgtttattcacttcaccccaataataaattataacaaattaaaatatttctatttaattctaagggaagtcaagaaagaaattagtaggagttacaacaattaaaaaataaacaattatcccaccaaaaaatgtaatcaaatcgtgacttatttaattggttttagtattcatttatttaattacctttatttatatttaatgttaacatggaattgtttttgtaggtgtttccttttaatttgaaatttttgttctgcgatttatcatttaactattttatttgttattcggttatctctctttttggcaactggcgccatgttctctgccaataagtgcgcccgagattcggttttctgatttctgtatcgggtttttgaaatttgaaaaacgtctctcaattcaaatgtgtttgactcctttctttgagtgtcttatttataggtttaattgtaattttaacatttgctttttggggtgttttagtttaactttgtgttactttagtaaacattttagtttagaacattttcttttttggttttgggataggtttttttgctggggacattatttttcaaactttttattagctttacgttttcgtactatttttctttaaatttatgtttaatttttattgctagaacacaaatttagagtttttattaactaattgaattcttcgcttctgggttttctgttcggtttttatgtaatacaacaacaaaatttgtacacttaaactaaagtttatttatacgaattaagtcctaggagttcttgatcattatgcttttttatgcaacaatttaacaacggtttacttcatcaatgtaattgtatttattttagctttttttatcattcttttttttttaattaatgtagcatttttgtaacacctacatacctttattattaatcgtttttacgtcaaacgggatttttttttaatttccatcgctgatttaagccatattctttaatttcctcaattttctttgcaaaacgta

SEQ ID NO: 11138 - DNA, 404 bp, DROSOPHILA
atgaagagcgacgagatcatcgagaagatacgcaacaagttgaaggaatcggatcctgcccggcgcaccgtcgtcaacacgtttcagttcaacttcaccgatgcggatggtaatctcatcaagagcatggcgttggacatctacgaggggagtgccaccagtgtcgatgcacaggtcaccatttccgatgaggacttctacttggtgggcactaagcagaagactttccaggaggtgttgcagcaggagaaggctaagatcgatggcgatgaggaggctatcaacaaaatgctggagaagtttcgcataaattctcaaaactagctcggtgtcaaaagtaattatgcatgcatttcgtttattatatgcgacaatttaacgtttattgtttattcacttcaccc

SEQ ID NO: 11139 - protein, 107 aa, DROSOPHILA
MKSDEIIEKIRNKLKESDPARRTVVNTFQFNFTDADGNLIKSMALDIYEGSATSVDAQVTISDEDFYLVGTKQKTFQEVLQQEKAKIDGDEEAINKMLEKFRINSQN

SEQ ID NO: 11140 - DNA, 4324 bp, DROSOPHILA
ggcttctgccaaagccttggtgagaaccttgaccttctgctcgtacgcggacttaagatcctgtagggaaagaaggtaatagtatatcaagtatatcattggactcgagttataaggcaccttgaatatctgtgactgggtgtcgtactccgaacgcagcttgtcatacactcctttggagatggctagtttcttctccgtgagcacacacttgtcttgctccgccttgatccactgctggctcttctccagacgagcctgcgtgtgatcacattcggcggtctttagctgcaacatgtccttggtcacctgcagcacatccttaatcgagtctacttgtgtcctaagcactgatatctgctgctcctgctgtttgttcaccttggtcttctcgaacagcagggttttggcctttagaagcagctcctcctgctcttgtcgtgatttgggagcatctgtgccgcccagcatgacggactgcttgagcgactgctccaactggaccactctccgctttaaacgctcattttccgccttggcttcctgcaatcagggtcagtaagtgggtgcagcccgtggagacgagtaactaacctcaaagtctttgcggagcgctccgatccgtttgcgagactcctctagtagtgcctgtttttcgctttccaacgtgaaaaccatgtccagcagttcgttctgcggctgctccggctgacgcacttcctcctgcccatttgctgttatattgttgtttaggtcaccgccaacagcttcatcttcgttatgatcggccattttatgaagaattctttttaaatgataaaaattcgtagagcaatgtgcgttttccgtgctttttgggatgtgttttctttttgtattaatagaccaaatagatgcacgctctatttataggacatcccactctccggatcgctctctgcctgctcttggccagatcgctctcccgaaataacaaactgtttccctccaatttagtttacgcctcagcatattctgaagatcagtttattatacattgaagcatggatgagaaaggattgcggatgtgcggtgttaatacagatcgcgaagggcaacacaattaaattgttgttacaatcaatggggcgacaattgaaagtgagtgatttgattaaaattaaatgcctaaacaagatagaagaaatgtgcttcgctcgcggtgaagaatgtctaaccgtccagctcgccggcagcgcatgcatcggcgtaactcttgccgctcttgtcctccggattcagcttgatcatgtcgtcaatacgcaaaatggtaatggcggcctccgtggcgaacttcagcgacttgatcttggacatggcgggctccaaaactccagccttcttgttgtcccttaccactccctcgatcagatccagaccggtccacttaagatccgaacgctcgggcttcgtctggctggagttgtggtaggagcggagcttggccactagatcagtggcatccttggccgcgttcacggacagagtcttgggaatgaccagcagcgactttgcgaattcggcaatggccagctgttcgcgggaagccagcgaggtggcaaagttctccaggtagatcgacaaagcagcctccacacagccgccgccggctacaaccttcttgctctccagcacacgcttcaccacgcacagagcgtcgtggacggagcgctccatctcatcacagtagaagtcattgggaccacgcaagataatggatgcggcagcactaaaaaggcatagggatacgataaagcaaactatgttactgcatgatataatctgcacttaccgtgccttagtgcccttgatgaggataagttcatcatcgcagatgcgctcctgggccacctctgcggcctctcccaccattgaggcatcgaagctctcctcaccgtccatgttggtcagcgaggtaataaaggcggcgccggtagccttagcaatgatcttcagatcgctcttcttcacacgacgcacagccatggctccagcctcaacgaagtacttcatgcacaaatcatcaacgccgccgctaaccagtactacattgacaccggttccgaggatcatgttgatgcgctccttggtaatgtccagctcacgggcacgaatagcctccagcttgtcgggatcattgatcaagacctggacacccatcttcatcttggtcttctgcagcgagaagtctaggcaggcaatcttggcgttcacaatcttcttgggcatctgctgggaggcaattgtgcagttcaaggcatagccgggaatcagcaccgattccctggcagacttgccatgggccttcaggacattgatggctttaatcgaataggctgcctgcccacggggatctgtgattttcaccgactgggcagcgtccacaaccatggctgagaagaactctgcgtcagcaccaatgatcttggagctcatcgaggtcttggcaatgttaatcagggaatcgcggcccagctcatcaacgggagcggtcagatgctccgagatgtacttgcaggcctccttgcaggcaatgcggtagccggagattatggaggtaggatgaatcttctgcttgaccagctcgtcggcgtttttcagcagctcagcggccaggataaccaccgaggtagtgccatcgccgacctcctcgtcctgcagctgagccagctcaaccaggacccttaaaatttagaaatgagtacttctttgaaagatttcccacatcaacaactcacttggctgccgggtgctccacctccagcagtcgcagaatggtggctccatcgttggtcactgtgacatcgccgatgtcgtccaccagcatcttgtccagacccacgggtcccaaggagcttttcacgatgttcgatatggacagagcggccataactgaaagcatataaaagccgagttgtagtcataacctcacttcgcataggcttgtccacaggatcttgtagctccttggattcaatgagtttttttgttaatccaattaaaataagatcgccctcccccgggttggttccggaacattcttcgtggagagcgtgacccgcgatgagtaagaaacgtgctccgccggcagacgcaccgcagatgttgacaaaaccccgggattctcaccgttctgtgtgcgcaccgatgcgccggattggcgggtgccagcaatggacagaggagaggccagggtcgacattttcctaagttcttccgcgacttttaataaaaaacagataaatcaaatacgctgaaaaaccgcacgttaaaccgcctgactcactttaagacttcgagatgaacaaaaacccgatgtcgattcgatactatcgagtgcaagattttttcttggagagcaaggattccataacatttataagtttatactatgtgttacattagcgcagcatcaaaaatatatagaacatatattggcttatttattattaggcatattttgcagcacattcaaagcggcgttcaaagtatcgatggtaatcgataaccgattgtttagggaaccctggttgagcatcaggtaacggttttttaaatattaattcaagattattattaattattaattattaattataaaattgtgctttctgatggagtaaaagtattcagtaggcattgactttgatttcgcattacatatcgtgtgctctgtaagatattttcagtttacctcttgatctcaacgatatacagcccaaatcgaagcatttcttacatctacaacaaattgttaaagtaaacattttttttaacttttatttattacgataaagatgtcagactgcggagcgcgccccaaaaaacccatgagcgccttcatgttgtggatgaattccaccgggcggaagcacataaaagcggagcatcccgattttagtgtccaagaagtgtctgtgaagggcggagagatgtggcgagccatggccgatgaggacaagatcgtgtggcaggagtcggccaccacggcaatggccgagtacaaggagaagttgaagcagtggaatttccccaaggagcaccgcttttcggacacgcaatgtatttgttcctcaaatactaaccaatgccccaccctttttgtgtacgacaccatggatgactcgatgactccgatctgcaggaagtgcttatcaaagaccaggtgccttcactaagcgtttactacatttgttaatttattgttgtactaaaatccacaagctaatataaatttgtttttgataaatttaaatattaacacttttcgtagcatacatacaga

SEQ ID NO: 11141 - DNA, 1969 bp, DROSOPHILA
tgagtcaggcggtttaacgtgcggtttttcagcgtatttgatttatctgttttttattaaaagtcgcggaagaacttaggaaaatgtcgaccctggcctctcctctgtccattgctggcacccgccaatccggcgcatcggtgcgcacacagaacgttatggccgctctgtccatatcgaacatcgtgaaaagctccttgggacccgtgggtctggacaagatgctggtggacgacatcggcgatgtcacagtgaccaacgatggagccaccattctgcgactgctggaggtggagcacccggcagccaaggtcctggttgagctggctcagctgcaggacgaggaggtcggcgatggcactacctcggtggttatcctggccgctgagctgctgaaaaacgccgacgagctggtcaagcagaagattcatcctacctccataatctccggctaccgcattgcctgcaaggaggcctgcaagtacatctcggagcatctgaccgctcccgttgatgagctgggccgcgattccctgattaacattgccaagacctcgatgagctccaagatcattggtgctgacgcagagttcttctcagccatggttgtggacgctgcccagtcggtgaaaatcacagatccccgtgggcaggcagcctattcgattaaagccatcaatgtcctgaaggcccatggcaagtctgccagggaatcggtgctgattcccggctatgccttgaactgcacaattgcctcccagcagatgcccaagaagattgtgaacgccaagattgcctgcctagacttctcgctgcagaagaccaagatgaagatgggtgtccaggtcttgatcaatgatcccgacaagctggaggctattcgtgcccgtgagctggacattaccaaggagcgcatcaacatgatcctcggaaccggtgtcaatgtagtactggttagcggcggcgttgatgatttgtgcatgaagtacttcgttgaggctggagccatggctgtgcgtcgtgtgaagaagagcgatctgaagatcattgctaaggctaccggcgccgcctttattacctcgctgaccaacatggacggtgaggagagcttcgatgcctcaatggtgggagaggccgcagaggtggcccaggagcgcatctgcgatgatgaacttatcctcatcaagggcactaaggcacgtgctgccgcatccattatcttgcgtggtcccaatgacttctactgtgatgagatggagcgctccgtccacgacgctctgtgcgtggtgaagcgtgtgctggagagcaagaaggttgtagccggcggcggctgtgtggaggctgctttgtcgatctacctggagaactttgccacctcgctggcttcccgcgaacagctggccattgccgaattcgcaaagtcgctgctggtcattcccaagactctgtccgtgaacgcggccaaggatgccactgatctagtggccaagctccgctcctaccacaactccagccagacgaagcccgagcgttcggatcttaagtggaccggtctggatctgatcgagggagtggtaagggacaacaagaaggctggagttttggagcccgccatgtccaagatcaagtcgctgaagttcgccacggaggccgccattaccattttgcgtattgacgacatgatcaagctgaatccggaggacaagagcggcaagagttacgccgatgcatgcgctgccggcgagctggacggttagacattcttcaccgcgagcgaagcacatttcttctatcttgtttaggcatttaattttaatcaaatcactcactttcaattgtcgccccattgattgtaacaacaatttaattgtgttgcccttcgcgatctgtattaacaccgcacatccgcaatcctttctcatccatgcttcaatgtataataaactgatcttcagaatatgctgaggcg

SEQ ID NO: 11142 - protein, 557 aa, DROSOPHILA
MSTLASPLSIAGTRQSGASVRTQNVMAALSISNIVKSSLGPVGLDKMLVDDIGDVTVTNDGATILRLLEVEHPAAKVLVELAQLQDEEVGDGTTSVVILAAELLKNADELVKQKIHPTSIISGYRIACKEACKYISEHLTAPVDELGRDSLINIAKTSMSSKIIGADAEFFSAMVVDAAQSVKITDPRGQAAYSIKAINVLKAHGKSARESVLIPGYALNCTIASQQMPKKIVNAKIACLDFSLQKTKMKMGVQVLINDPDKLEAIRARELDITKERINMILGTGVNVVLVSGGVDDLCMKYFVEAGAMAVRRVKKSDLKIIAKATGAAFITSLTNMDGEESFDASMVGEAAEVAQERICDDELILIKGTKARAAASIILRGPNDFYCDEMERSVHDALCVVKRVLESKKVVAGGGCVEAALSIYLENFATSLASREQLAIAEFAKSLLVIPKTLSVNAAKDATDLVAKLRSYHNSSQTKPERSDLKWTGLDLIEGVVRDNKKAGVLEPAMSKIKSLKFATEAAITILRIDDMIKLNPEDKSGKSYADACAAGELDG

SEQ ID NO: 11143 - DNA, 2874 bp, DROSOPHILA
cgcgcttagtactcgataacaaatcgtcggcgggactggactaccgactatttcaacgaatcattcgattcccgattgcttccgtgaaatcgatattttctgacccagcttcatgacatccctgttgagttgaatacgcaaaggtggcaaccttatacggcgactgaataaaataaaagtggaattgtaaattataagtgtaagcactagcaatggctgccaccccaagcgcacccgccaagtccgagatgatcgacctgaccaagttgagtccggaacagctgattcagatcaagcaggagttcgagcaggtgcgttccgcatgtgggtgtgtgatgagtcaagtgtgctcgcggagggggtttctggaggaggggcgccccaattggcacatgcttctaaaatcggtacatttttgtgatccttaggagattaccaacgtacaggactcgctgtcgacgcttcacggctgtcaagccaagtacgccggatccaaggaggcgctgggaacctttcaacccaattgggagaaccgtcagatcctggtgcccctgaccagcagtatgtatgtgccaggacgggtcaaggatctcaacaggttcgtcatagacatcggcaccggctactacattgaaaaggtgatttacatttccaatcgaacctagaatatttattgattgccatctgtttctcaaacaggatctggaaggctccaaagactacttcaagcgacgcgtggagtacgtgcaggagcagatcgagaaaatcgaaaagatccacctgcaaaagacgcgcttctataactcagtgatgagtgtgctggagatgaagcaggctgctgcagcgaaattgcagtcgcagcagcaatcgcagccggcggttacccagagctcctagactacggagaacgacagagacacgagacacggaaagcattaaattattaaacttattaacgagatgtgtgcatttaattaacgtagtttattaaattgttcagctatttcttggcttctgccaaagccttggtgagaaccttgaccttctgctcgtacgcggacttaagatcctgtagggaaagaaggtaatagtatatcaagtatatcattggactcgagttataaggcaccttgaatatctgtgactgggtgtcgtactccgaacgcagcttgtcatacactcctttggagatggctagtttcttctccgtgagcacacacttgtcttgctccgccttgatccactgctggctcttctccagacgagcctgcgtgtgatcacattcggcggtctttagctgcaacatgtccttggtcacctgcagcacatccttaatcgagtctacttgtgtcctaagcactgatatctgctgctcctgctgtttgttcaccttggtcttctcgaacagcagggttttggcctttagaagcagctcctcctgctcttgtcgtgatttgggagcatctgtgccgcccagcatgacggactgcttgagcgactgctccaactggaccactctccgctttaaacgctcattttccgccttggcttcctgcaatcagggtcagtaagtgggtgcagcccgtggagacgagtaactaacctcaaagtctttgcggagcgctccgatccgtttgcgagactcctctagtagtgcctgtttttcgctttccaacgtgaaaaccatgtccagcagttcgttctgcggctgctccggctgacgcacttcctcctgcccatttgctgttatattgttgtttaggtcaccgccaacagcttcatcttcgttatgatcggccattttatgaagaattctttttaaatgataaaaattcgtagagcaatgtgcgttttccgtgctttttgggatgtgttttctttttgtattaatagaccaaatagatgcacgctctatttataggacatcccactctccggatcgctctctgcctgctcttggccagatcgctctcccgaaataacaaactgtttccctccaatttagtttacgcctcagcatattctgaagatcagtttattatacattgaagcatggatgagaaaggattgcggatgtgcggtgttaatacagatcgcgaagggcaacacaattaaattgttgttacaatcaatggggcgacaattgaaagtgagtgatttgattaaaattaaatgcctaaacaagatagaagaaatgtgcttcgctcgcggtgaagaatgtctaaccgtccagctcgccggcagcgcatgcatcggcgtaactcttgccgctcttgtcctccggattcagcttgatcatgtcgtcaatacgcaaaatggtaatggcggcctccgtggcgaacttcagcgacttgatcttggacatggcgggctccaaaactccagccttcttgttgtcccttaccactccctcgatcagatccagaccggtccacttaagatccgaacgctcgggcttcgtctggctggagttgtggtaggagcggagcttggccactagatcagtggcatccttggccgcgttcacggacagagtcttgggaatgaccagcagcgactttgcgaattcggcaatggccagctgttcgcgggaagccagcgaggtggcaaagttctccaggtagatcgacaaagcagcctccacacagccgccgccggctacaaccttcttgctctccagcacacgcttcaccacgcacagagcgtcgtggacggagcgctccatctcatcacagtagaagtcattgggaccacgcaagataatggatgcggcagcactaaaaaggcatagggatacgataaagcaaactatgttactgcatgatataatctgcacttaccgtgccttagtgcccttgatgaggataagttcat

SEQ ID NO: 11144 - DNA, 763 bp, DROSOPHILA
acacatcccaaaaagcacggaaaacgcacattgctctacgaatttttatcatttaaaaagaattcttcataaaatggccgatcataacgaagatgaagctgttggcggtgacctaaacaacaatataacagcaaatgggcaggaggaagtgcgtcagccggagcagccgcagaacgaactgctggacatggttttcacgttggaaagcgaaaaacaggcactactagaggagtctcgcaaacggatcggagcgctccgcaaagactttgaggaagccaaggcggaaaatgagcgtttaaagcggagagtggtccagttggagcagtcgctcaagcagtccgtcatgctgggcggcacagatgctcccaaatcacgacaagagcaggaggagctgcttctaaaggccaaaaccctgctgttcgagaagaccaaggtgaacaaacagcaggagcagcagatatcagtgcttaggacacaagtagactcgattaaggatgtgctgcaggtgaccaaggacatgttgcagctaaagaccgccgaatgtgatcacacgcaggctcgtctggagaagagccagcagtggatcaaggcggagcaagacaagtgtgtgctcacggagaagaaactagccatctccaaaggagtgtatgacaagctgcgttcggagtacgacacccagtcacagatattcaaggatcttaagtccgcgtacgagcagaaggtcaaggttctcaccaaggctttggcagaagccaagaaatag

SEQ ID NO: 11145 - protein, 229 aa, DROSOPHILA
MADHNEDEAVGGDLNNNITANGQEEVRQPEQPQNELLDMVFTLESEKQALLEESRKRIGALRKDFEEAKAENERLKRRVVQLEQSLKQSVMLGGTDAPKSRQEQEELLLKAKTLLFEKTKVNKQQEQQISVLRTQVDSIKDVLQVTKDMLQLKTAECDHTQARLEKSQQWIKAEQDKCVLTEKKLAISKGVYDKLRSEYDTQSQIFKDLKSAYEQKVKVLTKALAEAKK

SEQ ID NO: 11146 - DNA, 3892 bp, DROSOPHILA
aaatcattccggcgctgcagtcgcgttgcacccgttttcggttcgctccattatcccaggatcagatgatgccgcgactggaaaaaatcatcgaagccgaagcgtaaggtctttcaactgcataaaatagcttattactaacctaaaatctatcaactatcagcgttcagataactgaggacggcaagcgggcactgctgaccctggccaaaggtgatatgagaaaggtcttgaacgtcctgcagagtaccgtgatggcatttgatacggtaaacgaggataacgtctacatgtgcgtgggctatccgttgaggcaggatattgaacagatattgaaggccttgctatccggcagtagcttggaggactccttcaaaagtatgatgcgatttgaaatggcgaaagatcaaaactaatgattctttcttctctttgcatagctgtcgaaagtgccaagtacgcaagaggtctcgctttggaagacatcattacagaattgcatttgtttgttatgagacgtaagtttttatcaagttatcatcaagtcaagttattgatatgtattccaaacagttgagctgcctatgtcggtcatgaacaagcttattgtaaagctagctcagatcgaggagagattggccaaaggatgtacagaagtggctcaaactgcagctctggtagccgccttctttatttgccgagatatggtttcaatggagaagtgaaacaatgtgtactccaataataggttagaattaaattataaatacaaaaacataaaacacaatttatttactgcatgcttctctagtttaacaatcattaaacctttttaaagtggtttcagaggtaggaaatttttttttgttttttttttttttttggatgatcatgcgaaacaatatatgcataaagagactagaattctatgacgaattaattcccacacaagagaattgtttaaaacattaagaacattaagaattgttttaaacaatatttaagagaacccctctgatctgtaccattcgtggaacttctcgatatgctcaaagatgccgcggtcctcgctgcggcaccatacatcgtctggtgttatgttgacgcgttccaaagctgcctgcgaggtgtcctgaatgcgcgggtcatcctctttaaatcgcagcacacacgtaccaatgcactcacccatgcatgtgccgtgctcaaattcgtagataaccaagtagaaaaatggttcgccagggcattgaaagcccgattttagcacaagtaaagtatttggatcctctttcggcagtgacggtgagttgggagctttcgccacagcttgttcctgcggctgtggacaatcgaaagtttgtgatactagctgcgttgagaagctggcttctggctgcggtgagtgtggaatcgtgtttaatgctgtttgctgcgttaattcagggtttacgtttattgctgttgtctgcggtaagtcggggatctcacttgctgctgttggctgcggtgagtcggggatctcacttgctgctattggctgtggtgagtcggatgtgtcccttcttgctattggctgcggcgagtggttctcatcgatggacgtctttggcgacgcctctggcgaatcaggaatttccactatcatctcctcctgtggcggcgataaggataacctctcgcttgttgcgttagatttcggttggctgaatataaccgtgatattactacttcgttcgctttcgtcttcttcggagaaaacaggagtctgggttaaggatcgagttgcagcatcgggtcccaatttttgcacataaaaagagccatccacctggttgtcgccgtcagcattggtttcttctgttgtgcgagccggtccttcagcaatcctcctctccacgtccaggcacatagagcacttgaaatctgtacgctcgcgcttcttcggcagtcgcagggcgcccaccaagcatttaagatgagccgaagtggcggcacaagaactgcagcatagtatcacccacgataatctattataagttctaccactggggcacaggcagttgggctggtcgcatttcagattgcgctcgtggagctccctataggcgttccgttgcttctcccacgtggcatcgcgatcgggcacgaataccgactgcaggcgtatggaatccctgaaacgttccgaacgacaccaaatgcaacgcaagtaatatccggaggtcagagcgtactgacgcatgcatttcttatgggcgaatccgaggcggcagcagtcaccgtacacaacgcaatgcagctctaccttatagatggaactgaagcagatggggcaagtggcgttcctcggcggattcgactgcagctgtcgcttgtagtcatccatcggcctgcatttgtagcagtagcttttgtattggccgcagaactcgaaaacggcgcgattctccaggccgcacttcaggtgaaacaatgaccggcaacgatcgcattgcaaactggccccaatcttattgcagtaccaacatttcctcttctccgcggcggctgcctcctcgcggatatcgcgaagcagaaatcccaggattccactgctatctccgccgcgctgcggcaaatgcgttgagagtagctggtggattggatcaggaagtttacattagcgggagttctcttcatttcacaacaatcgcacttaccaggcaaaaatagtgcacctgcaaattgcgtacaatcatccattcgccaaagaccaggtcgtcagtgtccgaatatttgcatattaagcattgcagctccttgttatcttccatttgtaagctggccgctcagactagttttgctggacagatcaactcgtttgagtgctattatgaataatttttaaaactatcaacatgttttgcattccttttttactctattggcgggcaaggattttgaaaaacaataaatacaacagcgccttattatacttcaattccaccaagcacatttttggaaaagctctgtttccactgagcaacactcacaatgatctaatctgcttaactagctatattttgcgttaaccctacttataataaaattatttatttatgtgtaataataaattttaacgtattaaaaacttaacacaatataaacaaatattttgtgattaataattaaatagcatgataaccggaaacataactgtgcgtggtccgtaggttttattagatatgatatgccattatgaaaatcataagactatacatttataaagcgatttctgagattcaagattcaaatgctcgtttgtatgtttataaaatgtggtgcgtgcatatgcatacataatgctgcgacacatcacacgaaataccttcagtatttttaatagcaaaataatatacaataatacgcaaaaactatatctaacaattaagattctattttcatttcatcgattccactattccgcagcattcctaaacttggcgtcgctatctagacgagctttccaacaacaaagttcagtatatttaatgttaaacaaaataacacagttttgttaattgattgtgaatcacgtatctccattcaccttccccagtccgagaatcggattgtttataaccgcattatcatcgagtgcgttaaatagggcgtaggcgtaccatcggactggatccaccttaaataatatggctgccgagataaaaccagctcagcggaccaacaatgatcgctttaacacctccaaaaagccggaattgctgagtaagctggagggcagcagcgacgatgtgaacgcagcgatcctaattccgggcgaaaacggcgtaattagcgtttccgatgacaagtgcgtagctgtagcccattaaaaatatacacaaatggt

SEQ ID NO: 11147 - DNA, 1825 bp, DROSOPHILA
ttttaaaaattattcataatagcactcaaacgagttgatctgtccagcaaaactagtctgagcggccagcttacaaatggaagataacaaggagctgcaatgcttaatatgcaaatattcggacactgacgacctggtctttggcgaatggatgattgtacgcaatttgcaggtgcactatttttgcctgctactctcaacgcatttgccgcagcgcggcggagatagcagtggaatcctgggatttctgcttcgcgatatccgcgaggaggcagccgccgcggagaagaggaaatgttggtactgcaataagattggggccagtttgcaatgcgatcgttgccggtcattgtttcacctgaagtgcggcctggagaatcgcgccgttttcgagttctgcggccaatacaaaagctactgctacaaatgcaggccgatggatgactacaagcgacagctgcagtcgaatccgccgaggaacgccacttgccccatctgcttcagttccatctataaggtagagctgcattgcgttgtgtacggtgactgctgccgcctcggattcgcccataagaaatgcatgcgtcagtacgctctgacctccggatattacttgcgttgcatttggtgtcgttcggaacgtttcagggattccatacgcctgcagtcggtattcgtgcccgatcgcgatgccacgtgggagaagcaacggaacgcctatagggagctccacgagcgcaatctgaaatgcgaccagcccaactgcctgtgccccagtggtagaacttataatagattatcgtgggtgatactatgctgcagttcttgtgccgccacttcggctcatcttaaatgcttggtgggcgccctgcgactgccgaagaagcgcgagcgtacagatttcaagtgctctatgtgcctggacgtggagaggaggattgctgaaggaccggctcgcacaacagaagaaaccaatgctgacggcgacaaccaggtggatggctctttttatgtgcaaaaattgggacccgatgctgcaactcgatccttaacccagactcctgttttctccgaagaagacgaaagcgaacgaagtagtaatatcacggttatattcagccaaccgaaatctaacgcaacaagcgagaggttatccttatcgccgccacaggaggagatgatagtggaaattcctgattcgccagaggcgtcgccaaagacgtccatcgatgagaaccactcgccgcagccaatagcaagaagggacacatccgactcaccacagccaatagcagcaagtgagatccccgactcaccgcagccaacagcagcaagtgagatccccgacttaccgcagacaacagcaataaacgtaaaccctgaattaacgcagcaaacagcattaaacacgattccacactcaccgcagccagaagccagcttctcaacgcagctagtatcacaaactttcgattgtccacagccgcaggaacaagctgtggcgaaagctcccaactcaccgtcactgccgaaagaggatccaaatactttacttgtgctaaaatcgggctttcaatgccctggcgaaccatttttctacttggttatctacgaatttgagcacggcacatgcatgggtgagtgcattggtacgtgtgtgctgcgatttaaagaggatgacccgcgcattcaggacacctcgcaggcagctttggaacgcgtcaacataacaccagacgatgtatggtgccgcagcgaggaccgcggcatctttgagcatatcgagaagttccacgaatggtacagatcagaggggttctcttaa

SEQ ID NO: 11148 - protein, 582 aa, DROSOPHILA
MEDNKELQCLICKYSDTDDLVFGEWMIVRNLQVHYFCLLLSTHLPQRGGDSSGILGFLLRDIREEAAAAEKRKCWYCNKIGASLQCDRCRSLFHLKCGLENRAVFEFCGQYKSYCYKCRPMDDYKRQLQSNPPRNATCPICFSSIYKVELHCVVYGDCCRLGFAHKKCMRQYALTSGYYLRCIWCRSERFRDSIRLQSVFVPDRDATWEKQRNAYRELHERNLKCDQPNCLCPSGRTYNRLSWVILCCSSCAATSAHLKCLVGALRLPKKRERTDFKCSMCLDVERRIAEGPARTTEETNADGDNQVDGSFYVQKLGPDAATRSLTQTPVFSEEDESERSSNITVIFSQPKSNATSERLSLSPPQEEMIVEIPDSPEASPKTSIDENHSPQPIARRDTSDSPQPIAASEIPDSPQPTAASEIPDLPQTTAINVNPELTQQTALNTIPHSPQPEASFSTQLVSQTFDCPQPQEQAVAKAPNSPSLPKEDPNTLLVLKSGFQCPGEPFFYLVIYEFEHGTCMGECIGTCVLRFKEDDPRIQDTSQAALERVNITPDDVWCRSEDRGIFEHIEKFHEWYRSEGFS

SEQ ID NO: 11149 - DNA, 4803 bp, DROSOPHILA
ttatactattagctgtagcaatgccatatatataaacacacatatctataccaacatctttttgtttcttgcagtttggtgactggaatacaagatgcagatcttcgttaagaccctcacgggcaagaccatcactcttgaggtcgaaccgtcggatactatcgaaaatgtcaaagccaagattcaggacaaagaaggaattcctccagatcagcagcgtctgatcttcgctggcaagcagctggaagatggccgcaccctctctgactataacattcagaaggagtccactttgcacttggtgctccgcctgcgtggtggtgccaagaagcgcaagaagaagaactactccactcccaagaaaatcaagcacaagaggaagaaggtcaagctagctgtcctgaaatactacaaggtacacacaacaatctaccgacaccataccgaaaacattctgatctgttcttggaattcttgagtcttggtcttgtgctcattggcttaagatttggatatcagagtgactttaccagtgccctatattgaatgaacatgtgtacgatctcagtatttaatcactttctatgctctttcctttccataggttgacgagaacggcaagatccaccgtctccgtcgcgagtgccctggtgagaactgcggcgccggcgtcttcatggctgcccacgaagatcgtcactactgcggcaagtgcaacctgacctttgtcttcagcaaaccagaggaaaagtaattttgctacataagatcatgtacgtttccagaaatcaaataaaggtagtaattgaataataaattcaatcgctgaaattttcctttttttttattgttagttagcactagcgtggttagtaattgtttagcaaaacactaaagtttcatttagggtgtatggtttatttgtgaaaatattgaatacattttgtatactcgatttttactcgaccttgagaaatgcaatttgtttatggttaaccactcaaacgttaactatgtcgacgttaaggcttttggacaagaaagtcagtatatcggtggcttcctcgattctcttcgatgtcggcttgccagcgccatggcccgccttctggtagacgcgcaacagaacgggatttttctggaattccgagtcgcgaacagcttcctggagggccgcaatgaacttgagcgaatgcaaagggctgacacgatcgtcgtggtcggcggtcaggatcaaagtcgatgggtattccgtttcggcgcccttcggagtgtgcacattatgcagcggcgagaacttgtacaggttgtcaaagtgctccttctccgatgggtttccataatccgagcaccaagcgtggccaatggtgaacttgtggaagcgcaacatatccatgacactatgaaatcaatatatttctcacttggtcacaacaaacaggctatctacttacccaacttgagccacagcagctccaaacaaatccggacgttggttgatacacgagccgaccaaaaggcctccgttggagccaccttggatggccaaacgatccttggtcgtgtacttattctcgatcaagtactcggcagctgcttggaagtcatcgaacacgttctgcttgttcagcaggcgaccgccgttgtgccacttctcgccatattcgccaccacctcgcagattcggataggcgagcacaccatcgaatgtgtcgatgaacataagcctgcagagattgaaggatgtgttcacatatatacatgctaacttttaaaaagtatttctcaacatacccagagagtccgaaggaaggcagcatgctgatgttgaagcctccgtatccgtaaagcagacatggtcgcggctcaacactatcacgttttttcctaattatgaacatgggaaccttggtgccatccttgctcttgtagaatatctgctcaacggcgtaatcctcgcgacggaatccttccaaattcagtttgatttcgcggaatactgatggcgacttgtcaggtgtcttgaaatcatatcgataaatggagccgggattcaaaaaggacgagaagttgtagaatatttcagaatatttcttctctcccgatgtgcctacaatggtgccgatatccaagtcgaattcgcgcagtagggtgccatcctttagggaattcacttgcaaaacgctctgaagaacgaatatggaatgaggcatatagatgaatgactaataggttattatttaccttcacatccctgatgtaacaaacgagcagtttatcattatcaacgcacttaacccagtccaaaacatccgacttgtgctcctataaaacgtatagtagtcgtgattaatcttatctacgtttaaaaacaaactaaacctacggctataagcgtttcccatttgtcctccgctgaattattgaagtctatggcaataacttggtaatttggtgcattcttatttgtacggaagaatatcttcgagccttcattggtaatgtactgaaataatgatataaacatgtatacattactattttaaagactgtgaaaacattacatacatcgtagtccgcctcgaatttttccacaattttcttgacattcagtttggaagttatttccgcacctggcgtaagatcagcatagaacacaatgttgtcacggcaatctttaacaatggccagaatcaggtattttccacaatccgagacggtggattggctaaagttggaaaattgattataatctatgtttcaacaccatacaatttaagatcattacatgcgccacgaaggctcttccggaaattcgaccaccagtgtgtctttatcctggctctcacccacccggtgatagtacaacttttgattctcattctgtttggtctcagatccatcggtttttccatcttggtcagggtatctctaagaaataaacgacttgaatttgaattaccaggacgaaagagtccagtactcacaccataaaagaatcccttattgtcttttgtccacgaaatctccgagaacttgaccttttcaaggacctcgctcagatccttgcccgtttcggcatctcgaatgagaatcttgatccaatcggatccactttcactcaggccgtaggccatgtacttgccatcctcggagaaggccttctgagtcagggcgatggtaccgtcctcggacagggtgttcggatccaggaacaccttgctttcactctcgtcgcccagcgatttctgctggtacatgacgctctggttttgcaggccagtgttcataaagtaatagtaatagttgccataacgcatgggacatccgtatttgggatagttccacagcttggtaagcttcgtgttcagtttcttccactcctctccattctcgaggaaaggccggcttatgctgttctgggcattcacgaattcctcggtttccgtggagtccggatcttcgagccagcggtacacatccttgatctgggtgccatgaaagtcctctgccacgctttcatccttccgagcaactggatacgcgagcttagcggacaaagtacttggcatggctctggtaactttgttggatttattacacgtatgagaatatatgtattaatctttcgcttttcggcttttgcaactcatccccattagctatatatatatatgtgtatacttacgatttgaaggcaattctcgatgaatgtaatttctgggcagcgttttgggtacaactatttgacaaattcggcggtagagcagcggtcctcgaaaaatggtatgcatttgcaaaattatcaatgcaaaaatgggacactaacttgcgatagtttcgataggtgttaggggcactccttaaattttgctactgcgaactatatatcgccgcctccttataactaatttaaaaagaaatttctcttgtaattttacatattatattattatttatttaaatatttgaatgctcaaaacgagatgctatgacagattttgaaaaacattttaatatataggtaaacttagcaactgttagcttttatttacgtattcgtgttgaaatcaatcttgattaaatcttaaaaccactgtttaatttaactataaaatacaataacaactggtgaagcaatataaaccaagttcctttagtcggtacgaaatgctgcaccaaggtagtagctttattcttgaaaatataccgcacacgtatagaaaataccattgctttagttttagaaattcatgcaagagcacccccaataaaataccgcaaatgtcaggtgtgacacagccaactgtggctcgaaattaatcggtccgtgaacagattacctctgttaaaccatatgttttggtatcgggaggcgagtcgagtcggaatataaacacaatcgaatcaagtcaaacggaccgagtaaatgaattgaattggaattccgcgctgtttttagttcgtttaatttgttagccaccagtaagcgctttatttgttcggtatgtagctttgcttgaacttttcgtacatcaattgtgctgggaaatcgaagttttcacaaattttccttccatatgtatgtttttcttgatcagcaacttgtaggcgcatatggatgtacctaagcttgtatgcataaacaaacattttgaatgtattaacttagctaactagttattatgttgatctaaaaggtaatacagaacttattcagttttatacagtgcagttggattagtagtattagttcataacaatgggcgattttctacgggtttcctatgacatctatttatt

SEQ ID NO: 11150 - DNA, 2269 bp, DROSOPHILA
attttgcaaatgcataccatttttcgaggaccgctgctctaccgccgaatttgtcaaatagttgtacccaaaacgctgcccagaaattacattcatcgagaattgccttcaaatcatgccaagtactttgtccgctaagctcgcgtatccagttgctcggaaggatgaaagcgtggcagaggactttcatggcacccagatcaaggatgtgtaccgctggctcgaagatccggactccacggaaaccgaggaattcgtgaatgcccagaacagcataagccggcctttcctcgagaatggagaggagtggaagaaactgaacacgaagcttaccaagctgtggaactatcccaaatacggatgtcccatgcgttatggcaactattactattactttatgaacactggcctgcaaaaccagagcgtcatgtaccagcagaaatcgctgggcgacgagagtgaaagcaaggtgttcctggatccgaacaccctgtccgaggacggtaccatcgccctgactcagaaggccttctccgaggatggcaagtacatggcctacggcctgagtgaaagtggatccgattggatcaagattctcattcgagatgccgaaacgggcaaggatctgagcgaggtccttgaaaaggtcaagttctcggagatttcgtggacaaaagacaataagggattcttttatggtagataccctgaccaagatggaaaaaccgatggatctgagaccaaacagaatgagaatcaaaagttgtactatcaccgggtgggtgagagccaggataaagacacactggtggtcgaatttccggaagagccttcgtggcgcatccaatccaccgtctcggattgtggaaaatacctgattctggccattgttaaagattgccgtgacaacattgtgttctatgctgatcttacgccaggtgcggaaataacttccaaactgaatgtcaagaaaattgtggaaaaattcgaggcggactacgattacattaccaatgaaggctcgaagatattcttccgtacaaataagaatgcaccaaattaccaagttattgccatagacttcaataattcagcggaggacaaatgggaaacgcttatagccgagcacaagtcggatgttttggactgggttaagtgcgttgataatgataaactgctcgtttgttacatcagggatgtgaagagcgttttgcaagtgaattccctaaaggatggcaccctactgcgcgaattcgacttggatatcggcaccattgtaggcacatcgggagagaagaaatattctgaaatattctacaacttctcgtcctttttgaatcccggctccatttatcgatatgatttcaagacacctgacaagtcgccatcagtattccgcgaaatcaaactgaatttggaaggattccgtcgcgaggattacgccgttgagcagatattctacaagagcaaggatggcaccaaggttcccatgttcataattaggaaaaaacgtgatagtgttgagccgcgaccatgtctgctttacggatacggaggcttcaacatcagcatgctgccttccttcggactctctgggcttatgttcatcgacacattcgatggtgtgctcgcctatccgaatctgcgaggtggtggcgaatatggcgagaagtggcacaacggcggtcgcctgctgaacaagcagaacgtgttcgatgacttccaagcagctgccgagtacttgatcgagaataagtacacgaccaaggatcgtttggccatccaaggtggctccaacggaggccttttggtcggctcgtgtatcaaccaacgtccggatttgtttggagctgctgtggctcaagttggtgtcatggatatgttgcgcttccacaagttcaccattggccacgcttggtgctcggattatggaaacccatcggagaaggagcactttgacaacctgtacaagttctcgccgctgcataatgtgcacactccgaagggcgccgaaacggaatacccatcgactttgatcctgaccgccgaccacgacgatcgtgtcagccctttgcattcgctcaagttcattgcggccctccaggaagctgttcgcgactcggaattccagaaaaatcccgttctgttgcgcgtctaccagaaggcgggccatggcgctggcaagccgacatcgaagagaatcgaggaagccaccgatatactgactttcttgtccaaaagccttaacgtcgacatagttaacgtttga

SEQ ID NO: 11151 - protein, 717 aa, DROSOPHILA
MPSTLSAKLAYPVARKDESVAEDFHGTQIKDVYRWLEDPDSTETEEFVNAQNSISRPFLENGEEWKKLNTKLTKLWNYPKYGCPMRYGNYYYYFMNTGLQNQSVMYQQKSLGDESESKVFLDPNTLSEDGTIALTQKAFSEDGKYMAYGLSESGSDWIKILIRDAETGKDLSEVLEKVKFSEISWTKDNKGFFYGRYPDQDGKTDGSETKQNENQKLYYHRVGESQDKDTLVVEFPEEPSWRIQSTVSDCGKYLILAIVKDCRDNIVFYADLTPGAEITSKLNVKKIVEKFEADYDYITNEGSKIFFRTNKNAPNYQVIAIDFNNSAEDKWETLIAEHKSDVLDWVKCVDNDKLLVCYIRDVKSVLQVNSLKDGTLLREFDLDIGTIVGTSGEKKYSEIFYNFSSFLNPGSIYRYDFKTPDKSPSVFREIKLNLEGFRREDYAVEQIFYKSKDGTKVPMFIIRKKRDSVEPRPCLLYGYGGFNISMLPSFGLSGLMFIDTFDGVLAYPNLRGGGEYGEKWHNGGRLLNKQNVFDDFQAAAEYLIENKYTTKDRLAIQGGSNGGLLVGSCINQRPDLFGAAVAQVGVMDMLRFHKFTIGHAWCSDYGNPSEKEHFDNLYKFSPLHNVHTPKGAETEYPSTLILTADHDDRVSPLHSLKFIAALQEAVRDSEFQKNPVLLRVYQKAGHGAGKPTSKRIEEATDILTFLSKSLNVDIVNV

SEQ ID NO: 11152 - DNA, 3614 bp, DROSOPHILA
aatgggtgtcaactggaatgcgccgatgggcatgcaccagaacccgggacagcccgtgggtgattcgcaattgcagcatccaatggctcacaacaagggtaagtaattgaaatgattacattttttggtaccgagaaaactgtttaatcaaattatttggattcgcaacagtttacaacaacagtgattggacttcaatggatccggctatactttcgtttagacagtattcttcttttccacaaaaccaaattcccccacatcctcagcagcaacaggatttatttttgcagcatttggctcaacagcaaaattcccagagtggtggtaagtggggcaaccaagagtttacatatcaacagtcgattaaaatgcatcggattgtgtacttgcaggtttcaacaaccaggcacagcaaatgcttcctatggggatgcccaatagtttgctgaacggacaacaaacgcagccgccacaggtcaatgccaatgttcagggcatgcttgagtttttaaaaagccgtcaattcgtttagctacaatacatataaataatacatttgtttacctgtactctttattaaatatttcttaaagtaaatataggcaaaataaaattcgaatataatgaaactacatgatacaaacaaacagacggtccagtgaaattcagcctactaaaagcatttgtgcagcaagcgaaacacttggatgccgtctccccgcgccggacgtgtccgcatgaatccaattatagtatccaataaaccccgttcagggtgtagtctgcttggcaatagtgaagcccccagtgatttttcaaacttgaaaccaactcattccaattgctcgctggataaaagacagattaccatggcaataagtagcaaagaaaacctcgtgatgtgaaattatcgagactgtgtaaaaatgtcaactttttaataataaatacgtgacttgaaatggttgaaaagaatttattactacgatccgaagaactatttcctatttttggcggcgtggggcagacggttcccttggccagcagcgccacccaggcgcatcgcgttgttagcagcacctccgtatccctggccgggacgattgccgacattgttgcggttgccgccaccaggacgtccgccgcgctgattttgcgacgagttgccgccgcggtttttgttcatctctgtgcgattccttgacttggcctgcgcgtcctccttgaccatgtcgattacttcgtcggggattcgcagatatttgatggtgctcccgcggatataacattcgggcatgcgccaaaaccgatcgccatcctgcaaagtacacatacacatattggtataaacaagctcttcatgttatcatttttccggctgtttacaaatcaatgcgattgtatttatgtatataccagttgtcgcatattttgcacaccggcaatctacatattaattacatatacatacatatttaattaaaatattacctttgaggtgcaaataacatcgcgcagattaatattcatccacgagtcgcaactaaccaggtgaccattgtatgtttcaccatttttcagctccaccaactaagtgaattagattaaacaattatgtgtatgactaatgtgtgcaaatccaaacatcttaccatgggatggctctgtgctgtttttaaaagtgaaagtggcagctaaaacacatgaaaattaatcatttttctctttatttaccataaaataatattgcttaccattttcgtgaagtaatcgattaatacagcgataacatgaaatcggaagagatgtcaatcactttgttggaacgaaatgaatatgaaacacatgcttataaagatagcgtgttctgtttttttttgatttcttataacataattttaaatggtaaccaagagagaatgctatagtagacttccccgactgtcagatacccgttactcagctagtgtaaatttcatcctttttctgggataataatagggagaaaagattttaaaattgttttgaaagtgtgggcgtgaccgccttggcggctttaaggcgctagattgagtatggcaaaaaggacagtcggcgggacagtcggattaaatacttcaccaaatggataaaaaaaacatgtaacttattttaaagccaaccggctttgcaatgactgcaattcatttagtaagagagcaatattatagcgcacttgttgaaacatggacagtggcaattctaaagttcgatattccttattttggagcttgaagtggaggactattgtaggtttatcaatttgcacggtactagaaaataaattagtaaagtgaagtaaaaataaaatagcggtaaggttaaatacttactttaatgataaggaaatgttgattctccattgcaactttgacattttgacacggtccattttagtatctgaaaagttcttgctcagtacgtctcgatggttaagcaaaactttgcagatatcttcaacatattcttctgttaaactattgacgagataaataacaattatgttagtgacggtcaagttttccaagtacgtatgcatttgaatacttactttaaatcgtccattaaacattttcgcagctcatgatgcttcaccacgcccttgggatatcttaaaaagatttgcattgtcaagaaaaccattgtaaaaagttcacaaaagttcggagggatttcgtgacctccatttgttagtttatttagtgccagggaaagcacttccgacgaagacttctttgattcaatgtagtgcacagacacttgaataaggacacgcaacatagacttagtcaattgcggagtgaatgaagtgtatggctttacactccttaatagattatatctaaacgtagacgacatattgcatactcataaattttgtacaaaaacataaacaaactagaaatgctacgtcttcgatatgagttattttgatattcgatgctcacaatcgatattaatcgtactgtttttttgtttttaattaacagaaatggattatttgcataaattaaattaaaaagaaaaaaactctagctatgatttttgatattagccttaataaaataagaaactaaacatgttattttggcgttttaaaatttactgcaattaggttacccgttttggtaaagattttcaataattcggttgtttattaaagaaatatttacatatgttattacccacttgaattttgtttaaattactactaactggtttagttttgccataagtgttgggagaagtttactttctcattaaaaatttatgatccaattttacctgtcaatcaaagctacactttaaatcaattaaattatttctgattagagggtatagaagctgcatagtaaattatgaaccaattgaaattagaatgggtaattagcacctgcaattcatgctgtcaatcaaacagaagaccttactataaaatggcacaacattcccagcaggataaacaatagtaaaatgaatctcttaatcagtatgtttattttaatactagctgcaggcgagggtgaaataattccgagtatggaagaatccgttgtaactaatttcgttaa

SEQ ID NO: 11153 - DNA, 471 bp, DROSOPHILA
atgtttaatggacgatttaaagtaagtattcaaatgcatacgtacttggaaaacttgaccgtcactaacataattgttatttatctcgtcaatagtttaacagaagaatatgttgaagatatctgcaaagttttgcttaaccatcgagacgatggcgatcggttttggcgcatgcccgaatgttatatccgcgggagcaccatcaaatatctgcgaatccccgacgaagtaatcgacatggtcaaggaggacgcgcaggccaagtcaaggaatcgcacagagatgaacaaaaaccgcggcggcaactcgtcgcaaaatcagcgcggcggacgtcctggtggcggcaaccgcaacaatgtcggcaatcgtcccggccagggatacggaggtgctgctaacaacgcgatgcgcctgggtggcgctgctggccaagggaaccgtctgccccacgccgccaaaaataggaaatag

SEQ ID NO: 11154 - protein, 145 aa, DROSOPHILA
MHTYLENLTVTNIIVIYLVNSLTEEYVEDICKVLLNHRDDGDRFWRMPECYIRGSTIKYLRIPDEVIDMVKEDAQAKSRNRTEMNKNRGGNSSQNQRGGRPGGGNRNNVGNRPGQGYGGAANNAMRLGGAAGQGNRLPHAAKNRK

SEQ ID NO: 11155 - DNA, 3380 bp, DROSOPHILA
ttgttttaccgccgcctagatgcggaaatttttaattgccgacttaaagcgaatttgagagcatgactctttgttgcccccgatgcctttgtggccaagaaaacggtccggcagccggattacgctaactcgctcctcgctgaattcaggaataatgtgcgcgaccttcagttctgttgaagggaaagtacgcaacacagaaataacattattcaaagaaaacatttttcttactctcggaaaacgtgaaagcggcaaggggcatagagaaatgtgaaaggtggaagggaaaaataaataaaagaccatggcaaaattcttttccccaggaggatatctcagatttttaataagaatccgcggctcacacggaagaaaaaacatgcacaaactattgactgggtactctgtagttttaaaccatttaaagacgcctcaaaatcaaattgatatatttaaatactttattaatctaaattatgtgggcaaatcctgtttaaaacattagatttgtacacttaggtaacagcatggacgagagctttgattttactattgatttttttcctgtatattttgtctcccacttttttcgttgccgtaatttccgaactcatcccatcgagttcatcaccattcatcgtattcctgactgtccggggctaatcattggattttctccttccgtttcagcgtttccccgaaaaggcggacacaaggagagcgcgtgggtggagcggtgaaatgggcggtggcgccctgaccatccgcccaaatcagcggcggggcacggtgcggatgcgttatgtactcgtcctggcctttgacaactgaaaatggcaaaaggtagctgagcaacggcagcagcagtccctgcgaatcgataaccgcaacacacaaagtgctgatcagccaatcaaggcgagcaactaagcgatataggggtgcactcaaagcgtcccgaaaaaaaaaaaaaaaaactagagccccgagccccaggatgcggatgtgggtgcggatgccgcaggctgtgcagctgctgtttgcgatgggcttgtgggcgatgcaaggtcacgcgcagttggattcagagccagaggcagtcggagcagaaggagcagcgggacctggatccccagcgccacggaaccgcatcaaggcggaagcggatgccctgatgacaggcgacagcttcaacattcgccacgggcgctctcggtcgcatttccttcatggcagcacaaacagtagcagcagtagcggcattgggagtggcggtgggaccacacgcctcaccctgatcccgcccacacagctgccgggtgtgggtgggacctcgccggctcccgtcacgcacaaaatccgcaaattgcacaagaagaaaatcaacgagagcatacgcaaaagtgtggacaaaagtctgggcctccgccatacgccgaagaatcaccgcagtttggccgaggccgagcacctgcagggtcgtcctgccagcgaggacgccgaggatacggctctcagcgaggtcatgcagctagcggatgagattgagctggagagctcattcgtgacggcggccccaacaggtgatccggatattggtgtcaaacaggcacgccaatttgtgcgtgatgaggccaattaccaggaggacgatgatgatactatcgacgacgacgaggagctcgatgaggaggaggaggaggctccaatgtccaccaccatcaagcccaaaatcgccagtacccgcctgctgccggtgaatggcacttggcagcgaatgggcaccatatcgcgggactcccccccggaatcggattacgactctaatgccctggacaacgcgcaggaggacgaggaggaggaggagggtcaaccatttggcaagctgctgccgctcaacgaaagcctcgccaccaccgaatggatggacgatggggctcagcgggaaccggaggcggaggccagatcccaggcggccagcatggaggtcaagcagatcagcttcgacagcgatggcgactccgattccgaggcgggactggacacctccgaggtcaccatggacgacggctatccgccggatgcgcaagtcgatgacaagaccaagcagctggtcattggcgatgtggaggaggattccggcgacaacatggagtccaaccagtttaccgccgacgtgattaacgcgcgggacagcaagatcgatctggtgtccaagttcctgcagtatatcgagcagcagcatctgatgggctccaactgcgtggctggtacttcgctcaatctgggcgagggcgtggtcgaccggtatgctcaggacaggttccgggtggaggccgaggtggccgtcaatcgcgccaatatgctgaccaggtgagtggatgtcacggacaaagttttccgagttactcagcccacatcatattcacatgccaaacttttccaatcgaaagttttcggccagacggttggcgaatgcaagtgaaaatggaaatggaaatggaatccgtactgaacaattgcggtcaagaaagtagtgtgctttccctgaaggtcattcgagggtcaagatacatatgaaggatatttatgtgatattttgtgagcataggtaaggatgtcgagttacattctaatccggaacaggcatcaatccttcgaaaatgttcacttcgaatttatataatttcgccgtactctatcgcctcgtcctcctgcgggacttccgactccatcgtcatcaaatcctcctcggagggcgagaaatcgttggttatgtgaaaggtctggcgaatctcctccgtcgtgcggcctttaatcatgttggccaccgtcatgcaggcggcgttcagcagattgggaatgtccaggtagttggccgccaagatgagttcgaagagcgtgccctgatccatggacaggaactcggcgtcccagggggtgatctgcacagcgacggacttggccgcttcctcttcgttctcctctgcaatgtcctcgcgatgatgcttggcccaaatgaggaccttcttcaggatcgtcgagttcacattgggcagcgggataagagtgtcgttctccgcttccactggacaatcctccaatagggtcttaatggtgctcgagcacttggcagtctcgatgtcggtctcgaaaatttcgccatcggaggactgcaatttgatgactggcatggtccgttttcgcccacaaagggttttcctttaaggttatctggtacagttcaacttttcaagaaaatctgtcagtgccaacttgacagttaaaaattaaacagaacagattcgtaatggaaacaaattggtgattcatcaaattcaaacaaatgtccatggaatggagatagcatttattaa

SEQ ID NO: 11156 - DNA, 1380 bp, DROSOPHILA
atgcggatgtgggtgcggatgccgcaggctgtgcagctgctgtttgcgatgggcttgtgggcgatgcaaggtcacgcgcagttggattcagagccagaggcagtcggagcagaaggagcagcgggacctggatccccagcgccacggaaccgcatcaaggcggaagcggatgccctgatgacaggcgacagcttcaacattcgccacgggcgctctcggtcgcatttccttcatggcagcacaaacagtagcagcagtagcggcattgggagtggcggtgggaccacacgcctcaccctgatcccgcccacacagctgccgggtgtgggtgggacctcgccggctcccgtcacgcacaaaatccgcaaattgcacaagaagaaaatcaacgagagcatacgcaaaagtgtggacaaaagtctgggcctccgccatacgccgaagaatcaccgcagtttggccgaggccgagcacctgcagggtcgtcctgccagcgaggacgccgaggatacggctctcagcgaggtcatgcagctagcggatgagattgagctggagagctcattcgtgacggcggccccaacaggtgatccggatattggtgtcaaacaggcacgccaatttgtgcgtgatgaggccaattaccaggaggacgatgatgatactatcgacgacgacgaggagctcgatgaggaggaggaggaggctccaatgtccaccaccatcaagcccaaaatcgccagtacccgcctgctgccggtgaatggcacttggcagcgaatgggcaccatatcgcgggactcccccccggaatcggattacgactctaatgccctggacaacgcgcaggaggacgaggaggaggaggagggtcaaccatttggcaagctgctgccgctcaacgaaagcctcgccaccaccgaatggatggacgatggggctcagcgggaaccggaggcggaggccagatcccaggcggccagcatggaggtcaagcagatcagcttcgacagcgatggcgactccgattccgaggcgggactggacacctccgaggtcaccatggacgacggctatccgccggatgcgcaagtcgatgacaagaccaagcagctggtcattggcgatgtggaggaggattccggcgacaacatggagtccaaccagtttaccgccgacgtgattaacgcgcgggacagcaagatcgatctggtgtccaagttcctgcagtatatcgagcagcagcatctgatgggctccaactgcgtggctggtacttcgctcaatctgggcgagggcgtggtcgaccggtatgctcaggacaggttccgggtggaggccgaggtggccgtcaatcgcgccaatatgctgaccaggtga

SEQ ID NO: 11157 - protein, 438 aa, DROSOPHILA
MQGHAQLDSEPEAVGAEGAAGPGSPAPRNRIKAEADALMTGDSFNIRHGRSRSHFLHGSTNSSSSSGIGSGGGTTRLTLIPPTQLPGVGGTSPAPVTHKIRKLHKKKINESIRKSVDKSLGLRHTPKNHRSLAEAEHLQGRPASEDAEDTALSEVMQLADEIELESSFVTAAPTGDPDIGVKQARQFVRDEANYQEDDDDTIDDDEELDEEEEEAPMSTTIKPKIASTRLLPVNGTWQRMGTISRDSPPESDYDSNALDNAQEDEEEEEGQPFGKLLPLNESLATTEWMDDGAQREPEAEARSQAASMEVKQISFDSDGDSDSEAGLDTSEVTMDDGYPPDAQVDDKTKQLVIGDVEEDSGDNMESNQFTADVINARDSKIDLVSKFLQYIEQQHLMGSNCVAGTSLNLGEGVVDRYAQDRFRVEAEVAVNRANMLTR

SEQ ID NO: 11158 - DNA, 4146 bp, DROSOPHILA
tatatatatgtttgcagtgtattgggtgttgagtgtttttgtgtttctacttgctgctctataaagtacagtccgcaaacaggatacgaatgcgagaatgtcggggtgtgtataggttggcgtacctaacgcgtatatctaggtgtatatgcttatatagcgctcggcttgctggcagcgatatagttgggtctatgacaggatctgggcttggatgcgtaacttaggatcgaacgaggtgtgcctccactgaactgaattaatcataatcgtattgggggtataagtataatctctcgacccaggtcggcctttagtaatgatatcgtagcttagcactaaatcctatgagcaatttcttacattttgaaacgaactaaacataaacacggtcgacaagtacaaaaattgaaactagctggaggtacacacaatatatagtataataacacacataatagatacagtacaatctgaatttgttggtttgttcaaagcttacggcaaaatctgcaattggcaatcggcatattaactaataaacttcctgaagcgcagtcccgtgcgggctaaatatcggtattacaattcacatacgttaaaaactctaattactatgggcttaaattagcttaggcttattaatatgctgcgtgttctaaacaactacattagtctgccttgatttgttgattgtttgtatgttggttacttgctgggatgctggatttccttcgatttgtccgatcgattaaatgggtaagagaagggaggataagtatagcacgatagggaaagaggttgttaaaaggtatgcaaaacagaacagaactaactttcgaaaatagataaaaatattttacacttttcaataaataacctaatcataaactgtaacaaaacaaaaattggcaaaattaggatcaagcgtagaaagtgagcggacttagagcaaagggaattcccagaaagatgtattgttattcgatccaccgcccccctagtgcggatgcataagtccatgagtgatgtccatgccttcgcctattccgttcacgctgatccctccatttagcatgcttgaagctatagaaattataatcacataagcaatgagattattatatcaaggatttgttcttacaattgcgtgatccttgcgtgtccacttgtgtccagtactgctcagatggactttgggtactagtccccggcggtgcctggaccggggcccccgtgtaccgaaaatacggattcttaaggtccagggtgttgctcgacgaaatcagcgtgccttcgatgtgtaggtcgatggtcacgtcatacgactgccgccgattggcctccagtaagacacggccggtcagcgtctggccctgcttaataaagatgggcatgggcagaaggcagcgaacctgataccaatgtgtcagaggcgctgtgggcgacgttgagagccacacattctggctgctgccgctaaactccacatcaaaccaaaaggccagcccatggcagatgccagtttgcagaatgtgaaactccagggggatgcctgcggaaagtcaacagttggccattgtcgcaaatcactttttcgggtacttacttatcaaatgcagatcgtcctccttatcgttgagaaagtcgcacacgtgccgcaccgacttggccatgcatatgcggatgtcgaaggtgtccacaatgggctgtcggaagtactccttcatgccctctttgtgcagcgtggtaaggtcaacgccgtggaacgccgactggtaccagaagttggccttgttatattgttccgagtagagcgattcgtccgaaaagggtgctatgtgcaagtcgccgtgcgtggggtacatctttccttgcggcttgagccactttctggcatgcagataggtctccaacatgcgctcgttgtacagcatatagcccataggctctgatatgataacgtccactttctcgggcagctcgatctcctcgatcttccccggtatcacagagatcttatgctgcacattgttggactcaaccagctgctgggcgtactgggccatgttggaagcctcaatggcgtacactttggcagctcccgcctgcacggcaaagaaggagagaatgcccgagccggcgcccacatccaggacgatcttgtcctgaaaatccacagcattgcctagaatggcccgctgatacgtgcttgtccttacatagtcctgcatcatgttctgctgctgactgaggtagccgtagaactggaagtactgcgaggcggacgactcctcagtgcgctgcgagaacacggacttgggtctcaagtgcttcacgttctccaccactttgcggaagagctgctggtcctgctcgctggcaaacctcagcactagattgtcggcgtccagggaaacggcataactccttcgtcccatttgggcggcatccgtatcggcggctatcatgtactccttgagcacgtggctccggtcgtcgtctggtggagagattggcgatataaggaacgggttttatgaaacattcgatgtcctcttttacctgacacaacacggaggacgacaccctgggaatcgtagctgcagagcagcgtgcagcttcccttgtatttgttggtaaactctagcttctgctcgtcggcaatcgagctgattaccacgccgcaaaattggcaattgctcagcggcgaaacggaggcggcggtggccagttttcgggcctcctcgggtcgcaggctggacatgttggctggctttttggagggtaaagaggcaaaggaacaaagcaggaccacaagcgtcttttttcccttgttaattgacaatgtagacctcgctatacacacgcacgcacgcacacacacaaacactctagcacacgcacacacacagatacgcagatgcagacagacagacgcgcaattttttctatctgcaaaattttccaccacacacaaaatggctggtgactcgggcagctggattaattggcgctgggaactatatagtgcgctgcttttcaactcggacgattactcaaaatcgatcgctcttgttgatttcgtattgatttcacacggaacatgcgttcttttttgcaaaaagtgctagagctggaacaaatagttgaggctagaggtgggaccaagtccgatgcttttcgataggattattaccgcgcactaccttaagactaagcgatttttcagtctagtgagatttacaaaagaattgtatgcaaggaagcttgcatcaatctcaatttcattttgaaatataattgaaaaaaaatagtgcggggaaaagaaatgtaaaaagaaataatatagttttttaagtggatagaatcaaggttcagaactctggaacacttctagcagggcctcgaacctaatgtgggtggtcggctagttggcaacgctagtacaaaaaagcggtcgcttgaaatggagagtaggtacctaaatgaggtaccttaataaatattgaccaaagtttaacagcaatttttagcattcattttaaaatatttttcctatttgtttgaattgaattaaatcgaataaacaacgttagacaacttaagttcgttaatttaaaagctatcaatctgatttgaagtaataccgaacctaggtacataactgaagcaaacttgccatcactgacacatccttctaatcaatttcgctatttttcggtggcattgcagaaaggactcccatcgctccgcggatgatgacggaaatgaggaggacttctacctcgaggatgccgacgacgacgtcgagcaggtgaagcccactctggcctccgagccgactctgagtcaccgggacatggcgcgtccgccgcacgaggatcccgagtaccagaagcagattgttggcaacttcaagtgggttctcttggtgcacgatatagatacatttaatgacattatcctttttcgattttccaggcaaggacgcggcggtagccactataaccatctagcgcagtcgcacggacgcaccatcagtggcagcaacatcccgagcacccaccagcagcagctgcagaacaacaacaccagctgcatccccacttcgcacctagcccaccacaactacacatgcccggc

SEQ ID NO: 11159 - DNA, 1972 bp, DROSOPHILA
tttgttccagctctagcactttttgcaaaaaagaacgcatgttccgtgtgaaatcaatacgaaatcaacaagagcgatcgattttgagtaatcgtccgagttgaaaagcagcgcactatatagttcccagcgccaattaatccagctgcccgagtcaccagccattttgtgtgtggtggaaaattttgcagatagaaaaaattgcgcgtctgtctgtctgcatctgcgtatctgtgtgtgtgcgtgtgctagagtgtttgtgtgtgtgcgtgcgtgcgtgtgtatagcgaggtctacattgtcaattaacaagggaaaaaagacgcttgtggtcctgctttgttcctttgcctctttaccctccaaaaagccagccaacatgtccagcctgcgacccgaggaggcccgaaaactggccaccgccgcctccgtttcgccgctgagcaattgccaattttgcggcgtggtaatcagctcgattgccgacgagcagaagctagagtttaccaacaaatacaagggaagctgcacgctgctctgcagctacgattcccagggtgtcgtcctccgtgttgtgtcagacgacgaccggagccacgtgctcaaggagtacatgatagccgccgatacggatgccgcccaaatgggacgaaggagttatgccgtttccctggacgccgacaatctagtgctgaggtttgccagcgagcaggaccagcagctcttccgcaaagtggtggagaacgtgaagcacttgagacccaagtccgtgttctcgcagcgcactgaggagtcgtccgcctcgcagtacttccagttctacggctacctcagtcagcagcagaacatgatgcaggactatgtaaggacaagcacgtatcagcgggccattctaggcaatgctgtggattttcaggacaagatcgtcctggatgtgggcgccggctcgggcattctctccttctttgccgtgcaggcgggagctgccaaagtgtacgccattgaggcttccaacatggcccagtacgcccagcagctggttgagtccaacaatgtgcagcataagatctctgtgataccggggaagatcgaggagatcgagctgcccgagaaagtggacgttatcatatcagagcctatgggctatatgctgtacaacgagcgcatgttggagacctatctgcatgccagaaagtggctcaagccgcaaggaaagatgtaccccacgcacggcgacttgcacatagcacccttttcggacgaatcgctctactcggaacaatataacaaggccaacttctggtaccagtcggcgttccacggcgttgaccttaccacgctgcacaaagagggcatgaaggagtacttccgacagcccattgtggacaccttcgacatccgcatatgcatggccaagtcggtgcggcacgtgtgcgactttctcaacgataaggaggacgatctgcatttgataagcatccccctggagtttcacattctgcaaactggcatctgccatgggctggccttttggtttgatgtggagtttagcggcagcagccagaatgtgtggctctcaacgtcgcccacagcgcctctgacacattggtatcaggttcgctgccttctgcccatgcccatctttattaagcagggccagacgctgaccggccgtgtcttactggaggccaatcggcggcagtcgtatgacgtgaccatcgacctacacatcgaaggcacgctgatttcgtcgagcaacaccctggaccttaagaatccgtattttcggtacacgggggccccggtccaggcaccgccggggactagtacccaaagtccatctgagcagtactggacacaagtggacacgcaaggatcacgcaattcttcaagcatgctaaatggagggatcagcgtgaacggaataggcgaaggcatggacatcactcatggacttatgcatccgcactag

SEQ ID NO: 11160 - protein, 530 aa, DROSOPHILA
MSSLRPEEARKLATAASVSPLSNCQFCGVVISSIADEQKLEFTNKYKGSCTLLCSYDSQGVVLRVVSDDDRSHVLKEYMIAADTDAAQMGRRSYAVSLDADNLVLRFASEQDQQLFRKVVENVKHLRPKSVFSQRTEESSASQYFQFYGYLSQQQNMMQDYVRTSTYQRAILGNAVDFQDKIVLDVGAGSGILSFFAVQAGAAKVYAIEASNMAQYAQQLVESNNVQHKISVIPGKIEEIELPEKVDVIISEPMGYMLYNERMLETYLHARKWLKPQGKMYPTHGDLHIAPFSDESLYSEQYNKANFWYQSAFHGVDLTTLHKEGMKEYFRQPIVDTFDIRICMAKSVRHVCDFLNDKEDDLHLISIPLEFHILQTGICHGLAFWFDVEFSGSSQNVWLSTSPTAPLTHWYQVRCLLPMPIFIKQGQTLTGRVLLEANRRQSYDVTIDLHIEGTLISSSNTLDLKNPYFRYTGAPVQAPPGTSTQSPSEQYWTQVDTQGSRNSSSMLNGGISVNGIGEGMDITHGLMHPH

SEQ ID NO: 11161 - DNA, 2580 bp, DROSOPHILA
ttgttgcagccgccgcctccttgaaactgggaccaacccttcgactgatgcggaagcagttgaagccacgctgggtgcaagccatcattccagatttcaagctgcacggcaccatgtttttgacaaacgacttgcagaatgtatgtattcatttgtagagtgcatttttgtgtttttattgaggtgtctttggtttttgtgctctctgttgcagatgggaatgtaagcatgggtgtaatagctccagttcctggcttcattttactttcgttgcagctgcgacgtattcgaaccaaatcgcgccgatttcaggcccatgactgaggagaagggcgtctacgtgcgacacattgagcaatccatagacgtcaccatccgtacgcatcccatcaatcagctgaagcgtaagtgtctcgcattgcagcacacctgaatggaatggagtggaggcattgagccgcaacgcattgcgaatgcccaacctaatggtgttgcaacagttgcagcctctgcaacacgagacaaagtgcaataaacacttccttttactctctaggcaactacggcgcccaatcgaagcccattcagatctctgtgaatcatccgtttctgtttttcatcgtcgatcgcgacttggacgtggctgtgatgtcgggccgcatactgaatccgctgaacgtacgcatccaatgaagcacgacgaaggtcgactatcgaaagtgatgaaccctttgttcccggtgcctactaatacgagatgttagcattgcttagattaaaatgtaaatatacgggggtgtcacgagactctgggcagatgaaatttgaatggaagtaaagaaacttcatacttaaaattatcattaaattaaacaacatttgttgaatattttatctatataatatttttagaaaacacatctcgtgacaacccatttaatgtaagctcaccccattaaagtataatccttagtctaactagttctgtgggaaatcggttttagtactgatacgttccaaacactgtacagacgcaaaagagactggtgttgctgaagacctcggagacggaagtgtcgcagtcgcaatcccagcagcagcgcgagttgtaagtggcccccgcacccagctcctggcctagcatcacctggaccacgtgcttgtaccgcttcaccagggagctgctggctatctgctggttcacctcgtcggcgatctcactggtccacttcttggcgacgtccttgtcataggttttgtcttcaaatagtgaagttgctaggcaacgcgcagtatatttatggattttcacactaacctttgagtttctcggccataacgttgttcattatgctcttgatggtgggcaggggaaacatctccccaaaggccggtcgcatgctataggcggtgggctggtcgccgggcttttccgacttttcttgattttccaaaccatcggctgagccggagtgcagacttcctgacgccgacttttccgacttcctatccgctgggttgggcactgttaaagtctggacggatttggttgtttcctcagtggactgtttgtcagccatcttttgtcaaattcagcgtaattccctttcaaagtgtttaagaaagcaccaagaaaatcttggttgctatgtttgtttacttattgctagtgttaccagatggtaaaatggctttcccgccaatccctaattgtcagtcaccacgaataaccgaacttatttggtgtggccactttataacaacgaagtgtggcacctctttcattttctggataatttaaatttataatacgcgccaatattttatgtgcgtcaagttagcgtcgatggcggaatttccccattaaagaacatttctttaaggacatttaaggaaaacttcacgataaagtagaactataaaatcgtccttaggtttcataaaatctttattcaattcaaaataaatcgaaaagttacataataaattcgataaatatgtttttatatatgcaggttataaataaagttacgcaataatttaaatgatttcgttagtatacagttaatggttgctttctcgcttacatcgctatgtgtaggctctcgcatttagaaaatatttgtgtgcatctctttgtgttcactttgatttcgattgggggcaaatgacataatacatacatgggtgtgctgatcgggaggatgtgcggaaggtgctttgtcaaataaataataatacactcaaacggtttacatagaaatcgacaaacaatcgctaagtgaaaataacctaagaaaactcaaatacaccatttacatttgctcaaaatcacataccctttgcacacgctcactacattacattaaataaaaacacaacatattgcataggacatacaaaaatcagacagatttcagtggcaacgactaacaaaacgtacaattaggtcgaatacgaaactaaaggtattcgcaaaaacattcgtaatccctacttttaaattgcgaaattagttttttggttttgatttcatctctgcctgtttttacattaaccttgcgcgcttctcccatatta

SEQ ID NO: 11162 - DNA, 522 bp, DROSOPHILA
atggctgacaaacagtccactgaggaaacaaccaaatccgtccagactttaacagtgcccaacccagcggataggaagtcggaaaagtcggcgtcaggaagtctgcactccggctcagccgatggtttggaaaatcaagaaaagtcggaaaagcccggcgaccagcccaccgcctatagcatgcgaccggcctttggggagatgtttcccctgcccaccatcaagagcataatgaacaacgttatggccgagaaactcaaagacaaaacctatgacaaggacgtcgccaagaagtggaccagtgagatcgccgacgaggtgaaccagcagatagccagcagctccctggtgaagcggtacaagcacgtggtccaggtgatgctaggccaggagctgggtgcgggggccacttacaactcgcgctgctgctgggattgcgactgcgacacttccgtctccgaggtcttcagcaacaccagtctcttttgcgtctgtacagtgtttggaacgtatcagtactaa

SEQ ID NO: 11163 - protein, 173 aa, DROSOPHILA
MADKQSTEETTKSVQTLTVPNPADRKSEKSASGSLHSGSADGLENQEKSEKPGDQPTAYSMRPAFGEMFPLPTIKSIMNNVMAEKLKDKTYDKDVAKKWTSEIADEVNQQIASSSLVKRYKHVVQVMLGQELGAGATYNSRCCWDCDCDTSVSEVFSNTSLFCVCTVFGTYQY

SEQ ID NO: 11164 - DNA, 5774 bp, DROSOPHILA
tttggcccattaacacagatttcttatcgtaaatccaaatcccaagggcaacgtcatcttgatgtgatgacatcgtgtgtggttaaattcatcggctagttcagcctaatcccaaccagacacgctgtctttgccagactctcttctgcatctacctaaatccagattgcagcatgcagcctgcagattcccaattggggccagtggagttcaaggctacggcttatcggctcaccccggttgttaatcttatcactgggcaattgatggaattactgtcattatgcggatcattgagacttctgaatggagtccgccgaatggccattgaaatcggaaacgggtggaaacgtgtgtgcttacctcgcgagcccagaacaagcactttgccctcgattccgcgcatctcgccgagattagcggctcaatcgcatcgctttccgtggactttagtgacgttttttttttttgtaaaatggatgagatgatgtgttgttggctcagtggttgttgctgctgttgttgttgttgcttgcagagccagtggttgggaagcgcgtaattggccctttggcggcctgctgcgtctgatttcttgggcacaactgaatttatcggagtcggtgggggttttcaaagcgggcgctgcgattaaaagcgcgcagtcagcagtaaagataaaagatttaataaatttgaaggcttgttgttattgtgttatgttatgcgcgaacagctgtttaccagggctgacacgaggtgcgatagttgctgctggcagcgatagctggtcttgcagagtagaatttcgcaaggaaataactttgtttcacaagtaaatatattcgtaaaaaatatatttatgtgttagtttgattggttagcaaggattccaatcaggaatatgactactagaaaaatcacgaccccgattaccgcttggaagatgccacccgatagcaaaactatcgcccatcactaattgcatttcccagacgcgttagtaccaccgccaaaagcaggcagatgttcatacaggcgattttaacaacagtgttttatagataaattaacaaattaaaggtattttaaggagctagacaacatgcattaggagctacaagctcgcgggcacaactggatactagcgataggcgtgcagcgtgcgactcgagcgcgttaaatgtccgcaaaagtcagacttctacgcgcgtttttcgcttgggtaacttagttttccccgacctgggaaaagtgccacatttccaaaaggtaaatgcactgccaagaagattaatgcggctaagataagaaaatcgtcagtgactccccgtgcttactttcacttttctctgccccgtcaatctagccattcgtcaggctccacaaactggagcagcctgtacaaaatgccgcgtgcctaaaataacttcgggctatagaagaagctataactacaacgagaaatctatttttattcgaagaatggccactattggaaacaagataaacaacagctacgaatcggagccttctacaggaagcggggtaagactaattggtgtccttgcggttgcgagcttgctgaaactttgtgttttatagtcttcgctcagtgaaaacaatgagagccacatatctgacgaggatcacatgaacttaccgtatctgatgaaaccgaaagcactgagcagccagcccatcaaggaaaccccaacgccacccaatccgaagacgggcagccaggaatcgcagttcctgggcttcggagacagcccatatggccaggtgaacaagcgtctgtatggctcccagctgcagaaccttaagctgccggaggtggagccccctgccgtccgacgtccctcgccgggcaagattgtctttccccggttctacgacaccctcatcgaggagaacagctgcaatgccgtggacatggccgtgtcagtggccacgacagccaccacgacaacgggcagcctctccttcgatggcaaaatcaagagcctgaccgcaaagcccgaaattcaggacaagcctgggccctccaatgctacgaatccacgtctgtcaaacgtgctagaaacctcgctcaacacctcgcagcagaagttcaacaacgaacgctcacctgatctctttgccgacagcgacgatgaagctgacaacgacgagcaaccggaaaaagagccgcccaccaggctggaggatctgcccgaagtgttggaagagtcgcagtgcaccagcgacgcacgagctcgctcctcgctgaatgctcccacggagtccagttttgtggatgagcagacgatggacctttcgagcacccagctgaacgccaacgacccccggtcgcacttcttggagaactgcaggagagaacgggagctgtatcggcggattcgtcgctgcctacagggagttcgtccgccgccctcggtgactgcacccgatgtggacgtcatcaaaatggtgcttagcatgaaatcaaacgtgctaaactttctctccaaggatagcccaccatctacacccagaatcgaggacagtggcattagcgaaacaacctcactgtttcgaccatctcacagtctctcggaggctcaaaacatgggctggcgggatgtgctgggagtaagacatcatggactgaggtatgctctttaaaggattcgtttgtgcttgcagtgttttcattacccgcttccattcacagctacaatcttaacaaggctgccgaacaaaatgaatacctcagcatgtccgtggtggaccgctatgtgggcgtggaaaccgcgacgtcctatgtgagatcgccatcgagcgccaagaagagaaacatgcgtatgaagtgagtaataaattagtcagccgtgtgaacgtttaactcactgaacccaactccttacagaatgttaacccaatcgcctggcaatcgcctcagtcatttggccaaacgacgtgccatattttcatctgcgaatctagccaccaactcacagaagcttaacagctcaattggaccacaaataatgctagataagaagtgggtagcttttgtgattaaaaactccaaacacatactaatttccatgattttggcttacagaaaagtgcgaaataaacgcaaggccacgcccaagcgaaagacgccgggcagcaagaaaaaaggtgagtgatttgataagataagccaatgtacttttgttaatgatgcatttgcaccagctcgcaagacgccatcttcatccgcccgaaagcgcctctaccgcactgatctcatcaagccaggaccttcgagagaaacctctaagcgtgccttattccaaagtccggccaaaaccctgcagcaacagcagctaatgccgcccaaaccgctcttcaagccggagattgcgaaccgcgtagagcggtcgaagcgcgctctcttttcgccggatcaccagggcagcagtaaccagctggagtcgatcctgaagcggaaaagaaacgcctgcgatgacgacgaggattcagctgatttggctagccagagcagcaagctcttccgggccgagagcagtggacccagtgggttgactcctcgcgctctaaagatcaagagccagagtttctgcattggagctggttcctccactgcgggtgttcagctaaagttggcgcagcacgcggctgctacccctgggcagacgcggctcagtcttggcctgagcggcagcagtagcaacctggttaacccggcatcttttgcaagcggtacgccactggcgagtaaactgcacagagcgcactcggagatgagcgccacaccgaatagcagtatgactgataaccagcgaaaggtgagcctctatttatctatacatcaaattatgccttttgtgtatggtttatccctaagattcgttcacttaaccgtcataactaatctcgtttattgccacagaaactcctttgggctgtgtcgcaggcactgcaggagaagaaaattacgccgaagcacgagcaattccgtcagcatgcggcagaccttacgcgcattgtgaagcgcatcttccaggaattctacctgggacattcgtccagcaacagcgaaacactgctaaggtgagtaaggggtggatataatactcgtataggcactattggaacttccaccttccgcaggctggccaagaagtttgcctttagcgtgattgcggggaagaatgcggacgacgtttacctgcaggcgcgcagtcaggaatgcgaggccaagcggttgtcgagcacccgcctctcgggctacatcggtccggaggagtttgcccagcgtaaactgcttctctcgcaaacatcggtcgtaggatcagcagcaggttcggcgcgatccctgcacaacatcttcggcagcgagaactccatcgattccttcggtctgagtcaaatgagcctgcccacaaatgcctgctccgaaacgcaatcgagtatagtggatcgcatctcggaggatctcttctgcaaggaacgccaacccatccggcccaatgcctcgctccagaacagctcgtcgaagagtaacctaggcggactcgcgctgcgcgagaacatggactgcgaggctcgccgttcggcgcaaaagaactttaccggcaaggaccagcagaacatcagtccctacttcggaggcggcggaagtaacagctctgcgcgcaagttccaaatgccacccgtgggcaacagcaaccactccggaggcaaggccaagagacagatttcctttgactgctagaagagtagggccaataggataattgttgaaacgtcattatcataatatgatgcccataaatcctctccgatcccttgaaattctaggagcagaggcaaggagctgcccgacgtgtaaatgagttttagctctttagccttgtaagcaaaaagattaactcgtttttgtttccattattttttgtttgttttagcttaatttattaattcaactgtcaggtctctttaaaccctttcaaaccatttatatataatgacagacaatcgtataataataggtataagtaaaataatctgatatagatcttatagatcgcctcttcttcgactcgcaagactcccgacttttccttgagctcaaatgtagttcaaatgcaagttaaatttcttttagtaacggcatacatacatgatctatatgggatttattttatgcgactcaaatttgatgaatgcaatattttccactgaagtttagatgtattaagaacattttgtgcttaaaaattacaaattttacttaactaccgcacgagtactcaatgcaactgaaattaagctgaagcaagttctgtaacagtgtaaactgaaattagtataataaaagcgccccaatcaatagtaaccactgcggtgaatgtatcgcctaaccagcccaaaggacacgatgtgaaagatgacggccaccaccaccagactgaagcagtccagccaataggtgtagtcggcggtgcgataggatccctgctgcagcacctccactccggtcttgatgcacggatgatcctcgttgacggggcagtctggataaaatattattggataacatgcatcctgattatctacttggaggtaagctcaccgatattatcgatgtcgatccagaacttgtacatcagcgcctcgttggagtagaagaacaacgagaggtactttagtccaggcactgtgtccacattcatgtaggtgccgccaaagataaggaagatcagatcgaaggg

SEQ ID NO: 11165 - DNA, 3208 bp, DROSOPHILA
ttagtaccaccgccaaaagcaggcagatgttcatacaggcgattttaacaacagtgttttatagataaattaacaaattaaaggtattttaaggagctagacaacatgcattaggagctacaagctcgcgggcacaactggatactagcgataggcgtgcagcgtgcgactcgagcgcgttaaatgtccgcaaaagtcagacttctacgcgcgtttttcgcttgggtaacttagttttccccgacctgggaaaagtgccacatttccaaaagccattcgtcaggctccacaaactggagcagcctgtacaaaatgccgcgtgcctaaaataacttcgggctatagaagaagctataactacaacgagaaatctatttttattcgaagaatggccactattggaaacaagataaacaacagctacgaatcggagccttctacaggaagcgggtcttcgctcagtgaaaacaatgagagccacatatctgacgaggatcacatgaacttaccgtatctgatgaaaccgaaagcactgagcagccagcccatcaaggaaaccccaacgccacccaatccgaagacgggcagccaggaatcgcagttcctgggcttcggagacagcccatatggccaggtgaacaagcgtctgtatggctcccagctgcagaaccttaagctgccggaggtggagccccctgccgtccgacgtccctcgccgggcaagattgtctttccccggttctacgacaccctcatcgaggagaacagctgcaatgccgtggacatggccgtgtcagtggccacgacagccaccacgacaacgggcagcctctccttcgatggcaaaatcaagagcctgaccgcaaagcccgaaattcaggacaagcctgggccctccaatgctacgaatccacgtctgtcaaacgtgctagaaacctcgctcaacacctcgcagcagaagttcaacaacgaacgctcacctgatctctttgccgacagcgacgatgaagctgacaacgacgagcaaccggaaaaagagccgcccaccaggctggaggatctgcccgaagtgttggaagagtcgcagtgcaccagcgacgcacgagctcgctcctcgctgaatgctcccacggagtccagttttgtggatgagcagacgatggacctttcgagcacccagctgaacgccaacgacccccggtcgcacttcttggagaactgcaggagagaacgggagctgtatcggcggattcgtcgctgcctacagggagttcgtccgccgccctcggtgactgcacccgatgtggacgtcatcaaaatggtgcttagcatgaaatcaaacgtgctaaactttctctccaaggatagcccaccatctacacccagaatcgaggacagtggcattagcgaaacaacctcactgtttcgaccatctcacagtctctcggaggctcaaaacatgggctggcgggatgtgctgggagtaagacatcatggactgagctacaatcttaacaaggctgccgaacaaaatgaatacctcagcatgtccgtggtggaccgctatgtgggcgtggaaaccgcgacgtcctatgtgagatcgccatcgagcgccaagaagagaaacatgcgtatgaaaatgttaacccaatcgcctggcaatcgcctcagtcatttggccaaacgacgtgccatattttcatctgcgaatctagccaccaactcacagaagcttaacagctcaattggaccacaaataatgctagataagaagtgggtagcttttgtgattaaaaactccaaacacatactaatttccatgattttggcttacagaaaagtgcgaaataaacgcaaggccacgcccaagcgaaagacgccgggcagcaagaaaaaagctcgcaagacgccatcttcatccgcccgaaagcgcctctaccgcactgatctcatcaagccaggaccttcgagagaaacctctaagcgtgccttattccaaagtccggccaaaaccctgcagcaacagcagctaatgccgcccaaaccgctcttcaagccggagattgcgaaccgcgtagagcggtcgaagcgcgctctcttttcgccggatcaccagggcagcagtaaccagctggagtcgatcctgaagcggaaaagaaacgcctgcgatgacgacgaggattcagctgatttggctagccagagcagcaagctcttccgggccgagagcagtggacccagtgggttgactcctcgcgctctaaagatcaagagccagagtttctgcattggagctggttcctccactgcgggtgttcagctaaagttggcgcagcacgcggctgctacccctgggcagacgcggctcagtcttggcctgagcggcagcagtagcaacctggttaacccggcatcttttgcaagcggtacgccactggcgagtaaactgcacagagcgcactcggagatgagcgccacaccgaatagcagtatgactgataaccagcgaaagaaactcctttgggctgtgtcgcaggcactgcaggagaagaaaattacgccgaagcacgagcaattccgtcagcatgcggcagaccttacgcgcattgtgaagcgcatcttccaggaattctacctgggacattcgtccagcaacagcgaaacactgctaaggctggccaagaagtttgcctttagcgtgattgcggggaagaatgcggacgacgtttacctgcaggcgcgcagtcaggaatgcgaggccaagcggttgtcgagcacccgcctctcgggctacatcggtccggaggagtttgcccagcgtaaactgcttctctcgcaaacatcggtcgtaggatcagcagcaggttcggcgcgatccctgcacaacatcttcggcagcgagaactccatcgattccttcggtctgagtcaaatgagcctgcccacaaatgcctgctccgaaacgcaatcgagtataaacagctcgtcgaagagtaacctaggcggactcgcgctgcgcgagaacatggactgcgaggctcgccgttcggcgcaaaagaactttaccggcaaggaccagcagaacatcagtccctacttcggaggcggcggaagtaacagctctgcgcgcaagttccaaatgccacccgtgggcaacagcaaccactccggaggcaaggccaagagacagatttcctttgactgctag

SEQ ID NO: 11166 - protein, 939 aa, DROSOPHILA
MATIGNKINNSYESEPSTGSGSSLSENNESHISDEDHMNLPYLMKPKALSSQPIKETPTPPNPKTGSQESQFLGFGDSPYGQVNKRLYGSQLQNLKLPEVEPPAVRRPSPGKIVFPRFYDTLIEENSCNAVDMAVSVATTATTTTGSLSFDGKIKSLTAKPEIQDKPGPSNATNPRLSNVLETSLNTSQQKFNNERSPDLFADSDDEADNDEQPEKEPPTRLEDLPEVLEESQCTSDARARSSLNAPTESSFVDEQTMDLSSTQLNANDPRSHFLENCRRERELYRRIRRCLQGVRPPPSVTAPDVDVIKMVLSMKSNVLNFLSKDSPPSTPRIEDSGISETTSLFRPSHSLSEAQNMGWRDVLGVRHHGLSYNLNKAAEQNEYLSMSVVDRYVGVETATSYVRSPSSAKKRNMRMKMLTQSPGNRLSHLAKRRAIFSSANLATNSQKLNSSIGPQIMLDKKWVAFVIKNSKHILISMILAYRKVRNKRKATPKRKTPGSKKKARKTPSSSARKRLYRTDLIKPGPSRETSKRALFQSPAKTLQQQQLMPPKPLFKPEIANRVERSKRALFSPDHQGSSNQLESILKRKRNACDDDEDSADLASQSSKLFRAESSGPSGLTPRALKIKSQSFCIGAGSSTAGVQLKLAQHAAATPGQTRLSLGLSGSSSNLVNPASFASGTPLASKLHRAHSEMSATPNSSMTDNQRKKLLWAVSQALQEKKITPKHEQFRQHAADLTRIVKRIFQEFYLGHSSSNSETLLRLAKKFAFSVIAGKNADDVYLQARSQECEAKRLSSTRLSGYIGPEEFAQRKLLLSQTSVVGSAAGSARSLHNIFGSENSIDSFGLSQMSLPTNACSETQSSINSSSKSNLGGLALRENMDCEARRSAQKNFTGKDQQNISPYFGGGGSNSSARKFQMPPVGNSNHSGGKAKRQISFDC

SEQ ID NO: 11167 - DNA, 3353 bp, DROSOPHILA
tttccacaaacaacagtcaagcttacctaaagaaacaccaggcctcccatcagatgttggataatctcaagaatctggatttcttcaagtcccagcagcagcagttgaccatcaatggccaccaattggccgatcatgtccagctgcagcatacaactggacaggcggtcacatctgccgctccctatgcatccttgccacgcccaccgcctggcatgcccatgtacccgccgccaagtggtaagaactatccgggtggacaacgctttccgggatttccctttcagtcattcgatcagcgtcgattctactctcttggggaattttacctatcgcagcacttggaacgatcctcggccttccaatacgtgcaggccaatcacctgaggcaactgtccaatgtggcccaaactttgatgcctcctctgcccgtcaaatgacccaatccgaatacgaatgtcctgcggccggtgccacgcattgcggcaacagcgacggcaacgggacctccagcggcagcaacagcaacaaggcaagcggcaactgccgcaggagtgtcctccgttggccacgcctttaattgggtggctccgtcgaccgcaggtgcaactgcaacgggaagtgcaactgcaactgccacggcgacgactgcagagtccggcggaaatgttatcatgtgacttaacaactattagcagcattgaatcaacgatctctagttaaagtttaataaatcaatcaaattataaggacgtcttttattcgggctgacagctaaagaaattttatttaaacacatttcattttacctaaacatttttattacatatacatgtgaatagtattctaaggtcgaactctacttctgctaaggacatgggatattgcatgtgccagaaaggtttcttttcgaacaccttgaaaaattgaggacttggggccttgaaatagttattaataaataaaattaataaatataactaggataccgtagaataggttactcaccctgtgcaaaaagtaagctttcagatggcatttggtgcagtcgtttttggatctcagattccgcctcattaaatatctccggaagaaggctgattgtctcggtttcttcgctgacatccaggcttggttttggataaatggcattggtcattaaaacaagagttaaagtatcctgatctttgtgaagattaaccaaagtatcattcaaaagctgcaactgctctcttttgtcaatacccgatggtataaattgctccactatgagtagatatccttgtttatatttagtaagaacattcaaagacttatcgaccatcaattttagacttggggcctttgaattaccactcaaatctccattggccatcacacccattaaataatcaaaactactagaatttagggactccagctcatcccttcgctgaatcaaatcgaatattattcgattaattttgctctccttaagtttttggtttctccaatcctttagcaggttgcgtccatcgttggactcgcagagcatctcatccactggatcatatttggtgttgggcaccagactgctcagcatctgcctgcctccaccgatgagtacatttagaaatttaccagtttcatcagagatcaactgttgggctatatcctggcaaccggattttatggagttcagcggcatgctttcatcgcattcaaagttgccattggcgtttcccaaagcagctcctgtgggtccagtaatcctttgagtggtcacaaaaccagttcgcaggccagccaattgtgcctgtcgaagaatgcttatcgggccttgcgttgcattaaataaccttccgcaatcctgctgattgtctgggactttatccaaaggaattcccaaccaaagagctcgggaaacactggccacttgacagggaaactgctgactgcaactgtttttcaagcgagccaagtggggaaaccgatcccaaataaagttggtattgccgcgactagcatcgctggttggaaatcgaaaagcagcccagtctcgtccatcgattccctgtatcacaaatatcctcacgttttttggataagtcaaatcttgtggccttagtgcctcgttcagctcatcaatgcccttatcgtaccagattttctgggaggtcgccaccttatccttccaataatccacatccgccacgttggccacatcgttctccacctcgtacctggtcataaagccaatgcagagcaaagtaaccattaccgttatcaaacatgttccagccaccaggaacacctgggttgatttcagccgaataatttcgcaaatctccttggtctgctgtgtggttaccattgcaaagatgcggccaaaactgattcacaatcgctctcttcttcgggctttatcaaaaagaacattatctgctatttgttgtttgagataaggtttggattcgccttaggagaattacagccccaatcgttggccgttttgttgggtttaagtgtagcaattaacccacgtcatgaattataaatgcactaattggcgtgtcaactaatgcaaaaatgcagtgagagaaattaggatcaaaagatacaaaaaccataaggtgtttattgtatatgcaataatagttacactgtttataactgtatttttgaaatctcattttattagtcgaattatacattaaatattagcttgatatattttgattaagttatgattgttaatggcataactcatgttttacacatattttctccgtataaatgcaaacaatcaattacttatcatttttgccagtgcacaacattgagaattccgagttcaattgccgttttgaggggtcaaaaacgtctcagctttggccattaactatttctcacattggtgtgggccacaattgatttgtgagttggtctaaagcagcccaagttgtcagcaaaatggaatggattggcctcttggccctggtaaacgacaaatactaattgtcatttggcattcaaatgacgttttcaatttccaccccgtgcgacaaactatttcgcttatgaattctcgcccaattaaattggctaacacacggtgcagcaacggtttgttcatttgccagttatgcgaatgcgaaattgttgcctcaattacctgccattagcccgcatttacgcccccttaataccattccatcccaaccacgcccactcggtcagccacgtccgtcatttcgtcgctttgaagttgctttgcattgacatgtggtcagttttcccccagcgaaactgtcacaatttcaattcgaatcccactcaactgacaaagccaaacggtcggatatcactttgat

SEQ ID NO: 11168 - DNA, 1353 bp, DROSOPHILA
atggtaaccacacagcagaccaaggagatttgcgaaattattcggctgaaatcaacccaggtgttcctggtggctggaacatgtttgataacggtaatggttactttgctctgcattggctttatgaccaggtacgaggtggagaacgatgtggccaacgtggcggatgtggattattggaaggataaggtggcgacctcccagaaaatctggtacgataagggcattgatgagctgaacgaggcactaaggccacaagatttgacttatccaaaaaacgtgaggatatttgtgatacagggaatcgatggacgagactgggctgcttttcgatttccaaccagcgatgctagtcgcggcaataccaactttatttgggatcggtttccccacttggctcgcttgaaaaacagttgcagtcagcagtttccctgtcaagtggccagtgtttcccgagctctttggttgggaattcctttggataaagtcccagacaatcagcaggattgcggaaggttatttaatgcaacgcaaggcccgataagcattcttcgacaggcacaattggctggcctgcgaactggttttgtgaccactcaaaggattactggacccacaggagctgctttgggaaacgccaatggcaactttgaatgcgatgaaagcatgccgctgaactccataaaatccggttgccaggatatagcccaacagttgatctctgatgaaactggtaaatttctaaatgtactcatcggtggaggcaggcagatgctgagcagtctggtgcccaacaccaaatatgatccagtggatgagatgctctgcgagtccaacgatggacgcaacctgctaaaggattggagaaaccaaaaacttaaggagagcaaaattaatcgaataatattcgatttgattcagcgaagggatgagctggagtccctaaattctagtagttttgattatttaatgggtgtgatggccaatggagatttgagtggtaattcaaaggccccaagtctaaaattgatggtcgataagtctttgaatgttcttactaaatataaacaaggatatctactcatagtggagcaatttataccatcgggtattgacaaaagagagcagttgcagcttttgaatgatactttggttaatcttcacaaagatcaggatactttaactcttgttttaatgaccaatgccatttatccaaaaccaagcctggatgtcagcgaagaaaccgagacaatcagccttcttccggagatatttaatgaggcggaatctgagatccaaaaacgactgcaccaaatgccatctgaaagcttactttttgcacagggtgagtaa

SEQ ID NO: 11169 - protein, 450 aa, DROSOPHILA
MVTTQQTKEICEIIRLKSTQVFLVAGTCLITVMVTLLCIGFMTRYEVENDVANVADVDYWKDKVATSQKIWYDKGIDELNEALRPQDLTYPKNVRIFVIQGIDGRDWAAFRFPTSDASRGNTNFIWDRFPHLARLKNSCSQQFPCQVASVSRALWLGIPLDKVPDNQQDCGRLFNATQGPISILRQAQLAGLRTGFVTTQRITGPTGAALGNANGNFECDESMPLNSIKSGCQDIAQQLISDETGKFLNVLIGGGRQMLSSLVPNTKYDPVDEMLCESNDGRNLLKDWRNQKLKESKINRIIFDLIQRRDELESLNSSSFDYLMGVMANGDLSGNSKAPSLKLMVDKSLNVLTKYKQGYLLIVEQFIPSGIDKREQLQLLNDTLVNLHKDQDTLTLVLMTNAIYPKPSLDVSEETETISLLPEIFNEAESEIQKRLHQMPSESLLFAQGE

SEQ ID NO: 11170 - DNA, 8737 bp, DROSOPHILA
caagtcctttgcagacattcacctgcaaatgaaattgttcgccgtggctttcgaaatttataagcaacttctaaacgcgcctgggcatttacattagtaaactaaaatataataatacaaaaataatgataatgtagaaaaacctgctaggcgattaagttgttgcatgcacgaattatacacaaaaacaaacacatgacagacacaactaaaattaatttaaccaaaacaaaaatgcaattatatcattctcgttttattataatatgcatataactagaaacttttcaagttgacgcaaaggggcgcttttgaagcgcccatttcgtcaggttttctttagattttcttttcgaaaaactacgcctagttgcccggattagagttaaagttttagtttacatattcaatgtttcactttcgattcgttcgttttgcttgttaataattgcctttgagtttcttttatacataaatataattcattttgattgttattgaagcttttttagtttcaattcaaattataagcctaggcatgaattttcttttattacttcctcctttttgtgtataattcgaactgtattgtgtgtgtggttgtgtgtgagtgtatccttgtgtgagtgtgtgtgtgtgttagtatatgctttcacatttgttacatatttcatgtatataatttttcgattcctatttttttagttactcttatagtttctcaaacaattggttagtggagcttgttgttggctgatgatgttgttctagtgtctgatgttgatcggatgttttgtttgttgttgagttgtgttgtgttgtgtggttgttgttggttgttgtgttatgtggcggctacattcaaggacatcaacatgattattaaactgccccgctgcgcatacaacattgttactccgtcgaacgatgtgcaattcgtgttcatgttgttctagccatctgtgagctgttgctcctcctaccgctttggccactcggcttaggacgtgccattgaccaggccctcctttttgacattctccgccagctgctgctgtccggatggctggtccgtgtggttgttgctgcgattcttgttgcgtcgcggtttcggctgctgctgctgtgccgcctgctgctgttgtacctgcgatggctgttgctgctgtgtgcccgcctgctgcttgtcgccgttgcgtgaggcatccttcggcttgctcgcaccgccagcggcgttcgcattgccgctgttctgtttgctggcatctccggcatttagtgccgccttattcccaggcgccggcggctgctgctgttgtggctgctgcgccgactgaggtttgttgttgttattggcaacagctccgtttgctgcagaaacaacaagatgagtttacaggtaagttggggaataagttagcccctgcggcattctactcactgttactgggtccattgttgttcttctgccttctgcgcctccgcgagctaccttcgtacgatgagttactgtccgctgtggagaaaaggataatggataagttatcatagtatactagcagagattacagatgacgataaaaaggaaataacttcatcagcaaaaattcattgtctgtgcccctgcgcacttcaattaaatgaaaaaatatatattttgatatttatttaaatacaaagcccaggtcagtgtttctattttatatattatattgttggcaatgaaagcgaaagttaagattcaataatgtataatgttttacttttgaaaagtttattatcatactttacacaaaataaaccaagataatttcatttattttattcagaatgctataattatagggattttatgaaacagtccttaatgtaatactttatactgtttaataactaataaacttgctgtacaaattttcgtattcttgaccccacatgatgtccatatttaggggagagggaatcggatcgagtattcaatttgtatcttgtgtgagcgcgcgaaataaattgattgaactaattggttaattggcatcatgattcgcggaactcacctctctccacgctgctcatttcacgggtctcccgcacctcttcggtggtgtggttgtggtgctgatagtccctgccattctgctgatcgttgcgtggcggccggcggttgattccgccgcgcctgttgttgccaggaccaccggcgccaccaccgcctccacgatagctgccagtgttgtcaccaccgccgcgatcgttgtagccacgctgctggtcacgctgatgatcgccccgcgagttgtagtcatcctcgtcgcggcgattgttgtggtagcgctggttcaggccattgccacctccaggaccgccaccaccacgtccgcgtacacgaccacgctggccgccaccaccgccgcgcatagagcgcaccgactcaatgtcactgctgtagccgcgctcagagcgccgcgtcactgggaagctctgtgtggagcccatggaggattcctggatggcgcgaagctgctgatcaatctccatcttctcctgacgcaactgttctacttcctatattaagaaaaccgaatcgaatatcatcggacggattagttaaaccacgctataacgcaaaaactatgatcgaactcaccttcaggtgcgacagatgatactccaacagcactttggcatttgcaatgctctccacggtgccaatgaacacaaagggtacatgcgccagctcacgtggtatgttctgatcctgttcatcgtcgccagcgatctgaccgatacagattaaaactggccctcgtttagcgcacaatactcacagcactcaccttgattcgaaacacgccactcttgtccacaatctcctggataatgcgcccattcttgccaatcaccttgcccaccaactccctgggcacctggaagaactcctcggcgtattcgagcatcgcgcgggcacgctgcacagactcctcggtctctccgctgattttgaatgtgcaggacttctcctccagctcgatgttggtgacgccgtccacagtgcgtgccgcttgaatattcgagccatgcgagccaatcgccaaacccatgagatcgtcacgcacacggaactcctcaacgtagtttctaaagaaaaaaaatagaagttgatgtgatttgtttgtttttatattagcaatgtcaaactaacccacggctcatcagtttagttgtttcgagctgacgggcagcttcttcagtccttttcaacagcataacctttaagttagattagagttaagacaagttctcaattccttacgtttgtgtacacaccttttgtgagagattacgaaaatgcatatccttgagcatactggctcgcttctgagtgtgctcaaacttggagatgacaatcagggcgtccagatcgcgactgtagttgcacacgccggcatcgattgtgcgctgaaactccttgtgtataccatccttctgggctctataattacgcaattaattggttttactacggatcatagagaaatagatcaaaagcacacatactcttcgcgcaactcctcgggcacgggcagcgtgaactggtagaaggtcttggctgtaattggcggattcgagtttttggcgcgcagacgacccaattcacagatttcggtgtaggacgtctcaaaaccgatgtacgcgaccgcatagatttccgctttgcgcattttaataatgcccacccaccagccgcaggtttcccgatcgttcgtgcgcgtgaacacctccacttccatgccctcctcgaagatcggtgcggccacctcaacggtttcctcgggcggcaggcgaacgttcacaaatggatatttcatactctcgggcacgctgcaacaatgcgtgtgcgaatgaggtataattaattaatcatgctgcacttgttatttattcttagcataaaggtctgcggacaggtgtttgcatattctctggcgacagctgctccgctggcagtgtgccaacagccaactagcaacagcaacaaccaatgtgggggttttcacagtgaacccacgtccatacccatgctcccattggcaaaaacccattcctaatcccgcccagaaacgcagatcggaaacgacacaccgtccgacaggatagtggcgcaactaaatttagatccagctgctcagctcaagtggatttcggtgtgtcagaagagatggaaggcaacaaaaaaaaaagttttgatccaaaaacgtcacaagaaatgcagcaagcacacaaaacagaaacaaaacacggacataaaacggcagcaattaaaaaacgcttaatgaccgttgtgttctcttttgatttttctataaaaactcatagaaatatattaattaatttttggatcaaactatggtgttgcagagcatttcagagtaactttaggtattttaaaaatagacaataagaactaaatttaaactttaagacaccaaattgttatgctacgtgaataaatcaaagttctcatttcagatactcggtaaattatgaaaatttatgaaaataaggtacattttagttacaagacgttcggctagagcgtcataaccgaattcaaaatgagtaattataaatggtttctttccgcggttaaaaatagtcgcgcctttgacgctggccgccgtttcagcgccgctgcttagtggcatttgtcgttcgcacttgacagctttggcagagatggaagccatcccctgctcccgcttcttgggaagattgcctctgggaatcgaggggaatcggggaacttcccaagtcagtggggcggacagttgcggatggcgttggtcagtctgtcagtcagcagttttatttgatttggctcattttttttttcttttttatcaactaatagcaacagaaactgctgcagcggcgtctggcgtttaacaaattgcgccaaattagtgagtccgcagtaggggattcggcgggaagtggtttggcggatggcggacgacacaaatgatgcgtgcccagaatctctaatttctaattcggatgccaagaagtcgcgtcggtggttgttgctgctcctgctgcagctctgattgtattaatcgttgcaaattagttagaaaatacgctctagttgttgttgtttgccctgttcgcagatttgtttgtttaaacaaacttacccgtccacatccacaaagatgccatcatcggcgacagctgtcacctggccctgttgttgttgttgtcgtcgtcgtcgtagtttttagtttgcagttgtagttttttgttggcggcaggcaggcagcaaacggatgaaatacaagagcattgacagggccagcatcggaaggcataggagtagagagagaaaaatgtgtgtcattaatgtggccattgcctatgatatacctccattcggatgtgtgtatatgcataagtatataaaatatatttttacgatagtccccccaatcccgtcccattgtgaaatcgagaattgcaatggcattagcgagggaaaccgtatatctccgataagcgagtagtcgtagaaccttatccgaaatgcaaacagccgacagctgaatcatcagcatcagggaagtcgctctagtcgagtgtgtttatgtgcattgcccttgttttgattccaagcactgaaatcaaaggcaacgctatgcaaagtattcactaccttactatacatatccagaaggtttccagaataggttagctaatgatggggataagtactaagaacaataattgaaagtataagaatattcttaagtgcactgttatctggtttccaaaatgtctatattatcattggaaaatttaagcctataagcatacatttttgctgaatttgtttaaacagtgaacaataaaacacatcaaaagctagcattatgaatgggatttaagactgaacttcgttcataagactaatgattcgagatctaacaacctcgtatacctgtaatctatccgcgaaaatcacttaaccgcgatataagatggtttaatcggatcttatctttataaattgcaacgacaagaaagggaaatcatcaaaacaacaaaaccgaatgcacgacgacgtcagtgggcagcgcagtgggcggcgcggtccgcgtcgacatcgacatcgacgtcgacgtcggcacccccacaacgcagtgtgcgtgagtgcgttggtgtatgcagattggcgatggtgctggtattagtgtagtagtggtagtggtagtggtggtggtggtggcgatgatgtcgagactccactcaaaatgttgctgtttattaatagaaataaagctaaaatccacgaaattagaaactgaggcagctgctgccccaactccttgctcctctgtttttccttctttttttttgtcacccccttaccaacatttttattccaccaattgaatcaactcaccttgtagtaggcgccattgtcgagccgaacttccacgaggagatcttccatatcgccagacgtagtgcctcctggtttatccgctttgttttggttctggttctggtggttcttcgccgtccgtccctgtccctcctgctgctgatgctgatgctgcccagccttcaactcccgacttttccccgtcgactgcagtttgccgcgttatctggggctcctgagggggaagaatggagatattagggctatagatatagctaggtatgggtgggtatgctcacaattcagtgtgcagtggcagaaacctcgcgttcctgcttctagttccttgtactcaaatcagtcttttgcttggcggctgctgcttcaaatgttgcctgtaatcaataataatatggaatggttttgtttttggtatttttgaatttttgtatctggagagggagactatatattgacacactaataaaaaaaatagttgaagaaaattttgaagttattttgggggccagataattcctagctaaacactaaatgcagctggcggcgaagccggcagcgacgtcggctttgccggcagcgcagcagcgcagtgcttcctcttcttctttgtctctctccctttgtgtgtgtgagcccgccgcctcacacacacatgaccaccaccaagcgtgtgcgctctcgctctctttttctctctctctcgccgccgaaatgcttcgttcgttcgttcacaccgatgaacacgcttttccaataagaatttgtacgcacactacgaacggcacatgccgaatttacatatcgaatttacacataatttccacacttgctttcgattttcgcttttctcaaagagaagaaacatcagcgttgcgtagccgctcgccgtttttctcgttctcgttctctacttttctttttgtattttatcggttttcctctttcagctgctcccttttgctgccgctgccggcagagaggcggcgtcgctgctgtcgtcgacgtcgcagccgccgacgatgtgcaaaattttttggtttttttcggttcttgcaaaattttttcaacactttttgcggctgtaatacacaagagactgcaaatttttgaaaacttactgctggccggcacttttgcacttcgtttgccctcggcggatgcctgtgaatgcggctttaacctttgaaaatacaaaatatatcgcgtgcagtgctgcttcaatttttttcggctgcgctgcgttctcttcgttttgcttttgcacactttcgcagctcggcaacgttctactggagttgccacccgtttacaatcggcgcgcgttactggccacttcggatggttttggctagatttcgggcgtgtttggcccaagcgataaatttgtgaaaataagatacgaaatttttgataaatgatttgtgctctataacacagggcttgtttgaaagcgagagaaaaatgatctgacagtaaagtggcaaggctgctaagtgacagctcaccgggccttgccagagtgactataagttgtgggttcacaataaacagggttgtattttaagcgcgctaggcggttacgattcgaaattcaaaaagctgataagatcatttaaaatttaaatgaagtcgacgaaccgaacactattgactgctcacttagtttgctgtctgctaacaacgtaattgaattgctagcccatcagcagattgattcgcatgtttggtggcttttcaattgattcgattcgattttaatttgcagaactgctgaccactacgccttaatgttaatgtaattgtctatgtaattgcaacgactgctggggtcaacagtgggcgcaatttgccacatgcggtgttttatttgcccctttgattgcccccaaatcgcgtgacgtcgctggcgctttttgtcaacacgcttgttgaatttgctttttactattttttttttcttattttgcccttccattcatgaaacgcatttgattatgagtggccgataaaggtgcagtgcggtctatttgtaatccaatttccatcaattttcagcggatcggacagcagaaatctgacggagtactccatttaggatgaaaccacatatttgcttggaactacttaataagatttatgaattatatttgtgaactttactcttgattaataagtgggcaagtctaaaagctcgcctgtatttaaatcgcatgccatttaggcatttgtgtggtgaaaatgggccaacaaattataaaaattcatggccag

SEQ ID NO: 11171 - DNA, 2455 bp, DROSOPHILA
cgaaagtgtgcaaaagcaaaacgaagagaacgcagcgcagccgaaaaaaattgaagcagcactgcacgcgatatattttgtattttcaaaggttaaagccgcattcacaggcatccgccgagggcaaacgaagtgcaaaagtgccggccagcagcaacatttgaagcagcagccgccaagcaaaagactgatttgagtacaaggaactagaagcaggaacgcgaggtttctgccactgcacactgaattgagccccagataacgcggcaaactgcagtcgacggggaaaagtcgggagttgaaggctgggcagcatcagcatcagcagcaggagggacagggacggacggcgaagaaccaccagaaccagaaccaaaacaaagcggataaaccaggaggcactacgtctggcgatatggaagatctcctcgtggaagttcggctcgacaatggcgcctactacaagggccaggtgacagctgtcgccgatgatggcatctttgtggatgtggacggcgtgcccgagagtatgaaatatccatttgtgaacgttcgcctgccgcccgaggaaaccgttgaggtggccgcaccgatcttcgaggagggcatggaagtggaggtgttcacgcgcacgaacgatcgggaaacctgcggctggtgggtgggcattattaaaatgcgcaaagcggaaatctatgcggtcgcgtacatcggttttgagacgtcctacaccgaaatctgtgaattgggtcgtctgcgcgccaaaaactcgaatccgccaattacagccaagaccttctaccagttcacgctgcccgtgcccgaggagttgcgcgaagaagcccagaaggatggtatacacaaggagtttcagcgcacaatcgatgccggcgtgtgcaactacagtcgcgatctggacgccctgattgtcatctccaagtttgagcacactcagaagcgagccagtatgctcaaggatatgcattttcgtaatctctcacaaaaggttatgctgttgaaaaggactgaagaagctgcccgtcagctcgaaacaactaaactgatgagccgtggaaactacgttgaggagttccgtgtgcgtgacgatctcatgggtttggcgattggctcgcatggctcgaatattcaagcggcacgcactgtggacggcgtcaccaacatcgagctggaggagaagtcctgcacattcaaaatcagcggagagaccgaggagtctgtgcagcgtgcccgcgcgatgctcgaatacgccgaggagttcttccaggtgcccagggagttggtgggcaaggtgattggcaagaatgggcgcattatccaggagattgtggacaagagtggcgtgtttcgaatcaaggtgagtgctgaacaggatcagaacataccacgtgagctggcgcatgtaccctttgtgttcattggcaccgtggagagcattgcaaatgccaaagtgctgttggagtatcatctgtcgcacctgaaggaagtagaacagttgcgtcaggagaagatggagattgatcagcagcttcgcgccatccaggaatcctccatgggctccacacagagcttcccagtgacgcggcgctctgagcgcggctacagcagtgacattgagtcggtgcgctctatgcgcggcggtggtggcggccagcgtggtcgtgtacgcggacgtggtggtggcggtcctggaggtggcaatggcctgaaccagcgctaccacaacaatcgccgcgacgaggatgactacaactcgcggggcgatcatcagcgtgaccagcagcgtggctacaacgatcgcggcggtggtgacaacactggcagctatcgtggaggcggtggtggcgccggtggtcctggcaacaacaggcgcggcggaatcaaccgccggccgccacgcaacgatcagcagaatggcagggactatcagcaccacaaccacaccaccgaagaggtgcgggagacccgtgaaatgagcagcgtggagagagcggacagtaactcatcgtacgaaggtagctcgcggaggcgcagaaggcagaagaacaacaatggacccagtaacacaaacggagctgttgccaataacaacaacaaacctcagtcggcgcagcagccacaacagcagcagccgccggcgcctgggaataaggcggcactaaatgccggagatgccagcaaacagaacagcggcaatgcgaacgccgctggcggtgcgagcaagccgaaggatgcctcacgcaacggcgacaagcagcaggcgggcacacagcagcaacagccatcgcaggtacaacagcagcaggcggcacagcagcagcagccgaaaccgcgacgcaacaagaatcgcagcaacaaccacacggaccagccatccggacagcagcagctggcggagaatgtcaaaaaggagggcctggtcaatggcacgtcctaa

SEQ ID NO: 11172 - protein, 679 aa, DROSOPHILA
MEDLLVEVRLDNGAYYKGQVTAVADDGIFVDVDGVPESMKYPFVNVRLPPEETVEVAAPIFEEGMEVEVFTRTNDRETCGWWVGIIKMRKAEIYAVAYIGFETSYTEICELGRLRAKNSNPPITAKTFYQFTLPVPEELREEAQKDGIHKEFQRTIDAGVCNYSRDLDALIVISKFEHTQKRASMLKDMHFRNLSQKVMLLKRTEEAARQLETTKLMSRGNYVEEFRVRDDLMGLAIGSHGSNIQAARTVDGVTNIELEEKSCTFKISGETEESVQRARAMLEYAEEFFQVPRELVGKVIGKNGRIIQEIVDKSGVFRIKVSAEQDQNIPRELAHVPFVFIGTVESIANAKVLLEYHLSHLKEVEQLRQEKMEIDQQLRAIQESSMGSTQSFPVTRRSERGYSSDIESVRSMRGGGGGQRGRVRGRGGGGPGGGNGLNQRYHNNRRDEDDYNSRGDHQRDQQRGYNDRGGGDNTGSYRGGGGGAGGPGNNRRGGINRRPPRNDQQNGRDYQHHNHTTEEVRETREMSSVERADSNSSYEGSSRRRRRQKNNNGPSNTNGAVANNNNKPQSAQQPQQQQPPAPGNKAALNAGDASKQNSGNANAAGGASKPKDASRNGDKQQAGTQQQQPSQVQQQQAAQQQQPKPRRNKNRSNNHTDQPSGQQQLAENVKKEGLVNGTS

SEQ ID NO: 11173 - DNA, 4453 bp, DROSOPHILA
taaccacggaattaatcgttatctaagattagctggtaattgttgtagtatcttaaggcttcaaagagacacgttcacgtgttgtatcatttaattaattatatacataatttcgcgctagggtagggcaatcggaattaagcgagtgatgccattataatcttaactgaaattgcagagtgaagccaatttgatttccccgaatgtgtgttttatttaacagtgacaacgcagcagaatcgttaagccactgaattcttatataatgcataaaactttctcgatggttttcagtcgaacttttaccgatcatttcttagctttcgtatgtgttttacaccgcttacgtacttcattgaaacaatttacctgtacaatctttagacttcttgacttcattgatttcgttatgaataaatggtataatataatgtttatacctaataatacatggttaagctgtcgatttattggtttttgctgccagaggtttcaatctgatattaaggatctttagttcggggatccactgctgatttgagtagatagttgtcagttgtgggcttaaaaactataagtaatttgtataatttcagttttttaaatgtccgtctgtctttcgtagatctataaacgtttgagattataactcaaaaacggtcaaacaattgtgacttgcccaaattttacgttacccgaatagttatcaatgataagttatcagactgtcgcaatggcttacctcattaagatttgatttgaactctaattattaatcacagaccaccaaggaattttacatttgtgtatttgacatgtgtattatacacgtagccttccaaatatacatgtaaaaatactgatcaaactggtagataaaatatgaaatcacaacaactataaactcaacggtctattatttagtttatcagccattaagcctttaatcttatagttcaaatcgctagcaacaattaacttgcacaaaacaaaaccatttcagagctatttacaaaacttttattgccatgaactttgttcctaaatgcacaactatgatgttagtaattaacgtttaaggatcgcattacaagttggacacattcgagtccagcacggacagagcctcgtccttctcctcctgcagctccttgccggtaacgcttaactttgtcttagcgaaatcgctgagggtcaggccagagacgattttccattgcttattcttgatctcgacggggaacgagaagatcacatccttgggcgaatcgtagctgccgtcggagaagacacccatggagacgaactggccgggagcagtgccgttccaccagtcgtgcatgtgatcgcaagcggccttcgccgccgacatggccgatgacattttgcgggccgcaatgacagcggctccacgcttctgaacggtttccacgaaggatccctgcaggtagccattatcgttgatcgcatccaccacggacttaacggtaccattggcggtcaccttggcctgtccagcatcgggatactgggtggaggagtggttgccccaaataatgatgttcttaacagcagaaattggcacacccaatttggcggcgatctgggatgtggcgcgattctgatccaggcgagtcatagccgagaaattttcgcgcggaatggaaggcgcataggaggagcagaccagggcattggtattggccgggttgcccacaaccagcaccttgacgtccttcttggcgaacttgtccagagcctggccctgggtcctgaagatcttcacgttggcggacagcagatcctttcgctccattccctccttgcggggcatggcgcccacgaggaaagcggccgagacatccttgaatccaacagccgggtcggtggtgggcaccacctcgaccagcagcggcagagcgcagtcggccaattccatgaccacgccctcgagcacaccaaccatgggcggaatgtcgagcaggtgcagcacgatgggctgatccttgccgaacacctcgccgcgggcaatcatgtacagcagggagtaggcgatttggccagcggctccggtcaccacaacacgaattggttcagcctgaaaatatattcactcgattaggaacattcctttaagtgtatttcatcttcctttttccatttctttatgcattttccgtattttatttcaagaatgttcttagctatgtttagatgcagctaaactaattatactgtaataaggggcgaatttttcatccagcctttggctttggatctatattttatttttagacgcttagcggcgaggaaatatatgcgaaaactgctaactacacaaaatacttcgtatatatccagctcgccatttccgaattaaaacccatttaagtgcaatttcagcaaaattaatgcaaatatgatagctgaaaataaacaaatgcgtgaccaggttttttgttactgttttgaagtgtgtctttatcagcttgcatttgttgtttacgatagataacgaatttactttatactttatactttagctagaactcttaaatttcctctccatttatctctgagctggcattttcaatagttatagatttaataaaacattttataagtgatgtgctttgatttttgcttgctagtgcattttccgcccatcctcgttacgcaatcccagttaatcctttcctaagggcactaaaagtaggccacttgtggcaattgacccctatttatgttttgccctaaagaaaagtcacagggcatagtttccagtaaaatgtagctaaagacgggaattactaaacataacatatattatatttttatattatatatttgtcattgaagaagtttttaacttccaaacaattggaagcgtaacccctgggagcatttagcatttttgataagatatgacagatttgaactgcatggactttgcttcaccgcctccaatcatccggtttatataagctctatctgctccggcaagagctattaaaacatgaaaacaacatttttatcgccgtcaattggcaattagctcgcatttgcaataaattcatgcttttgggggcctctgaaaatgcaacatttgtgcatacgttcgaattgacgtcactaaggtttttggtttttaagattagcatgaagagaggtcaaatgaatgttaaatttccagaaaaattattgcgaccaatcacacataccgtcataactacacattattgtgtacggcactttgaatgcatatgtatgcatattcttcacatttgataatcaaatatgcagattattaataataatttgatgatatatactatacgagcgtagcgagaaatcgccggcaagcttaccattttagaatttcacaggtgcaacgctccacggacgaacttcaagtaaaaacgtaaatagggatcgccaattgggaacctgttacttttcacaattattttccagtcactactttttgaataaaagtagccgtgactccaacgcaatatgtttttggcaaaataatcgattatgttgctccttacaaatttactaaatttttaaataatacaaagagttaaggagttctcttattgttattaatatttacagttgccaaaaaaaagtaaatacatatataaataaataaaacgatgataaatgaaaaattaatagaaatatagttattaaattagttaatgtaaacaacaaaattttgcagaaaaagcatcaaatatcatatttctttgcattattcttggtcactttgtttacacatacaaaattagtacctagctatattttcatatctgaaatacgcaaatgcagtcgtgtgaagtgattttttcgcttgctattatcgatagtttgagctgtggaaaaaaatcgaatgtttcttgtggaaaaaattggagtctttaatttggcgaatccattcgtttactttgcgtttatttttagccttagtactttcgtttgatacgtttgctaccaagtatttataaaaattaaaaagcgttcaaaaacacaattaaccattgcaacgtcgtttcatcagctattcagagtgaataaagaaaacctacatcacacctacaatcatacgtgttacgtgtacatacatatgtgtatgtatatatactcttgcttatgtacattaaacatttgccgttttcctttccaaccagccttttgttattgtctaaaaatcgattttcgttacccttttatacgagttcgtgatttgccataattaataaacaataaatcacagctgtggtttggtaaataagtgcagcgtgaacaatgtacgcttatgtacataaacactcgcatatgtgtgcgtatatagtggattaacaaattgctgatgtacacatattaagtgcttttacaatgcatacgcaaatatcgatgcaaattctagtaattttgcttaataccc

SEQ ID NO: 11174 - DNA, 1183 bp, DROSOPHILA
taacaggttcccaattggcgatccctatttacgtttttacttgaagttcgtccgtggagcgttgcacctgtgaaattctaaaatggctgaaccaattcgtgttgtggtgaccggagccgctggccaaatcgcctactccctgctgtacatgattgcccgcggcgaggtgttcggcaaggatcagcccatcgtgctgcacctgctcgacattccgcccatggttggtgtgctcgagggcgtggtcatggaattggccgactgcgctctgccgctgctggtcgaggtggtgcccaccaccgacccggctgttggattcaaggatgtctcggccgctttcctcgtgggcgccatgccccgcaaggagggaatggagcgaaaggatctgctgtccgccaacgtgaagatcttcaggacccagggccaggctctggacaagttcgccaagaaggacgtcaaggtgctggttgtgggcaacccggccaataccaatgccctggtctgctcctcctatgcgccttccattccgcgcgaaaatttctcggctatgactcgcctggatcagaatcgcgccacatcccagatcgccgccaaattgggtgtgccaatttctgctgttaagaacatcattatttggggcaaccactcctccacccagtatcccgatgctggacaggccaaggtgaccgccaatggtaccgttaagtccgtggtggatgcgatcaacgataatggctacctgcagggatccttcgtggaaaccgttcagaagcgtggagccgctgtcattgcggcccgcaaaatgtcatcggccatgtcggcggcgaaggccgcttgcgatcacatgcacgactggtggaacggcactgctcccggccagttcgtctccatgggtgtcttctccgacggcagctacgattcgcccaaggatgtgatcttctcgttccccgtcgagatcaagaataagcaatggaaaatcgtctctggcctgaccctcagcgatttcgctaagacaaagttaagcgttaccggcaaggagctgcaggaggagaaggacgaggctctgtccgtgctggactcgaatgtgtccaacttgtaatgcgatccttaaacgttaattactaacatcatagttgtgcatttaggaacaaagttcatggcaataaaagttttgtaaatagctctg

SEQ ID NO: 11175 - protein, 315 aa, DROSOPHILA
MIARGEVFGKDQPIVLHLLDIPPMVGVLEGVVMELADCALPLLVEVVPTTDPAVGFKDVSAAFLVGAMPRKEGMERKDLLSANVKIFRTQGQALDKFAKKDVKVLVVGNPANTNALVCSSYAPSIPRENFSAMTRLDQNRATSQIAAKLGVPISAVKNIIIWGNHSSTQYPDAGQAKVTANGTVKSVVDAINDNGYLQGSFVETVQKRGAAVIAARKMSSAMSAAKAACDHMHDWWNGTAPGQFVSMGVFSDGSYDSPKDVIFSFPVEIKNKQWKIVSGLTLSDFAKTKLSVTGKELQEEKDEALSVLDSNVSNL

SEQ ID NO: 11176 - DNA, 3489 bp, DROSOPHILA
cgaacttgaccagcctggtcttaaacgaaaatcccatcgaaaatttgattggcgacaagtaagagtcattctaggattcgtttaagtgtatgcgcaaaacaatatatttattaattttttcagtgtatttccacctttgaccaaattgacccacctcagcatgacttttatgtccaagttgtacaaaattgggccaggagcatttagtgaactgcaaagtaagttgtgaacctgcgcgcactaatggctaatggcttaatcgaacaaccatctttctttaggtttaactgaactgatattgtccgacaacaaactgctaaatgaaattgatgaggaggctctatccaagaacgtaactggtggccagtacttggactacccgccattggaaaaggtaattcaagtgcaaaagcatgtagagctttaatcaactaaataacataaacttttaggtttacttgaataattgcaacgtgtcgactttgccgaaagaactactagtgcgctgggataaacttaaggctctggatcttagattcaacccgtggaattgcgacgaatccaatgacttcttgatcaacgtcttgatagatcgaatcaacaagaccacgcccgttctggccaaagatgtcaaatgtggcggtccgaacaagttaaacgatgttacgctgctcagagtggcgaatgaacatatgatagaaagttcgacgggcagtcttatatgggttggactcttggttgtcctgctcatcgcggtgccgaccatcattggtgcttacgtgatgaagaggcgcggctgctttggcgtctttagacgtcatgacagcggtgctagcagtgctctctataataggactagtttcaacgaggatttccatatttaactttctttttgtataataattaaagccttgaagccttattattctgttagagcgctggtaatttggcgtaaatctgtaaatacacttacataaattaagtaaacgttgattgttttacacccttagttttatttacggctattttgctttagattagataccaagatctcttgttttaaaattcttagttaaagtcaaacgagaataccgaacgttaatttcgaactaagcccgattgaaaaccattgaaatagggatgctccaaaatgtccttggcggaaatgcgatgaactggatcgtagattaacatcttttgtatgagatcaataccattcgcatcgagattctttaactgattggtcaattggttcgtggaccagcaggggaacgtgttcttatagtcgggtagcgaagtaacgcccggccaaatgtcttcggtaggtgttttcagaattctgcaatcaatgagtgtgagtatcacagggaatagaaagtaaattacctgtggttacctaaacattctaaacaactggtcaatttccgagtcaccctggaatagcggctttctcgttgccatctccgcgaatatgcatccaatggaccagatatcgacgggacaggaataccggggtgaacccagtagcacctccggcgctctgtaccacaaggtaacaatctcgtgcgtataaatgcgcaccggaatgccaaaggatcggccaagtccaaagtcggcgacttttatgaggccactcttgtcgattagtaagttctgcggcttaagatcacggtgaagtactcgccgacgatggcagaaaagaatggcgctagttatttggtacaaatagctacggaccaattcactctccatgtgcttatcaactggcagcgaatccatgtatttcttgaggtccatcgataggaattcaaagatcaagtatatgcggttctcctccatcaaaacatcctccaaacagacaatgttttcatgtttcaactccttaagcaacgaaatttctctgtaatggatattaaatattactacattatagaaaaaacatgtgattaaagtattttagttattggtctatcagttgaaccagaaagtattcgcaggcttccaattaataaacataaatagaaagtatgatgatgtacacatgagcataagtacgcatataggattgtacatacacacacatatgtatgatgaacataagccgtaacataattatgctagacttccacagtataaattaaaaacaatattgcaaaatcttcaaaccaacccataagatgtcaaggaacatactttcaattaagcatataagccatttgaatggaaaagtcgcgaaagaacatgaaacattttgaggcttgggcgtccaagccgcggcattttacctgatcgcggttgatggaacgccttcgtcgtcggactccaagcggattttcttcattgccacaatttggcccgtcaggcggttgcgacccttatacaccacgccatatgtgccctcgccaatcttctcaattttctcaaaatcctccataatttattaagctatttctttgcaagccaccgacttttaaattagcgcgtttttgacgtatatgctctagtattaccagacagtttaaacgatgctaagctagctacatttattcatttggaatgtgggaatgaaactcaatattcaggcaacttattgaattgctgtatcttaaaaatgttgttaatttttttaaagttaattttagtgtactgtaaaattccacgcttttttttatagtgatttcaattaattaagacatcactttgtttgagttcggagacaaacgtttctgctaatatactattaattaacttatgagtttttggtgcaattaatttctattttatatcttttgaaggtgagtaccagtagtacggtactaaagaaattaatttaaaaaatgtaattggaataccgcaactgttttacttcatttttgttgtttcaaaattactaagctctttgtcgatatcttgacacacctatatgcatgccgcaaatgtgcataacatatatataacatagtttttttattttttgccgacacagcagacgatgtaaacatgtcgcttttaggtaggattgcagagaaaacttcaaggctcaggtaagttaaacttctctaaagtgttacttatctctaaaaacacaaatgactgatcacccatttgtttattgtagctgccttcgattgatgtcggtgtatcccacacactatgtcgaaccaattgtacaaaaatataaacaactagagcaaaagaatgatctgtccaagctttaccatgtgcccatcaaggcggcggtcaacaaatcgtctgataccatctttcacgacgatacaaaacataaaatgatcaattatataacgaaaaaggggaacagtgccttggccagaacgcttttgtccaagacgctggagctaataaaacgaacccagacggagcacatgaatctggccaaaggggagaagacaaccataaacaccaatcccgaaacgcttctgaaacaagcggttgaaaactgccgaccgctccttcaagtgaccgccataa

SEQ ID NO: 11177 - DNA, 1047 bp, DROSOPHILA
caaaaacgcgctaatttaaaagtcggtggcttgcaaagaaatagcttaataaattatggaggattttgagaaaattgagaagattggcgagggcacatatggcgtggtgtataagggtcgcaaccgcctgacgggccaaattgtggcaatgaagaaaatccgcttggagtccgacgacgaaggcgttccatcaaccgcgatcagagaaatttcgttgcttaaggagttgaaacatgaaaacattgtctgtttggaggatgttttgatggaggagaaccgcatatacttgatctttgaattcctatcgatggacctcaagaaatacatggattcgctgccagttgataagcacatggagagtgaattggtccgtagctatttgtaccaaataactagcgccattcttttctgccatcgtcggcgagtacttcaccgtgatcttaagccgcagaacttactaatcgacaagagtggcctcataaaagtcgccgactttggacttggccgatcctttggcattccggtgcgcatttatacgcacgagattgttaccttgtggtacagagcgccggaggtgctactgggttcaccccggtattcctgtcccgtcgatatctggtccattggatgcatattcgcggagatggcaacgagaaagccgctattccagggtgactcggaaattgaccagttgtttagaatgtttagaattctgaaaacacctaccgaagacatttggccgggcgttacttcgctacccgactataagaacacgttcccctgctggtccacgaaccaattgaccaatcagttaaagaatctcgatgcgaatggtattgatctcatacaaaagatgttaatctacgatccagttcatcgcatttccgccaaggacattttggagcatccctatttcaatggttttcaatcgggcttagttcgaaattaacgttcggtattctcgtttgactttaactaagaattttaaaacaagagatcttggtatctaatctaaagcaaaatagccgtaaataaaactaagggtgt

SEQ ID NO: 11178 - protein, 297 aa, DROSOPHILA
MEDFEKIEKIGEGTYGVVYKGRNRLTGQIVAMKKIRLESDDEGVPSTAIREISLLKELKHENIVCLEDVLMEENRIYLIFEFLSMDLKKYMDSLPVDKHMESELVRSYLYQITSAILFCHRRRVLHRDLKPQNLLIDKSGLIKVADFGLGRSFGIPVRIYTHEIVTLWYRAPEVLLGSPRYSCPVDIWSIGCIFAEMATRKPLFQGDSEIDQLFRMFRILKTPTEDIWPGVTSLPDYKNTFPCWSTNQLTNQLKNLDANGIDLIQKMLIYDPVHRISAKDILEHPYFNGFQSGLVRN

SEQ ID NO: 11179 - DNA, 9770 bp, DROSOPHILA
tttacgatgcagataacggattcgatccatctgatggctgcgaaggcgccacaactgatggcgccaagcaccgaccacaacatcgctggaagtgcagaccacgtcgtagatccgagagttgtctgcaggactgcaagcaagaggactcctttgttccagaagaatcctttgagattgttagtccgctgagctgctctcacggcgtccagaagcactatcaaaagcgcaatggcacatcgaagaagaacatatttcggccaccaattttgaagtccttgtacggctgcgagcatggcaaatggattgtgcgcagcggcaggattgtgccgtgcaagccaaaagaggaatccagtgatattgttgaccaggtcgccgacgaactaaaatcgagctgcacatgcgcgtttcgcgatgtcattggtgaatgcaacgccatgctcgaccagtcgaagcgaagcaccatgggaaatagctggcacttgtcgaggaacagcagttcatcgaaggctcgccactcgggtggtgctttagaggtgccaggaccttcgggatccgcacagagccataagatcgacaccttgggagtttctgccgctaccaggtctctgtcagccgtctcgctggtgggcgcaacctgctcgcagcaggccagctacaattcgacgagtccagggaattgcgatgatgttaccatcggtgagctggccagctacttcgacaccattgttcatattcccaaaaagatgtcctctatggctgagatgatgtatatataataagcgaatcgataaccttattaattcatacaatttctctgaataactttgtaagtttcaagtgtactatatatacatatatgttatttgtgaatttaattacacaatttcagccctttgtaactcaagttaactaacctaaatatttatagtgtataatatgtacatagtcattggtatattctgcgaaatacagcatttctaaacatacctaaaatcgatttttaattctcaaaactgaaattctcaacctgaaatgtagaaaatgcagaatgcaaacactttaatactaattattctttattcatttgaagttcggattatacatacataaatagacatttaatgcgttattcatataattgttatctatttgtgcactcaaacttgtcaaattgttgtttgtcatgaattgaatcgattaatatgtaaaatattaaaggacgttaaattcagtattattattgatgtaacctaaatatttctgtttattctcggagtgcaccgatgttaattcagtcataagattagagtggttgttcttgttcgagaatctaatgggtgaagtgaacacttgcttaagctttgatatatttccaatactctttttaatccgatcactatagttcgaaagatgattaaacgaacgactatactctacttcctgccattgttgggcgctcgttttccgcggcgcagtgggatacaaaatgtgctgaaagtataaagtgaaaatcaattttaataactaaatatatatatatgtatatatgcgaccaaagatgacagattacgcaggttctccaagtggaaaccagttctaagtgctgtaatatttgtcattatcctttgaaaacccaccgaaacgagcgctttctcggtgaaggtcacgctcttccttatgatgtcgtccgagtgatgatggtagtagtactgcgagttctgcgtctgcgagtatcgcgtattgctgctcacaacatcgacgccatggtgatcggcattggtgaagttgtcgtaaccattgctattgctgaacatatctacaaagctaatggaatggaattcgctggggtggatgtaaaaggtgacaatcatggcggtgtacacgacaacgtggaacagaacgcatgtccaaatgagattgatctgaaaatgaatcaaatgcatttaaacttgagtgtataatagtataaccgcccggctattaccttcttcttgcgtccgtacttggagaaggtggtgaatggcactagggacatggttaaaaggcagccacaaatcactccagccagcaggcccaggaagttgagctggtaaggcagtgttccgattccgaccaacacgctgcacaggagcagcagtttgaagagcgcgatgtgcggcttgtgcagatacttccagtgcatccaaactagcagggcgatcagcgaggccaccacgccactcagcgatgcagatggtcccacctgtgaatgagtatcgaattcaattgattacacattcgtaatagcttattagacagaagtttcaagtacctctggccgatgtggcaccagtatggcgctggttagatttccagcaaaacccgacattatatagacgatggccgtgcgaacggttccgatcagccgctccagatcggccaggaagaggtgctggaatatcagggtgatggccagatgcaaaatgcctgcatgcatgcagagcgaagtgagcaatcggtatagctgatccggagtctcaacggagatgaacggaaacattccgcacacattgttcaggcacgatatctaaggaatttgtgtggaacataagccaatgactataaatcatccatatcgattgtgttacctgagagcacaaggatgcctcctcatggaaatagcccttgatgaagtcgcaatactccctggtggttatccggcattcgccatataagcccgtgcagcacggatggccaatcacctcgcacaccatgtgctccgaggtgtgatccttgtaccgataacgctgcgtaaacgaattggttttccggcagatcggccatttggttatgtcgtcgggccactcgtacggcgctatcgatgctggggcatcgcaaaacttgggatccagtccgcaaacggacccggagattcttccacccggtccggactcgctgggcgaccatttcttccacgtggatatcgatttctgggtatgatcaagttgaaatgattacattttttagacgtcttggacatagaatccttaaaaattatctacgagtagatttaatgatcactcactgttggatagagtcctcggatggagcactccgcctgggagctctggacacagccggagtcatcgttgcgaatgcagcaggccgtttccctctcgtgtcgcctcgtcttggttaccacctcggtgatcttgatgtcccttctcatgcaggcagcgaacttggcacccatgtggaccagatcaatgttgcgcggtccaatccagaggttccgctgctccacatgctgcaccgtctgcaaactgagactggtcaccagcacctggcccgtcttctgctccgatccaatgccgatgggtgcaatgccgtaacagatgatggacaggatgagcaccaccacctgcaccgtattgatccagtaggtgaagaagggtcgatgatcggtgcggtcatcgagatcgttaaccgagaagtacttgatgcaccgcaacggcggacgacgggagttctccaggactccgtcgagcagctgggcggttatccgattgccacgattgcacgtggatgtggtcgagtgggagctccgcatggcgggctgcatttggctggaaaccgagctgcagagcggtatatgggcagcaccaggctgatgcgaggactgatccccggttagattgatatcactggtggcattaccgccactattcagcgcagaggttctccagccgttctgctgtcgttccgccatgtagacactaacgcccacgcccgattgatccgcacatggtcgtggtttggccgcctgtctgccaatgtcggagctctcgtcgtttaccgcagaggtggttatctcgcagggactgtcgaagaacacctcatcgtctatgatggcctccaggccatccgtcaagcagccgtccgcatccgtctgctgattgctgtgcgattgcacgtggatgggtgcaaagctgcgggaccattgccacggacaacgcacccggtgcatctgaatgggccgccgcttattgaacatgtgcaccaaataactgaccatggccacgaacatatagcccaccgatgccttgcgctccacaaactcgccggcaaggaaatcccgattggtgtagcacttctgccgcctgctgtcgccggacatcgtcatgtccataccgatggcatcctgaacgggcaggatgtccggtcgatcgggtgcatagttgccattggtgccgttgctctggcccgcatcctcgttgcctccgccaatggcctgttgcatgtggtactccagttcggtgtcgaacatgccgaagcagcggatcgccaggcggcgatgacgtccttgccacagggcacagtccgccgcctccgtgctgggctccacgccgaagaactgcgaggtggtgcgcctcatgtacatgccaatgcgcttcttgcaggacaagtgatggttctgcggttgcggcagcacctggagcgactggtgctgctgcgtctggtgatggatgtgctgcagacgcggattgctggccatctggctgcggtacagctggtgctgattggatccgggcggcacggccatattgccaccgccctcgagacgcttcgcctgcacggacaccatgctggactccagactctgactgggcatctgctcattcagaccgctcatcactggcatggccatcggcaccggcagcgatatgggaaccggactgatgggacccgtcgtctgtgtggtctgatgaactcctgtggtgcggcgcaccgtattgcagtgcaggcaagttcccgatggattctcggcttctatttgggccatggcaccgccgccgggtggcaccacaatcactgaatcgctatcatcgcccctgtggttacccgatctcgcggagctggtggccgtcatgatgggcgaacaggagctggccgccgagaataccatcgacatgctggtggatggagccggcgagggcgatgtgcacgccggcgagcagctggcgtacgtctgcgatgtgcgactgaggctgccgtgcgaggcttcactgtggcagcacttggagcgatagttgtacggcatattggcgtactgcgattgcatcgcggatgcagatgtgcttgcagacgatgccacagcggcagctggcgtcggcagattggccgccggcgaggaggagatgctcagatccgagtacagctccatggctgggggcggggtgggtacgtacctcttcaccggcgtgtgcaccgtggatcccagataggcattgtagttctcgcactgcgcgaggggcaagggaacattggaaggcagtaggagacgcgtggcggacaccgatggcactgccgagggcataccgcccatgttgtccatcagtttcgattgcggagttgactgcgattcgcggtagcgctccaaacgatatctcgaatttggcgaaacgccacgctgatggtaatttgtaccgttagccgccattccgtttccactcattccgcttccgaccataccattcccagccattccgtgcttttgcatgacggaagtttccggcttggcggacccaacgctgcacgactgcgacggcagctgattggccacacaggtggcaaagcagtcgctgttcggagccggagagggcggtggcacgcccctattggcatcgtcgtacttctccagcggcgacagcttcagcttgccgccatgtggcgggaagttctcgccgttgggagcgcgaaagcggcccgacgacaggctgcagtacatcacatcgcattcgttggactccaatgccagttgcagctggttctgaaagttgatggacttcctgcgcgtggagctcatgctgccgcgcatcgaggagtggacactatcgggattgcccttctcatttcgtctattgttgtgccccaggtcacttccattcgaactcataatcgcagcagtgatctattccgatctggaagagatgttaataatcaactttatatgggtaggtaactccacaactgatatacttatgttctcttggtttattctaccattactaatgactaagaagttcatatttaatcattttacagaactttaacttcgtgggcttaataaaagtctacatgacccaattgcatcttaaagctcatctggcttaatcgtctaaatgggaattaagcgattttttggtaagtttaaaaatatattttcttatttgttatacattttaattgtatgtaaatttaataacagcaaatgtttgctatatttctataggtagatttgtaaagttaaagttaaagttactattcaatactatttttaattattaatcttttatggtttttgcatgtatttttataaacttttagaaaaatgaagttaggattacttctttaaagttttcgtttatccgccaaatctctatttgggatacaaacatttaaaaaaaagggccaagggcgcacatgagtaatctgaaatacttgtgctgccatcaaaactggaagttctatttcgaacattaaatatgtctactcttaagatttccaaatatgcatatatatcatatatatttcgtatatcatattattaaacataatttccggtatgagcaaaaaaaatatgtactgagattggtatacataattatattcagactgttataatgtgtttaaaaacatgcattattattatttatgaaagcatacactttgaactcactttggcaggttcgatggaattagttttataaatgcattttactgatttttcacttcatctttatttctgttaagcctgtttacagaccgaaaattgctttatcgattttccactcatgccttcataacaaaaagtacaaaagcacattgtcaaattgttttcgattcacagcttaatggcctttttgatttgtattgttttgtttatcacttaaattactaatttttcacattgattaatccattttttctaacaattttataaccactaatgcatatgtacacagcacactcgtcgaaaaagttcaaaccactcggaaataattttcgacttttcgcgcgcatgtgcgaaattcgtcgtttgagatgacagaaaatatcctgccgccgaatttgggcatatgtgcactttgttattttaaaaaatatagtgctctagttttggaatttatttcatttttagctagaagaaacattacctttttacgattaaatttcacgccatcaagtgcaagcttttatttattttcgtttgttatttgcaaaatagtagttttgtttcattttgatcttttacaatctgatgagtgactaaatttagaggaaatctaaagatttacttattccttatgcgcatgggatgtgatcgaaaagtccaaacgcaagaagacgatggtgaacaagaagatgatataaataaagccgctgaccagcaggggttcctgcagcatagaagtcttcgagaagctgtagtggagcgtaaagtccgaaatgtggctttcgaccaaattggatttggagaacgagaccaccgggcgaccaatggtatccagataggtgtgcaccagctcattgggcaatcggctgatggagtagggcgtggacagcctaatgtcactggatccctcaggcagaataatcttgatggtggcctcatcgatggccatattgtcgtagatgtgatcgatgaggtgcatcttcagctggtacttgttgccatcgttgaacatgtactcgtacgagggcacattgtagcccagagtgtattgcgttttccagccgccgaagagcgggaagcgcggacgcagctccagctcgatgaagtcgcgcacggcgttcatgttggaggtggaaatgttgccattggtgtcgcggtaatagacaccagatgcggatgctggcaggtaggtcttgtacgacttgagggccgccagtccggagcgtccttccttctggaaatcgtagcgcgagaacgagcccttcagcttggccccggtgtgcgtcatctgaatagactcctggacggcaatgttgccccaatgcgatatctccagcgtgcgttccagcgtattgacggtgacgaatggtgcggagttctcatagtggatgactagtggctcctggctgaaggctgcacgaatcgaaagcgttagaacagacggtttctgctaggcagctattacttaccctctacgttttcgtagggtcccagggtgatcttgttggaggacaccgaaaagggtttgacctgggtgtgcgacaagatgttcgaggagctgagcttgacattggtcttctggctgttggtcctgtacttggaatagaggtgcagattgcccgtatatttcacgaactgcttgtcgttctgccgtatctcctccggatgtgggcggatgcccttagaggccacggtctcgacgatgaacgtctgcttggcggcggccctggggaaggtgaacgtgaagctctgctcccccttcacgggctcattccgcttgaatggcacactcttgtcgctagcatcttttacgtcaatgtacgccaaactgggctccgatgtgaaaaacacgtattccacaatcggcttgccggccgaatcttccgccgagatcttggtggtcgtctttaccagctgcgatgttaggtccagcgttcgctccacatttgtgttcactatttccccgttggcagtggccaggcagaggagtgccccaagcgccagataaataacaaaattcgtagccatgctcgcctcaaatttggacacgtacattggaaaatctcgaagcgttagggcatatttaagaccattcagccggcaaagcggctcagcgtgaccgtgtcacgcattcgtacttttaccagccactgcgcagaattatcaggggtattccataaatattttaatttttattcttataacagaaaaaatatataaagggcagtaaccaaaataatagcacttctaaataaagcttattttgcatcaatttaagcacaaaatatataataatcatttataaaatattattgatatattttaagttctgcatgcatgttttatagcatacataatttttgttgtgttttaacgattctcattgttatattacattatattattatattatcttgttagcgaagcacttatcaagtactgacctaacctaacttttggctgatagcagtcagctgactgggcgccatttcaatcgattggcagcagaataaaactaattttggaaagcaccccaccaaagttcgttatctattacccttagaacaagaatacacgccgttgttacgccacttttgtgcgactcatgcgattctctatgccattcattatgccgcccagcagtaaatatgaataatattaaataattcctgtcatcatcccttcgattggcgagtcgagttggcttaaacacgcatatgcaatgcaatccggagagaagagaccccacataatgcgattgcgtgagttatacggatggggctttttgccgacttcaatttagtcgacgattggcacttcgaaaacgaagttgtattcgccggggtgtgaactgcggactcttggctccaaccaagtaaattcgaatccagaattgtgccattttctctaaacacacacacacacacacacacccgcacgcacatacacacacccgcacacacagaggccgcgtgtgtgaaaatataacgaaaatgcagtgagaaatctgcacttctgacggtcaatacatacaatttatacatctttcacctgt

SEQ ID NO: 11180 - DNA, 5550 bp, DROSOPHILA
atgtacgtgtccaaatttgaggcgagcatggctacgaattttgttatttatctggcgcttggggcactcctctgcctggccactgccaacggggaaatagtgaacacaaatgtggagcgaacgctggacctaacatcgcagctggtaaagacgaccaccaagatctcggcggaagattcggccggcaagccgattgtggaatacgtgtttttcacatcggagcccagtttggcgtacattgacgtaaaagatgctagcgacaagagtgtgccattcaagcggaatgagcccgtgaagggggagcagagcttcacgttcaccttccccagggccgccgccaagcagacgttcatcgtcgagaccgtggcctctaagggcatccgcccacatccggaggagatacggcagaacgacaagcagttcgtgaaatatacgggcaatctgcacctctattccaagtacaggaccaacagccagaagaccaatgtcaagctcagctcctcgaacatcttgtcgcacacccaggtcaaacccttttcggtgtcctccaacaagatcaccctgggaccctacgaaaacgtagaggccttcagccaggagccactagtcatccactatgagaactccgcaccattcgtcaccgtcaatacgctggaacgcacgctggagatatcgcattggggcaacattgccgtccaggagtctattcagatgacgcacaccggggccaagctgaagggctcgttctcgcgctacgatttccagaaggaaggacgctccggactggcggccctcaagtcgtacaagacctacctgccagcatccgcatctggtgtctattaccgcgacaccaatggcaacatttccacctccaacatgaacgccgtgcgcgacttcatcgagctggagctgcgtccgcgcttcccgctcttcggcggctggaaaacgcaatacactctgggctacaatgtgccctcgtacgagtacatgttcaacgatggcaacaagtaccagctgaagatgcacctcatcgatcacatctacgacaatatggccatcgatgaggccaccatcaagattattctgcctgagggatccagtgacattaggctgtccacgccctactccatcagccgattgcccaatgagctggtgcacacctatctggataccattggtcgcccggtggtctcgttctccaaatccaatttggtcgaaagccacatttcggactttacgctccactacagcttctcgaagacttctatgctgcaggaacccctgctgatcactgctgcgattatgagttcgaatggaagtgacctggggcacaacaatagacgaaatgagaagggcaatcccgatagtgtccactcctcgatgcgcggcagcatgagctccacgcgcaggaagtccatcaactttcagaaccagctgcaactggcattggagtccaacgaatgcgatgtgatgtactgcagcctgtcgtcgggccgctttcgcgctcccaacggcgagaacttcccgccacatggcggcaagctgaagctgtcgccgctggagaagtacgacgatgccaataggggcgtgccaccgccctctccggctccgaacagcgactgctttgccacctgtgtggccaatcagctgccgtcgcagtcgtgcagcgttgggtccgccaagccggaaacttccgtcatgcaaaagcacggaatggctgggaatggtatggtcggaagcggaatgagtggaaacggaatggcggctaacggtacaaattaccatcagcgtggcgtttcgccaaattcgagatatcgtttggagcgctaccgcgaatcgcagtcaactccgcaatcgaaactgatggacaacatgggcggtatgccctcggcagtgccatcggtgtccgccacgcgtctcctactgccttccaatgttcccttgcccctcgcgcagtgcgagaactacaatgcctatctgggatccacggtgcacacgccggtgaagaggtacgtacccaccccgcccccagccatggagctgtactcggatctgagcatctcctcctcgccggcggccaatctgccgacgccagctgccgctgtggcatcgtctgcaagcacatctgcatccgcgatgcaatcgcagtacgccaatatgccgtacaactatcgctccaagtgctgccacagtgaagcctcgcacggcagcctcagtcgcacatcgcagacgtacgccagctgctcgccggcgtgcacatcgccctcgccggctccatccaccagcatgtcgatggtattctcggcggccagctcctgttcgcccatcatgacggccaccagctccgcgagatcgggtaaccacaggggcgatgatagcgattcagtgattgtggtgccacccggcggcggtgccatggcccaaatagaagccgagaatccatcgggaacttgcctgcactgcaatacggtgcgccgcaccacaggagttcatcagaccacacagacgacgggtcccatcagtccggttcccatatcgctgccggtgccgatggccatgccagtgatgagcggtctgaatgagcagatgcccagtcagagtctggagtccagcatggtgtccgtgcaggcgaagcgtctcgagggcggtggcaatatggccgtgccgcccggatccaatcagcaccagctgtaccgcagccagatggccagcaatccgcgtctgcagcacatccatcaccagacgcagcagcaccagtcgctccaggtgctgccgcaaccgcagaaccatcacttgtcctgcaagaagcgcattggcatgtacatgaggcgcaccacctcgcagttcttcggcgtggagcccagcacggaggcggcggactgtgccctgtggcaaggacgtcatcgccgcctggcgatccgctgcttcggcatgttcgacaccgaactggagtaccacatgcaacaggccattggcggaggcaacgaggatgcgggccagagcaacggcaccaatggcaactatgcacccgatcgaccggacatcctgcccgttcaggatgccatcggtatggacatgacgatgtccggcgacagcaggcggcagaagtgctacaccaatcgggatttccttgccggcgagtttgtggagcgcaaggcatcggtgggctatatgttcgtggccatggtcagttatttggtgcacatgttcaataagcggcggcccattcagatgcaccggacggatgcggacggctgcttgacggatggcctggaggccatcatagacgatgaggtgttcttcgacagtccctgcgagataaccacctctgcggtaaacgacgagagctccgacattggcagacaggcggccaaaccacgaccatgtgcggatcaatcgggcgtgggcgttagtgtctacatggcggaacgacagcagaacggctggagaacctctgcgctgaatagtggcggtaatgccaccagtgatatcaatctaaccggggatcagtcctcgcatcagcctggtgctgcccatataccgctctgcagctcggtttccagccaaatgcagcccgccatgcggagctcccactcgaccacatccacgtgcaatcgtggcaatcggataaccgcccagctgctcgacggagtcctggagaactcccgtcgtccgccgttgcggtgcatcaagtacttctcggttaacgatctcgatgaccgcaccgatcatcgacccttcttcacctactggatcaatacggtgcaggtggtggtgctcatcctgtccatcatctgttacggcattgcacccatcggcattggatcggagcagaagacgggccaggtgctggtgaccagtctcagtttgcagacggtgcagcatgtggagcagcggaacctctggattggaccgcgcaacattgatctggtccacatgggtgccaagttcgctgcctgcatgagaagggacatcaagatcaccgaggtggtaaccaagacgaggcgacacgagagggaaacggcctgctgcattcgcaacgatgactccggctgtgtccagagctcccaggcggagtgctccatccgaggactctatccaacaaaatcgatatccacgtggaagaaatggtcgcccagcgagtccggaccgggtggaagaatctccgggtccgtttgcggactggatcccaagttttgcgatgccccagcatcgatagcgccgtacgagtggcccgacgacataaccaaatggccgatctgccggaaaaccaattcgtttacgcagcgttatcggtacaaggatcacacctcggagcacatggtgtgcgaggtgattggccatccgtgctgcacgggcttatatggcgaatgccggataaccaccagggagtattgcgacttcatcaagggctatttccatgaggaggcatccttgtgctctcagatatcgtgcctgaacaatgtgtgcggaatgtttccgttcatctccgttgagactccggatcagctataccgattgctcacttcgctctgcatgcatgcaggcattttgcatctggccatcaccctgatattccagcacctcttcctggccgatctggagcggctgatcggaaccgttcgcacggccatcgtctatataatgtcgggttttgctggaaatctaaccagcgccatactggtgccacatcggccagaggtgggaccatctgcatcgctgagtggcgtggtggcctcgctgatcgccctgctagtttggatgcactggaagtatctgcacaagccgcacatcgcgctcttcaaactgctgctcctgtgcagcgtgttggtcggaatcggaacactgccttaccagctcaacttcctgggcctgctggctggagtgatttgtggctgccttttaaccatgtccctagtgccattcaccaccttctccaagtacggacgcaagaagaagatcaatctcatttggacatgcgttctgttccacgttgtcgtgtacaccgccatgattgtcaccttttacatccaccccagcgaattccattccattagctttgtagatatgttcagcaatagcaatggttacgacaacttcaccaatgccgatcaccatggcgtcgatgttgtgagcagcaatacgcgatactcgcagacgcagaactcgcagtactactaccatcatcactcggacgacatcataaggaagagcgtgaccttcaccgagaaagcgctcgtttcgcacattttgtatcccactgcgccgcggaaaacgagcgcccaacaatggcaggaagtagagtatagtcgttcgtttaatcatctttcgaactatagtgatcggattaaaaagagtattggaaatatatcaaagcttaagcaagtgttcacttcacccattagattctcgaacaagaacaaccactctaatcttatgactgaattaacatcggtgcactccgagaataaacagaaatatttaggttacatcaataataatactgaatttaacgtcctttaagttgagaatttcagttttgagaattaa

SEQ ID NO: 11181 - protein, 1840 aa, DROSOPHILA
MYVSKFEASMATNFVIYLALGALLCLATANGEIVNTNVERTLDLTSQLVKTTTKISAEDSAGKPIVEYVFFTSEPSLAYIDVKDASDKSVPFKRNEPVKGEQSFTFTFPRAAAKQTFIVETVASKGIRPHPEEIRQNDKQFVKYTGNLHLYSKYRTNSQKTNVKLSSSNILSHTQVKPFSVSSNKITLGPYENVEAFSQEPLVIHYENSAPFVTVNTLERTLEISHWGNIAVQESIQMTHTGAKLKGSFSRYDFQKEGRSGLAALKSYKTYLPASASGVYYRDTNGNISTSNMNAVRDFIELELRPRFPLFGGWKTQYTLGYNVPSYEYMFNDGNKYQLKMHLIDHIYDNMAIDEATIKIILPEGSSDIRLSTPYSISRLPNELVHTYLDTIGRPVVSFSKSNLVESHISDFTLHYSFSKTSMLQEPLLITAAIMSSNGSDLGHNNRRNEKGNPDSVHSSMRGSMSSTRRKSINFQNQLQLALESNECDVMYCSLSSGRFRAPNGENFPPHGGKLKLSPLEKYDDANRGVPPPSPAPNSDCFATCVANQLPSQSCSVGSAKPETSVMQKHGMAGNGMVGSGMSGNGMAANGTNYHQRGVSPNSRYRLERYRESQSTPQSKLMDNMGGMPSAVPSVSATRLLLPSNVPLPLAQCENYNAYLGSTVHTPVKRYVPTPPPAMELYSDLSISSSPAANLPTPAAAVASSASTSASAMQSQYANMPYNYRSKCCHSEASHGSLSRTSQTYASCSPACTSPSPAPSTSMSMVFSAASSCSPIMTATSSARSGNHRGDDSDSVIVVPPGGGAMAQIEAENPSGTCLHCNTVRRTTGVHQTTQTTGPISPVPISLPVPMAMPVMSGLNEQMPSQSLESSMVSVQAKRLEGGGNMAVPPGSNQHQLYRSQMASNPRLQHIHHQTQQHQSLQVLPQPQNHHLSCKKRIGMYMRRTTSQFFGVEPSTEAADCALWQGRHRRLAIRCFGMFDTELEYHMQQAIGGGNEDAGQSNGTNGNYAPDRPDILPVQDAIGMDMTMSGDSRRQKCYTNRDFLAGEFVERKASVGYMFVAMVSYLVHMFNKRRPIQMHRTDADGCLTDGLEAIIDDEVFFDSPCEITTSAVNDESSDIGRQAAKPRPCADQSGVGVSVYMAERQQNGWRTSALNSGGNATSDINLTGDQSSHQPGAAHIPLCSSVSSQMQPAMRSSHSTTSTCNRGNRITAQLLDGVLENSRRPPLRCIKYFSVNDLDDRTDHRPFFTYWINTVQVVVLILSIICYGIAPIGIGSEQKTGQVLVTSLSLQTVQHVEQRNLWIGPRNIDLVHMGAKFAACMRRDIKITEVVTKTRRHERETACCIRNDDSGCVQSSQAECSIRGLYPTKSISTWKKWSPSESGPGGRISGSVCGLDPKFCDAPASIAPYEWPDDITKWPICRKTNSFTQRYRYKDHTSEHMVCEVIGHPCCTGLYGECRITTREYCDFIKGYFHEEASLCSQISCLNNVCGMFPFISVETPDQLYRLLTSLCMHAGILHLAITLIFQHLFLADLERLIGTVRTAIVYIMSGFAGNLTSAILVPHRPEVGPSASLSGVVASLIALLVWMHWKYLHKPHIALFKLLLLCSVLVGIGTLPYQLNFLGLLAGVICGCLLTMSLVPFTTFSKYGRKKKINLIWTCVLFHVVVYTAMIVTFYIHPSEFHSISFVDMFSNSNGYDNFTNADHHGVDVVSSNTRYSQTQNSQYYYHHHSDDIIRKSVTFTEKALVSHILYPTAPRKTSAQQWQEVEYSRSFNHLSNYSDRIKKSIGNISKLKQVFTSPIRFSNKNNHSNLMTELTSVHSENKQKYLGYINNNTEFNVL

SEQ ID NO: 11182 - DNA, 4179 bp, DROSOPHILA
tcgaaccctgcggtggtctctgcagcaacttcagctccttgagacacatcctcatctggtccatcaccagccataggaaatggacgggctgggcatactggagcacccccagactcatcattagaccaggcaaattgtagacactgttactgctccaagtggtccagaactcgaagtcatagttgaccacgtcaaccaggacacacaggccatggaagactaaagtggtcgccatcagatgaagagtcctctgaccatgtctcttataaaccagtcgcttagctttgcctttgagtcctgtgatgatccgctcaatctggagttccgctccgtgagcaagtggacggttcaatacggcatagtataccaggatggcaatggtggccatatttccagggaactccatcagatagagcagtttttcaatagtgggtatctccactgtgaactccaagcacttaacaatgctgccagtccagatgtacataagcaggaacaggctccagagcgtgtggagccagcggagtacgcccactctcccactgggatacacgcccaggaaccgattgatggtcagcagcagattctcccagtacgaactgtccatcctgagcccgctttaattaatgactggaagtggcgacaagggtttacctctaattggtgtgattgatgattagattgcaggaagtgacatgcctaaatagttccaggaacctaaatgctgagtagtcatcatgcggagctcagcaacaaaaggcgctaaacttaagaattccccgagggaaaggtgagtagacatcgtcttttgagatgaatatatctatagttactcacttgcagactatcttccttcaatcctcaatatgcggaaagatacaaagaactttacaggactctattttggttactactcatctccgtgctggcaaacacggcacctataaccattctcccaggctgtcccaacagattctatcgattggtccacttgagttggatgattctgtggtacggattgttcgtcctgggctcctactgggaattcgtgctcgtcaccacacagagggtatccttggaccgctacctaaatgctatcgagtccgccatctatgtagttcacatattttccatcatgctcctcacctggcagtgcaggaactgggctcccaagctgatgacgaacatcgttacatccgacctgaatagagcttataccatagactgcaacagaaccaagagatttattaggctccagctgtttctggtgggaatttttgcctgtctagcgatcttcttcaacatctggacccacaaattcgttgtatatagatcgatcctgagcatcaacagctacgtgatgcccaatatcataagtagcatatccttcgcccagtactacctgctgcttcaaggaatcgcttggcgtcaaaggaggctaactgaaggcctggagcgggaactaactcatttgcacagtccccgaatatcagaggtccagaaaatccgaatgcatcacgcgaatctaattgattttaccaaggcggtgaaccggacgtttcagtactccatcctactgctcttcgtgggatgtttcctgaacttcaacctcgtcctgttcctcgtctatcagggcattgagaatccttccatggccgacttcaccaagtgggtatgcatgcttctctggctggccatgcacgtgggaaaggtgtgcagcatcctgcatttcaaccagagtatccaaaatgaggtaggaaaaccctaaagaagatcagactatacctcagatgtatttccatagcattccacgtgcttgaccttattgagtagagtgtcgtatgccagaaaagatattcaggataccataacccatttcatcatccaaatgcggacgaatgtgcggcagcatgtcgtgtgtggagtcataaatctggacctcaaattcttaaccactgtaagtttgcacaacagctttattccaaataactttaactatccaatttagttgttggtggcctctgctgatttcttcatcttcctgctgcaatacgatgtcacctacgaagcgttgtccaagtcggttcagggcaatgtcactagatataagtagtggtatctgaatataaaacattgtaatcttacgaacatataaaaatatatttattatgtgccgtttaaaattggcgccttgtatatctataatcgatagcaagcatttatcgatagctgccaggcaattggtgcaaccctgtctgctaatctggagtattatcgtttcttgcaatttcgcacgccaaacacaataactttaatttcgctgaccatgtgtgacgttgcaacagtgcagaagatagcaaactgcctgggcgttaatcccggcaaggtgcagctgaacgaggagcaggtacgcacagctgaccctgaaaattgaactattctcaccgccccaccaactcattttctgttgtgaaggtcgtaacgcgcacgagtgggcaaaagaagagcgtggccggattcgcctcgatcctggagagcctggccagcgagtccaagtcggagaccgcccagaacagcagggcgtcgcgggaggtggaagcccaggtgtaccagtggatcgagttctccgtgctctacgtggcgcccggctccaaggacaagtacgtgtccaagcagcttctggcggacttcaacaaactgtttgccagcaaatcctacctggtgggccacttcatcactctagccgacctggccgtctactatgccatctacgatcttgtggtgagcatagttccagttgcttcttttccaaacagaacaccctgaaatctaatccgtgtgaacccgtccagaaatccctttcgccggtggacaaggaggtatatttgaatctctcccgctggttcgatcacctccagaatcgcgcggatgtgcaccagggcgagccactgctgaacttcaccaccatctacctgcacggctgggccacaggcacccacatctaagccccgggcgggcacccttgcatccattcacatccagtcacgaatgcgacacttaagttatttatttctattgcatttcacaatgtagttttgtgtgttgtgattatcatttaatgccaatgagagagttcagcgttggaatatgaagaatcgttattgtagcccgcactacgagttgttcttgttctgataatcggatctcagccgtagctccgaatcacatgccctttcgttgcgtcgccggtgcagcgtgggctgtgtaacagcgactcctgctgcgccaacatcagtttgcctgcacctcgcgcggcgagctgatggaattgcccaggtccgcgggctccgtgcacttccacaagccgtaggtcttgcccacggtggtctgccacagccggagagtgccgtcctcggagccgctggcatagagttcgccatccgggctgaacttcacgctgtgcacgggcccgaaatgtcccttgaaagattctgtgggggaacagaacacagtgccttggaattaaagacgacgcatgtgagaaggtacataccaatttcgtttcctgtgatgtagtcgaatttgtacatcttaaagtcctcgccgccacaaacaaacacatgcttatccggatgcaaactggccgacgccacgttcgtcggcactttcacctccttcagcttcttcagcgtgtcgatctcccagaagctaatcgaggagccgtgcgatatggtcagtatgtggttgtcgctggagatctctaggctgttcggattgctgttgaactgcaggcgctgcacctcgatgcccgtcatgcggtcccagaggcgcaccgtcttgtcctcggccgccgagatgatgcacttgtcgccgcggcagaagagcgcccgcttgatggcccccgtatgtccggcgtactcctccggctgcgcctcgggctgctccaggttgaagacccgcaccagcttctcgttgctgccagtcactatgttctcggaatccctgtcgaaggccacgctcttcacgatgtgcttgtgctggaagctgtgtatctcggccccggtcaccgcattccacaccttgccggtgaagtcggccgctccggaggcggccagggtggcatttcggttcagcgtggcgttccacacggcgcccttgtgtccctcgaaggtgcccacc

SEQ ID NO: 11183 - DNA, 1668 bp, DROSOPHILA
atgattctgtggtacggattgttcgtcctgggctcctactgggaattcgtgctcgtcaccacacagagggtatccttggaccgctacctaaatgctatcgagtccgccatctatgtagttcacatattttccatcatgctcctcacctggcagtgcaggaactgggctcccaagctgatgacgaacatcgttacatccgacctgaatagagcttataccatagactgcaacagaaccaagagatttattaggctccagctgtttctggtgggaatttttgcctgtctagcgatcttcttcaacatctggacccacaaattcgttgtatatagatcgatcctgagcatcaacagctacgtgatgcccaatatcataagtagcatatccttcgcccagtactacctgctgcttcaaggaatcgcttggcgtcaaaggaggctaactgaaggcctggagcgggaactaactcatttgcacagtccccgaatatcagaggtccagaaaatccgaatgcatcacgcgaatctaattgattttaccaaggcggtgaaccggacgtttcagtactccatcctactgctcttcgtgggatgtttcctgaacttcaacctcgtcctgttcctcgtctatcagggcattgagaatccttccatggccgacttcaccaagtgggtatgcatgcttctctggctggccatgcacgtgggaaaggtgtgcagcatcctgcatttcaaccagagtatccaaaatgagttgttggtggcctctgctgatttcttcatcttcctgctgcaatacgatgtcacctacgaagcgttgtccaagtcggttcagggcaatcaagcatttatcgatagctgccaggcaattggtgcaaccctgtctgctaatctggagtattatcgtttcttgcaatttcgcacgccaaacacaataactttaatttcgctgaccatgtgtgacgttgcaacagtgcagaagatagcaaactgcctgggcgttaatcccggcaaggtgcagctgaacgaggagcaggtcgtaacgcgcacgagtgggcaaaagaagagcgtggccggattcgcctcgatcctggagagcctggccagcgagtccaagtcggagaccgcccagaacagcagggcgtcgcgggaggtggaagcccaggtgtaccagtggatcgagttctccgtgctctacgtggcgcccggctccaaggacaagtacgtgtccaagcagcttctggcggacttcaacaaactgtttgccagcaaatcctacctggtgggccacttcatcactctagccgacctggccgtctactatgccatctacgatcttgtgaaatccctttcgccggtggacaaggaggtatatttgaatctctcccgctggttcgatcacctccagaatcgcgcggatgtgcaccagggcgagccactgctgaacttcaccaccatctacctgcacggctgggccacaggcacccacatctaagccccgggcgggcacccttgcatccattcacatccagtcacgaatgcgacacttaagttatttatttctattgcatttcacaatgtagttttgtgtgttgtgattatcatttaatgccaatgagagagttcagcgttggaatatgaagaatcgttattgtagcccgcactacga

SEQ ID NO: 11184 - protein, 497 aa, DROSOPHILA
MILWYGLFVLGSYWEFVLVTTQRVSLDRYLNAIESAIYVVHIFSIMLLTWQCRNWAPKLMTNIVTSDLNRAYTIDCNRTKRFIRLQLFLVGIFACLAIFFNIWTHKFVVYRSILSINSYVMPNIISSISFAQYYLLLQGIAWRQRRLTEGLERELTHLHSPRISEVQKIRMHHANLIDFTKAVNRTFQYSILLLFVGCFLNFNLVLFLVYQGIENPSMADFTKWVCMLLWLAMHVGKVCSILHFNQSIQNELLVASADFFIFLLQYDVTYEALSKSVQGNQAFIDSCQAIGATLSANLEYYRFLQFRTPNTITLISLTMCDVATVQKIANCLGVNPGKVQLNEEQVVTRTSGQKKSVAGFASILESLASESKSETAQNSRASREVEAQVYQWIEFSVLYVAPGSKDKYVSKQLLADFNKLFASKSYLVGHFITLADLAVYYAIYDLVKSLSPVDKEVYLNLSRWFDHLQNRADVHQGEPLLNFTTIYLHGWATGTHI

SEQ ID NO: 11185 - DNA, 6359 bp, DROSOPHILA
attgcaacttggtgcgttggacaggcctgctcgatgggatccctcctgctcgcggccggtgctcctggcatgcggtactccctacccaacgcgcgaataatgatacatcagccctctggtggcgcacaagtaagtacattctagtgtaaaaatctcacccgaattgatgatgcaatctcgcccagggccaagccacagacatcctaatacatgctgaggaaattatcaaaatcaagcgccagctgaccaacatctacgtgaagcacgccaagaatacgtacgaggagatgtccggacgcatggagcgcgaccacttcatgacccccgaggaggcaaaagtgctgggcatcattgaccacgtgcttgaacatcctccagagactgtttccgaaacgggacccgcgtcggacggcggcgtcacctccggcaaagccgtgcccgaggagtgcgagaagaagagaagcaagcaggcagcctaaatttccaccttcctatagaccaaaattcaatcataagttcgaaacaatttgaataattcagttttccacagaatatacactttccaaatacaccatgtcgactttctcatgattgagcattattaatattgcatcattaatgtttaaaagcctttacgtaatcagttgctcttagttaagagaggatgaactggaattatcgttatctgattgaagagctagtctctttcaggaagagcaaatggatcctatcatccatcattctccctcgttaaaatgctaaaccaatcaataaacttttagtaaaattcataaacacagtactcaatacggcatttgtttgtttttggttgtcggtagtttttgggagtggtttactgtttactaattaactctttcaagtcgatctgcatttatttcttattagaaaatttaaaagctatatcagaaaaagagatacttgtttgtgcgcaaacgcatattcttaattaagtaaaggaatttgaaaccaagtttcccttttaactctgatccattactataatatctgagctaccggtgatggaatccttctgtatgtactcgaagatcttgtttaattccggtgtttctttgatcgacttgaggaaatccactaactgctgatttttgtctattgaagaggaatttcaattagtttattttcagatacaatgttcttcaatatttttacttacttgctttgggtatttgcgaaagggccgagactgcacgaagggcagaacgcttgagttcgtcctgcttttcgtactcctgtttcacagagttggccttcaccttgtgggtgcacgtatcacgtagttgctgtataaattgatcgagtcctgaaagaattgagcaaagtgaataagagatctcaagtaatcaaggctttggtactactcacttagcagaaccttatccgggcacaagatggccagacgtgccgtcatcaggtacgtcagcatcttgatgtcgtagtggtcgcacagaccagcctggacatggtccaggaactgcatgacatccacacgatccaagccctgctcgagaagtgtgtacatgcattcaaatgccgctttgcgaatgtcgagaccgtcgtcgacggtgtgcttgaagggacccatctccacctccctaatcagttcgctcttcaccttcgtctccgagtagagccaaggcaaaagggtgggcagcaaatcgcgcaccaaactgggcttgttgtgtaccgccgaattgaaggctactagtgcgacgcgtctcacttggggctccggatctcgcagggcaaatagaaactcgccaatgttctgcttgagcagaacatcaatgggctgcggctgatcggagatggtaaactttactgaggagacaacaacggtgcgcatggtggcgctttcggaacgcaatgcctgctgcagttgcggcagcagctcgtcgggattgaccagcaccagtttgcccaggcactcggccaccacgttgcgtgatccctcctccgaacactcgcaatgcttgaagagctgatcccaaatggatggcaccgagggtaggagctgggcgagtccgctgggcgataccgatagcgatgaaatgacctccttaagcgaatgtagcagcaaatactgtctcttcggctgcacctcaatctcgtgcagaatcagaggcaggtatgtctgcaggctgcccacggacacagcgccgagagcatgcgaggctgcagcctttacatcctccgaggtggccccaaagcattcaataattgtctgcggcagcacctgtatggagctcagatcaaagtgcctgccaatctcaccgatggtgagcaaacagaatatgatttccgtatcgttacgcttctgcagatccgttatcagctttgtggccaatggggtcgccacctggggacactgctgtgttaaggcagcaatgcacttggccgatgagtgataggcctgcttgtgcagctgcaccacctcactgggagcgccggcagtggctctggatttgacgtcaccgttgccacccagaactggtgccattagcttcgaaacgagcgaatgatagtccaggccagacagctgtgtttgcaccaaggcctggaacagctccaacgtgcaattcaatgcggatccctgtagcaaagaaatcagttattagttttgctaattactcagctgttaattaaaattcacccacctgcagcaaaggagatcgaaccaaaatgagcacggagcgcaagaactgctcatgtatgccgaccagagcttggggctgcctgcgagctacggtgctcaaaagcgtcagagagtactgggctacgtgcaaatccgaatccgatataagcggtgggatctcaactatggctgtctgcagaaggttcgcctcgaagttgctcgaatagttgatgacgatcttgttgatcagatcgagggagtgcagcttgagggcgcggtggttcttacgcaggaatgtgcccaatgcgggcaacacgtcgtgcaggatgggtgtcagatctatgcgcagggacgaagctgcgatcagggtcaacgccttcacgctgctcaaacgggttacttcgttctttaggcgctccatgaagattggcaggcaaaccgccagctcattctgcagcatgtcgcccatgttggcgataatctgccccatgcaggctatggctcgctcctttacctcctggtcgacatccgtcactttcagtttctgcaatgtgcacgagtaaacctgacccacaaacgatggggcatcaaagtcggacttggccgcattcggttctaatggacgaatcacctttaccaactgctgcagcaccaaaagcgcctcggtggcaatcttatagaaaggatcgaagaccgaagtcactacgaggggcaccagtaggggaatatgtggatgaaagacatgcggcggatgtccttggagcagcgagtaaaggaatcccagagattcgatcttcatgttgctggtagagcttttgtcattcagcgaatagcttatgcctggcacaatgctgtccaagtagggtcccagggcacctggtagcgaattcaacagctcgcgcagcaagaggaagcagtcttgacgcgttttcatcgatttttccctcattaacggctgtatggctttcacaatgagtggcagctgctcaattaacagcgaggtcggacccgatacctgatccattgagtcgtggtcgttggccacgtcgtcggtgaggcgtgtgttctttagcagggccacataggcgtgaaatatgtcggacttaacattctcctcacgctccttgaagcgcgcaatcaaagccggactcaggctgcgatagaagtcctcgacgagctcctgccgtgtggatatcaagacctccagacacttggctgcagcgcgacgaaccttccagctcatgtcgtcgtcgtcactgtactcctcactatcgacgtactcatcatcctccgtgtccatggcattgccagtgtcgccatcatccgtctcgtagttgtagtttggatcgtaggtgatatagttgaggcacagctccaggatctaacaaaacccataagctattaaacgtgaatgagaacataaagcatgtgtactccttaccatgggaatatgcgggtttatggcatctgggcagcgcatgacgaaagcttcgcaggcctgcagacaaaactcgcgcagctcatcgtcatcccgctggctgtactggctcagcaggagcatggagcgatcaatgtgattgcaaagtcgatggccagcctgtcgactaaagagtaaagttaaataaaattgcatctaaagatcatatggcataaaatatataacaatttcaggaattggaacttaccatatcgaagccaggcactgaatgtaagttcgaatggcagctggatttggtgggttctctaggccatcgagcagatgatcgatgacaccgttgtaggcgttgctattggcctggatcagcagaaatgacagggccacgatggtacgcttgcgaacagcctggcgcgatgaggccaactggggcatcagagctttcagaatggtgctgtggaagggaacgaggaactccccgaagcgagagagcagatcggccagaatgtccagcgactccagtttcacagagacgtcctcctattaaggaacaacggattaaacgtttgggtgcctagggaatagcaatataacgcaccttctcaattgctgtgctcagtttgccggtgatcctttgacagacatttggggccagggagtttgaggactgcggcagctcggcaatcactgtctttaggccaatactcgatatgtcgcgcagctgctccgtgttggacatcatgttggcgcacagcgagtccacgatggtctccacctggatctccttcaccttgttgaccaggggacccaggcacttgacagccaggttctgaacttcgccgttcttgtcttccagcagcttgagcaccattcgcaccacctttttctcggactcgtcgtccaggatgatgctatccttctgtagctccgtcatcagatcgtttgtcgccatgaaacggaagtccttgtccgtcgacgtcatctgcagcagacgagagagcggaattagaatttcgttatgttgcaaaaatgaaattctatacatactttttccagcaaattggcaatttggtggtactgatgtgacgccatagcgaaggctttgaaacgttcgatcgatagcaattaactgataagtgaaatattgtgtatttgtattgggctgccctatttttggtgttctaaaacttgaaaatttactgaaatttttccggtattgaatctccaagttttatattcactcaattttgttataaaggctgcttaagtgggcccactttgaaaaactaaaaaacccactttataatccctaatgccttttggatgccgataatggttttggtacattttcgtggtataaaatacggtggagaaatattttggaacaagattttatgtactagtaaatttttatatttaggttattttatttttgagttaatacatgacaatcaaaatataaatatatatattatcaaatattaattcccaatttatttactagtaaaatactttgtgtcattaccatcgtttcagatgaacgatatatcagctatgtggcactaagagtctcccatctctagaaaagtgccgctcgttttcaggaattattttaaactaaaccgcagctcactgctagaattcaatcaaaatacctttttaacaccaataaatgctaacaaaatggatcagattttaaacaaggaaaacaccggcattaattgtaagttgaattaggttcgactcccgttcgtgttagtaattacatagccatttatcattgcagtgccagcgaatcccattaaaaatggagttcctacaaattccgtattgaagaaacctcttggtaaccttgacaatgtgatgcaccaaactcctggaataaccccgttcaaaagcacttctctgaaactcgagggtagtattgccaagctttcgctgcgaaaggcccccaaacaaaatgtggtcagcagggatcgcgaggaagttaggtataaaacaaatagctgctttttgggcgcctacgtattgaattgcgaatacagagtcgtcaatttgttcaactacactgactttccgaacgagaaatgtttgaagaactgcagcaagcgtaagtaccgctcatattaaacaactccccttgaaaattgtactataagttgtattattacagcggtcacagagacctggtcggaaaatcaagagggctatgaaggactattggatcaactttatcttgatctgcgcaca

SEQ ID NO: 11186 - DNA, 3905 bp, DROSOPHILA
caaaattgagtgaatataaaacttggagattcaataccggaaaaatttcagtaaattttcaagttttagaacaccaaaaatagggcagcccaatacaaatacacaatatttcacttatcagttaattgctatcgatcgaacgtttcaaagccttcgctatggcgtcacatcagtaccaccaaattgccaatttgctggaaaaaatgacgtcgacggacaaggacttccgtttcatggcgacaaacgatctgatgacggagctacagaaggatagcatcatcctggacgacgagtccgagaaaaaggtggtgcgaatggtgctcaagctgctggaagacaagaacggcgaagttcagaacctggctgtcaagtgcctgggtcccctggtcaacaaggtgaaggagatccaggtggagaccatcgtggactcgctgtgcgccaacatgatgtccaacacggagcagctgcgcgacatatcgagtattggcctaaagacagtgattgccgagctgccgcagtcctcaaactccctggccccaaatgtctgtcaaaggatcaccggcaaactgagcacagcaattgagaaggaggacgtctctgtgaaactggagtcgctggacattctggccgatctgctctctcgcttcggggagttcctcgttcccttccacagcaccattctgaaagctctgatgccccagttggcctcatcgcgccaggctgttcgcaagcgtaccatcgtggccctgtcatttctgctgatccaggccaatagcaacgcctacaacggtgtcatcgatcatctgctcgatggcctagagaacccaccaaatccagctgccattcgaacttacattcagtgcctggcttcgatatgtcgacaggctggccatcgactttgcaatcacattgatcgctccatgctcctgctgagccagtacagccagcgggatgacgatgagctgcgcgagttttgtctgcaggcctgcgaagctttcgtcatgcgctgcccagatgccataaacccgcatattcccatgatcctggagctgtgcctcaactatatcacctacgatccaaactacaactacgagacggatgatggcgacactggcaatgccatggacacggaggatgatgagtacgtcgatagtgaggagtacagtgacgacgacgacatgagctggaaggttcgtcgcgctgcagccaagtgtctggaggtcttgatatccacacggcaggagctcgtcgaggacttctatcgcagcctgagtccggctttgattgcgcgcttcaaggagcgtgaggagaatgttaagtccgacatatttcacgcctatgtggccctgctaaagaacacacgcctcaccgacgacgtggccaacgaccacgactcaatggatcaggtatcgggtccgacctcgctgttaattgagcagctgccactcattgtgaaagccatacagccgttaatgagggaaaaatcgatgaaaacgcgtcaagactgcttcctcttgctgcgcgagctgttgaattcgctaccaggtgccctgggaccctacttggacagcattgtgccaggcataagctattcgctgaatgacaaaagctctaccagcaacatgaagatcgaatctctgggattcctttactcgctgctccaaggacatccgccgcatgtctttcatccacatattcccctactggtgcccctcgtagtgacttcggtcttcgatcctttctataagattgccaccgaggcgcttttggtgctgcagcagttggtaaaggtgattcgtccattagaaccgaatgcggccaagtccgactttgatgccccatcgtttgtgggtcaggtttactcgtgcacattgcagaaactgaaagtgacggatgtcgaccaggaggtaaaggagcgagccatagcctgcatggggcagattatcgccaacatgggcgacatgctgcagaatgagctggcggtttgcctgccaatcttcatggagcgcctaaagaacgaagtaacccgtttgagcagcgtgaaggcgttgaccctgatcgcagcttcgtccctgcgcatagatctgacacccatcctgcacgacgtgttgcccgcattgggcacattcctgcgtaagaaccaccgcgccctcaagctgcactccctcgatctgatcaacaagatcgtcatcaactattcgagcaacttcgaggcgaaccttctgcagacagccatagttgagatcccaccgcttatatcggattcggatttgcacgtagcccagtactctctgacgcttttgagcaccgtagctcgcaggcagccccaagctctggtcggcatacatgagcagttcttgcgctccgtgctcattttggttcgatctcctttgctgcagggatccgcattgaattgcacgttggagctgttccaggccttggtgcaaacacagctgtctggcctggactatcattcgctcgtttcgaagctaatggcaccagttctgggtggcaacggtgacgtcaaatccagagccactgccggcgctcccagtgaggtggtgcagctgcacaagcaggcctatcactcatcggccaagtgcattgctgccttaacacagcagtgtccccaggtggcgaccccattggccacaaagctgataacggatctgcagaagcgtaacgatacggaaatcatattctgtttgctcaccatcggtgagattggcaggcactttgatctgagctccatacaggtgctgccgcagacaattattgaatgctttggggccacctcggaggatgtaaaggctgcagcctcgcatgctctcggcgctgtgtccgtgggcagcctgcagacatacctgcctctgattctgcacgagattgaggtgcagccgaagagacagtatttgctgctacattcgcttaaggaggtcatttcatcgctatcggtatcgcccagcggactcgcccagctcctaccctcggtgccatccatttgggatcagctcttcaagcattgcgagtgttcggaggagggatcacgcaacgtggtggccgagtgcctgggcaaactggtgctggtcaatcccgacgagctgctgccgcaactgcagcaggcattgcgttccgaaagcgccaccatgcgcaccgttgttgtctcctcagtaaagtttaccatctccgatcagccgcagcccattgatgttctgctcaagcagaacattggcgagtttctatttgccctgcgagatccggagccccaagtgagacgcgtcgcactagtagccttcaattcggcggtacacaacaagcccagtttggtgcgcgatttgctgcccacccttttgccttggctctactcggagacgaaggtgaagagcgaactgattagggaggtggagatgggtcccttcaagcacaccgtcgacgacggtctcgacattcgcaaagcggcatttgaatgcatgtacacacttctcgagcagggcttggatcgtgtggatgtcatgcagttcctggaccatgtccaggctggtctgtgcgaccactacgacatcaagatgctgacgtacctgatgacggcacgtctggccatcttgtgcccggataaggttctgctaagactcgatcaatttatacagcaactacgtgatacgtgcacccacaaggtgaaggccaactctgtgaaacaggagtacgaaaagcaggacgaactcaagcgttctgcccttcgtgcagtctcggccctttcgcaaatacccaaagcaaacaaaaatcagcagttagtggatttcctcaagtcgatcaaagaaacaccggaattaaacaagatcttcgagtacatacagaaggattccatcaccggtagctcagatattatagtaatggatcagagttaa

SEQ ID NO: 11187 - protein, 1248 aa, DROSOPHILA
MASHQYHQIANLLEKMTSTDKDFRFMATNDLMTELQKDSIILDDESEKKVVRMVLKLLEDKNGEVQNLAVKCLGPLVNKVKEIQVETIVDSLCANMMSNTEQLRDISSIGLKTVIAELPQSSNSLAPNVCQRITGKLSTAIEKEDVSVKLESLDILADLLSRFGEFLVPFHSTILKALMPQLASSRQAVRKRTIVALSFLLIQANSNAYNGVIDHLLDGLENPPNPAAIRTYIQCLASICRQAGHRLCNHIDRSMLLLSQYSQRDDDELREFCLQACEAFVMRCPDAINPHIPMILELCLNYITYDPNYNYETDDGDTGNAMDTEDDEYVDSEEYSDDDDMSWKVRRAAAKCLEVLISTRQELVEDFYRSLSPALIARFKEREENVKSDIFHAYVALLKNTRLTDDVANDHDSMDQVSGPTSLLIEQLPLIVKAIQPLMREKSMKTRQDCFLLLRELLNSLPGALGPYLDSIVPGISYSLNDKSSTSNMKIESLGFLYSLLQGHPPHVFHPHIPLLVPLVVTSVFDPFYKIATEALLVLQQLVKVIRPLEPNAAKSDFDAPSFVGQVYSCTLQKLKVTDVDQEVKERAIACMGQIIANMGDMLQNELAVCLPIFMERLKNEVTRLSSVKALTLIAASSLRIDLTPILHDVLPALGTFLRKNHRALKLHSLDLINKIVINYSSNFEANLLQTAIVEIPPLISDSDLHVAQYSLTLLSTVARRQPQALVGIHEQFLRSVLILVRSPLLQGSALNCTLELFQALVQTQLSGLDYHSLVSKLMAPVLGGNGDVKSRATAGAPSEVVQLHKQAYHSSAKCIAALTQQCPQVATPLATKLITDLQKRNDTEIIFCLLTIGEIGRHFDLSSIQVLPQTIIECFGATSEDVKAAASHALGAVSVGSLQTYLPLILHEIEVQPKRQYLLLHSLKEVISSLSVSPSGLAQLLPSVPSIWDQLFKHCECSEEGSRNVVAECLGKLVLVNPDELLPQLQQALRSESATMRTVVVSSVKFTISDQPQPIDVLLKQNIGEFLFALRDPEPQVRRVALVAFNSAVHNKPSLVRDLLPTLLPWLYSETKVKSELIREVEMGPFKHTVDDGLDIRKAAFECMYTLLEQGLDRVDVMQFLDHVQAGLCDHYDIKMLTYLMTARLAILCPDKVLLRLDQFIQQLRDTCTHKVKANSVKQEYEKQDELKRSALRAVSALSQIPKANKNQQLVDFLKSIKETPELNKIFEYIQKDSITGSSDIIVMDQS

SEQ ID NO: 11188 - DNA, 3467 bp, DROSOPHILA
gattcaaccgcttaaattgttcgttcgagagcgcgacggaatagaaaatattatcgcttcgattttggccagacataaacggatgactgcccgttttaatggacaaatatgactagttcaacatcttgactctattcaattagcaatttctttggtcctgcaacagcacttcactctcctacccttcaaaaatccagcgaaatcgctctctctctctcgcgtgagtccttaaaaaatccaccccaagtcggcggggcagtgtaaagttaagtgaagtcctgcctacggaggtcctttcaattgctctcattggtctacggagcaggcaaagtggttgcacgctcagcgattccagcttactttcctattattggttatagccattatggagcactatttatccattaagcggcaatgaaacacattataattgcaataaatgatgccattgtgggaggagttttgcgcgaaagtttcacatcctggtcgaaggatttccagcgctcagctttttggcactttataaataccatttaaatcgctgtgcttgccacgcaaatccacaggaaaagggcattatttttatttcacaaagtcgtcgccgtcgtttggggagctgttttatcgatttgtgggcgggctcagtgccataaaacaaggatctgagttggcgctttgccacgccccccatattcattacttcaactttgtgctaatgacactgggctacaaaggtggcataactcattgctgagtttattgcacaagtatccaatcgaaggacgaatatactcagctaatgtcctagtttttacagaacgaacatgtgccatcttcatttgtcaaactgaactgtgttgcacagtgtaaactcattaatttatcaacatatcaaacccattgagttagagacatctagaatttcaaattcataagttattattaaaaaatcatttattttctcatcagtttatagatattttgttataagagatttagtttaaacaattgcataagcggcataattggcaattccgcacatattgactcccttgcgaattcgtatgtaaccattttcgccccaattttggccccaccaattctttagtatccaataatcctttccaaaaccaattaccaccatggcatgatttacggaagccgatgagcacaaggggtcatcgtagatgccgtcactgagacaaaaggctaaatttaaaaacaaaaatatatatgtaagtatttacggtcattacctgtacagttgaaatgtctttggggaggcatttatagaaattgcaactggtccaatgtgggtaactgccgcctgaatggcctgctcatcgcgcacgggaagaatggcccaggatgtcacattaactacggataaatcgggtacgaactggcatttgcctttctgaaaaacatatgcattagttagcattagttgtattgcctgtaataactaaatattctactattctaatattcaatatcaccaaaaataatttgataatgtttaaaaaacaaaagattcgttccttaacttaccaattaaatgaatagctcaagctgtagtcattctaacaccttgatttttataaagcttataaataagcgtatatatctaaataaaagcaactaactatcttcctaattgtttggtatttacccttgccacatacggataatcttggtccctcattatgccgcccgtgctctgcaaataactcaaagtatttcgcagggagccgccgacgcatccttggtttccatgggacacactgcagtccacgatttgttgcttactcaggctcaatattttcccggttcgcttgaatacctgacccatgatgctctcggcaatggagaaggcgtagcaggaaccgcaggaaagttgattatacggtggtgtgatgaatcccttgctgcgccaatccaaactttcgggcacattggccattagaggagaaccaactatttcggccatattatccgcgctgtcttcaatattgctcttcaacagtcgcaaaaatcccttgaggtaaccatctgtgctctggttttcaaaatatttaaataatattattgtttttaggctttgggatgtacatttatatgttttttgaaatacgcaccatatcagcaaaaatatttggcttcaacctgaagctcgtttgaccttccttatagttttgattgtgttcctcaataactttgaaattttcctcgaacgccttgtaacttcgcatttcatcgtaggtgcgaagatatttgcgattgttattattctagaaggcatttataagctcttaataggtttaatttttatttttctaaagcttaccttaaatttttcgaattcgctcttgcaatttgcagaagaagaatttccttcgctcaaattggatgttacaatttgacaatttaggccacataaacaaccaaagaaaattaatttccacattgcttttgacttcattaccttcagttactgtcaataaactaaaatcgcaactaagcatatttatgctttcttaagaagcaacgtaaaagtctgatcgaaactgtgagcacccattagattacatttagaaagagcatattattttatataagctgactaaaaacaaatcaaaattatacatcattatgcatttaaagtctagctcagtataagtaatttgcttttaatggtacacttcgtacaataaatatttaacatatttaaagaacaaaaaacataatatttttataaatcacagaagttattattattttcgattagccatggccagctgtgtttcacttcattctaaaattccagtcgttcccacagaaatgcaatatagcctctcttccgaattttgcaacaaatcttgcgagattttctcagtatttcaatagaaaaaactgttggacgaaaactggggaatacccataatgtaagttcatataccctttgtcttacatgccagtcggaattcagtgtttcttttcatttgtgtcagaaatgatttaaagtgtgtattcttagccttaagaacagctgttttgcataacattgcgaatccggttgatttgcgtcaaaacaaaaccaggatcatgctgaaaaccgctgttagccgctttttacaaattagttcagtaagtttaaccatgacacatggtaatgcccatattaatccaccgacttgcaggtacaatgtggcggccgggcgaattctgttcgcaacatcaacctgattcccatggtggtcgagcaaactggccgcggtgagcgggcctacgacatattctcacgtctgctgaaggagcgtataatttgccttatgggcaacataaccgacgacatcagttcgactgtggtggctcaactgctgttcctgcaatcggagaacgtcaacaaaccgatccatctgtacatcaattcgcccggcggtgttgttacagcgggtttggcgatc

SEQ ID NO: 11189 - DNA, 846 bp, DROSOPHILA
atgtggaaattaattttctttggttgtttatgtggcctaaattgtcaaattgtaacatccaatttgagcgaaggaaattcttcttctgcaaattgcaagagcgaattcgaaaaatttaagaataataacaatcgcaaatatcttcgcacctacgatgaaatgcgaagttacaaggcgttcgaggaaaatttcaaagttattgaggaacacaatcaaaactataaggaaggtcaaacgagcttcaggttgaagccaaatatttttgctgatatgagcacagatggttacctcaagggatttttgcgactgttgaagagcaatattgaagacagcgcggataatatggccgaaatagttggttctcctctaatggccaatgtgcccgaaagtttggattggcgcagcaagggattcatcacaccaccgtataatcaactttcctgcggttcctgctacgccttctccattgccgagagcatcatgggtcagaaaggcaaatgccagttcgtacccgatttatccgtagttaatgtgacatcctgggccattcttcccgtgcgcgatgagcaggccattcaggcggcagttacccacattggaccagttgcaatttctataaatgcctccccaaagacatttcaactgtacagtgacggcatctacgatgaccccttgtgctcatcggcttccgtaaatcatgccatggtggtaattggttttggaaaggattattggatactaaagaattggtggggccaaaattggggcgaaaatggttacatacgaattcgcaagggagtcaatatgtgcggaattgccaattatgccgcttatgcaattgtttaa

SEQ ID NO: 11190 - protein, 228 aa, DROSOPHILA
MRSYKAFEENFKVIEEHNQNYKEGQTSFRLKPNIFADMSTDGYLKGFLRLLKSNIEDSADNMAEIVGSPLMANVPESLDWRSKGFITPPYNQLSCGSCYAFSIAESIMGQKGKCQFVPDLSVVNVTSWAILPVRDEQAIQAAVTHIGPVAISINASPKTFQLYSDGIYDDPLCSSASVNHAMVVIGFGKDYWILKNWWGQNWGENGYIRIRKGVNMCGIANYAAYAIV

SEQ ID NO: 11191 - DNA, 4052 bp, DROSOPHILA
cactttcattaagcttaattggcgcaaacttggcgaaggtgagaggggtgcttaaaaaaaaggggcaccaatttatgctagtttttaattacattaatgttttaaagttaacttagaaggagccttagttatttgctcacctttgtgcatttggttttcgtgctttctacatttcgcccttctattttgaaaccaaacctgcaagaacacataattgataaatgaaagttaccatcacatcacttgtttgtttcattaatataaattaaggaaattaaggcattataatatccgatttggtcattagttgcttcagtatacactgaattatcactgtttatttcccgttaatctcggcagatgcgtacttcttagatattttagcgggctaaaagttgcgaagagctaagcaatttattacggaccataaaaaaagtgacactcctgctggctttggaattgtaactacatatttcatgaccacatagtgcctattccagcaccctgattgagcatttaatctctaaccggccccccgatgctcgagcaattttctacttgtgtcccagacgacaaagggtggcgtaaaccacttaacaccccatatctatgccatctatgcccttacagagtgtatatgtactttgtcagcatatacatatatatattttggatcagcatcgagttgtgtcactttgtctatatgtccgtaagtcagaatgtccgtatatctgtctgtccattcgtctgcatatctgtatctgcacatcatccttacaaaaggtagttattattatcatcgaatatagtatctatgtatgctggttgataataattgaaaaacctattttctagttttcctttaagctgtagggtatataaacttcgactttccaatgtagtttccttcattattttcaccatgccggtggttgaaaaatcaaagtcactgcttccacattcggtcgaaatatttcggggagacaatgtctggttgtcattagtacaagtgtaatgaataaccattgaaaaacaatttggacctcgtggtgtccaaaggggcgtcctcggacatttccaatgtcatgttgcaatcggggtataatttatggagttgatgcgtgaacataattacctgcactctagcttcgctgaggcccagtcgctgactcagttcctcgcgcatgaaggcatctggatagtgggtctcctcgaacagtcgctccagctcgttcagctggtccagggtgaagttcgtccgcgatctccgctgcttggtgttcaccagcgacgtgtccagcggatcgcagtgctcccggttgcgactgggctccggagagacgcattcttccggcaataatggcttatccggcgccagctttggcgtattactgtcctccgtgcactcggttatgctggcagtgggcaatccagacattttcggatctgaaaaggttatagttttttctatattcatatgcgtatggcatacttaatgtcaatcgatctagaatataaaacacaagtttatccttttattttgaatgcttgggtcactttttttacacttttaaaattaaaaagaaattcaaacaaatttatcatgatgtctcttaaaaaatttttaagtcagtagattttgtttgtaataattatattattataatgtattattcttaactttaagatttctttctctatttatactggttataaaaacggcaaaaaaaaggcattagtctttatttaattaaaatgtgtgattattgatttgttatgcaccgaaaatacaagttcattatccgacggattatatagacactatgaataagatcatttttatttgaaacttgtacacaaagttaatgggcactttttgatgaatatatgtacatgctacaactactggcttattaactcaaatatttacggatatcgaataaactacatactttatatggacattaatggttagatgaatcaacgcaatggattacgaattgcttttagatattgatatgtgacggtaataaagttataggtaaaaggtttattaggcaattatcttgtttaacactttgactttaacctataccgtacaaagtatctttcactaggattcactagctgagtcgatcaagccatgtccgtttgtttgtccgtttatctgtccgtataaaagtgatatccttacttattcgcgtttttgtattcgatccatgtgtaataaaaaagtcatgctataaatgtcataattcttaacaaacatcctaattatgcaacaacttttcagttttttctattattgagtgatatccggtcggttttaaatccatgttgcaatttaaaacatgttatatatagttgtttaagccacaaatatataattaaagatatcgtaatcccaaaatttgccaaataaattagtaactaagtaacataatggtaagaaaatattaaatgcaggtaaaaatattattctattcttgttaaaaacaaaagaaataaatttgctttggaccatgcaaattgttcaatcaccgacggattatataggatatcagattgcggattatcttaagatatcagcttgcggaatgttttaagcgatatctaccagcactacccatcatatccagttagtgaagttaccttccggctgggagtccacgtccaaatcctccgaaattagccagttcttgggcttcggctccaccgccgccttgtggagagtgggactaaggctgtaggtttccacatgctcctcgcgctgcgaatgagattcttccgttggctccggatcgatagcgaggatcgtattgctctcggatacggataggtcggtaatgtctatgtccacggactcctcgccactcgcgcaagtatcggcataactgccgccggaactgatcgagtttatgaatatggaatttttcacttccgtgggcttttttaaacgcgcgcccgtcatcgaattgaataaggcgtgtacactgttgttagttagattgaactcaaaggacttggtgacaaactgggccaactgctccattatccttggcttgggtaaacaaataaatgccgttgcttttttatgcgttcgagcataagttgctgtaacgaaactaagctgccgactattttatagtcaacaccaatggcattcggcgtgcctaatcacctcagttggctctttattgctgcgcatgtccttcggattatccacattcgattcaaccgcttaaattgttcgttcgagagcgcgacggaatagaaaatattatcgcttcgattttggccagacataaacggatgactgcccgttttaatggacaaatatgactagttcaacatcttgactctattcaattagcaatttctttggtcctgcaacagcacttcactctcctacccttcaaaaatccagcgaaatcgctctctctctctcgcgtgagtccttaaaaaatccaccccaagtcggcggggcagtgtaaagttaagtgaagtcctgcctacggaggtcctttcaattgctctcattggtctacggagcaggcaaagtggttgcacgctcagcgattccagcttactttcctattattggttatagccattatggagcactatttatccattaagcggcaatgaaacacattataattgcaataaatgatgccattgtgggaggagttttgcgcgaaagtttcacatcctggtcgaaggatttccagcgctcagctttttggcactttataaataccatttaaatcgctgtgcttgccacgcaaatccacaggaaaagggcattatttttatttcacaaagtcgtcgccgtcgtttggggagctgttttatcgatttgtgggcgggctcagtgccataaaacaaggatctgagttggcgctttgccacgccccccatattcattacttcaactttgtgctaatgacactgggctacaaaggtggcataactcattgctgagtttattgcacaagtatccaatcgaaggacgaatatactcagctaatgtcctagtttttacagaacga

SEQ ID NO: 11192 - DNA, 846 bp, DROSOPHILA
atggagcagttggcccagtttgtcaccaagtcctttgagttcaatctaactaacaacagtgtacacgccttattcaattcgatgacgggcgcgcgtttaaaaaagcccacggaagtgaaaaattccatattcataaactcgatcagttccggcggcagttatgccgatacttgcgcgagtggcgaggagtccgtggacatagacattaccgacctatccgtatccgagagcaatacgatcctcgctatcgatccggagccaacggaagaatctcattcgcagcgcgaggagcatgtggaaacctacagccttagtcccactctccacaaggcggcggtggagccgaagcccaagaactggctaatttcggaggatttggacgtggactcccagccggaagatccgaaaatgtctggattgcccactgccagcataaccgagtgcacggaggacagtaatacgccaaagctggcgccggataagccattattgccggaagaatgcgtctctccggagcccagtcgcaaccgggagcactgcgatccgctggacacgtcgctggtgaacaccaagcagcggagatcgcggacgaacttcaccctggaccagctgaacgagctggagcgactgttcgaggagacccactatccagatgccttcatgcgcgaggaactgagtcagcgactgggcctcagcgaagctagagtgcaggtaattatgttcacgcatcaactccataaattataccccgattgcaacatgacattggaaatgtccgaggacgcccctttggacaccacgaggtccaaattgtttttcaatggttattcattacacttgtactaa

SEQ ID NO: 11193 - protein, 281 aa, DROSOPHILA
MEQLAQFVTKSFEFNLTNNSVHALFNSMTGARLKKPTEVKNSIFINSISSGGSYADTCASGEESVDIDITDLSVSESNTILAIDPEPTEESHSQREEHVETYSLSPTLHKAAVEPKPKNWLISEDLDVDSQPEDPKMSGLPTASITECTEDSNTPKLAPDKPLLPEECVSPEPSRNREHCDPLDTSLVNTKQRRSRTNFTLDQLNELERLFEETHYPDAFMREELSQRLGLSEARVQVIMFTHQLHKLYPDCNMTLEMSEDAPLDTTRSKLFFNGYSLHLY

SEQ ID NO: 11194 - DNA, 5494 bp, DROSOPHILA
atgcaatatattcaactactatcattattttgcggatcggcgattcttaaggttgcgttccagtttgtgatgaggcttgccttcgttctttcctgtcttctgagtgattctttgagcatcccgactgcgagtttggcgcacggattgctgggcatccttgggaggattggttttacgctgctttggaggcggcggcgtgaaggattcgtcgctatcgtctaggtggtcctcatagagagcatcgtcttctaagtattccgtcacgaattcttcctgcttcacattgtccatgtcttcaaaatcgtcaagatgttcctccttctcatcgacgccgccttctccttcgccgtcgtcttcgaactcgttctggtacggctccatttccaccacatgatcgtcctcgatgtggcgctgcaggcatttctgcgtcaagaagatgtggtcacagaactcgcaggcatggcgctcgctctgcttgtgctggtccatgtggctctcgacactgtcgatatcttcgatctgcttgcgacacatgggacatttcaggctggcggtggcatgaatgagcgcatgatccagtaggtcgttatagttgctgtacgacaccttgcactcactgcacacgaacgaggcgtcggaagtctgcgtgtgcgtgcgcaggtggcgcgagagatgatgcgacagcatgtaggacttgtggcagtacttgcagggataggctctcttcccggcgtgggcaaccaggtggcgggccagcttggaagcggtggaaaagcttctctcgcaatgctgacaggggaagggaagattggtggagtggactgtctgaaagtggacataatcgttagccggggcaatcccaaatatgcttgtcaacccacctcatgacgctccaatccctgcttgaaggcaaacgacttggtgcagacaccgcattggaacggacgcttcttctgatgtcgctcggcgtgcttctccatctcctggcgcgaaaggaagggcttctcgcagtacacgcagatgaacttgggtacgtccgtgtgggtgcgctcgtggcgatggagcaatgccttccgtgtgaaggctttcgagcagatggcgcacttgaatggccgctcgccggtgtgcacaaagttgtgcttggccaggtcgtacttggagaagaagctcttctcgcacaggagacactggaagctgcgcgagcgagtgtgattcagccgatggatctcgagcagctgctgcagcggaaaggagcgttcgcaatcgggacaggggaacacatcggtggccaccttctcggcgttcttggtcggatcatcttgatcgtccaatggcagatccgagtccagaacctctgtcactatggccacattgccactatcatctcgcttgactttgggtgtggccaggcgcggttccaccggagcggcgggtcccttgttcaagatcctaatcgaggacttgttcagcaccttcggcttgacgggtgatgccttctgggggatatcggggaactccttctctagctcactggccatatcctccagcatgctctgcacatcgtccatggacagctcctggttgttatccaccttcagctcataggcgtgcgaacgacgtggcactggagaggaaccggctaccgtcctgggggtcaccatggcgctctccagcacctggacgtcctcgatgatcacctgactactggatttggccattgtgttcagcagctttttgggcgtttcgcttggctcggctgtctttgctggcacgaccaacaacttcttggaagccaccatcgtcatgggcgcacggggcttctccagcggcgatggccagttacccgtgagcggatactggcgcaggagggtctccgcccgcttgcacatctgcttgaagcggtagcagtgctcgaagaggaggcggcactccagacagatgtgccccggcattccgtcgccggcgtagacctgtttttaatgttagattagataaatgtgtgagtgactaggaagctacatttattcggggaagtccgtgcttaagccaaataataaggtaatattcgtggaacacccctatatgtttttcgctacataataaattaaacgccataaatgtctctttcccttaaaatgaacaatataatgttagagtttaaatttaaacaaaggcgccgaggaccagaacaccctctacaaattaatcgatggccaccaatcgatgattagtgctatcgacgagcggccatcgccgcttggcggcaagtgcatacacacgactacatgcaatcgcagtttgttttcgccgctcagagcacgcttaacctccgttaattgattgattaaacacgtccgactgtgagccataaaaggacattcgctcgatcgaaagccgacaaaagctggctgagaagcgcaaaacagctgcgctgcgcaaagtttggccaacgcagagcaatagaaaacagaagcagtgtcagaataaaacaagaatcagaccaaaaagggcgcaacaactgcggagagagaaaaggaaggaaagagcagcgcgtgagcgagggaggagcaggagggagcgaacaaaaggcaagaggaaacacaaggagaaacgcaaacaatcaaaacaagaacttaagcaagaaaaggggcgcaagatgaccgacgagtgcgtaaccagaaactacggagtaggcattcgcagcccaaatggatcggaaaatcggggcagctttataatggctgataataccgatgccaagggctgtacgccggagtctcttgttgttggtggtgcaactgcagcgaggtgagtccatgtgcctcgctctctccctctcccatctctctctttatgtttctgtgttttgttatcaatgcaagtactggcataactgctatatcctagtttcaaatgcagcatataaagctcttttttttttatttattccattttcattccacaatctattatttttatattatttatactgtctattgccaacatttaaaatcaatgtgtcaatctgtctttataatgttgttaaaatggctgaagtcacaaagtttgaaagcacttgactttaattctattgttctatttagtcttattcacaaatatatttgaaaataattacataaataaatacccaatcatcgattatttcgccgattaccttatcttatcatgctgcttcccaaatggctattataattctgatttctttttccccagccccttgccggccaacaagtttgtggctcgaatgcccgtggaacgatatgcaagcgaatacaacatgagtcacaagcaccgcggagttgcgctgatcttcaaccacgaattcttcgacataccctcgctgaagagccgcaccggaacaaatgtcgatgcccaagagctgaaaaaggcctttgaaaacctgggattcgcggtgtccgtgcacaaggactgcaagttgagggacatcctgaagcacgtggggaaggccgccgagttggaccacacggacaacgactgccttgcggtggccatactctcgcacggggagcacggctacctgtacgccaaggatacgcagtacaagctggacaacatctggcactacttcactgccaccttctgcccctcgctggcgggcaagccgaagctgttcttcatccaagcctgccagggcgatcgcttggacggaggcatcactctggagaagggcgttaccgagacggacggggagtcctcgacgagctacaagatacccatacacgccgactttctcttctcctactcgaccattccgggtaaggaatatgattaggtaactattttagtgaatttcactagcaatctcgtcctgttaggctacttctcctggcgcaacatcaacaatggctcctggtacatgcaatcgctgatccgcgagctgaacgccaatggcaaaaagtacgacctgctcaccctgcttacattcgttaaccagcgcgtagccctagactttgagtcgaacgtgcccgccacaccgatgatggatcgccagaagcaaataccgtgcctcacctccatgctgacgcgcatactgcgcttcggcgacaagccgaacggcaataaggctggctaggaagagatctcccttcgaagaagaactttcaacagaggttgtacaaccatcgcccgcaatcattcacgttggattccaattcacttcaagtttagttttagctgacgcgtgcgattatcccgatggatattgaagcacccgactccctttcattcattcccctgcctttcccatgcccatttcggccttatcattgacgaaattcgttacccatttacccactagatgacttccgtatgcataagcgagaccttgccaatagaaaacccacaaatttgagataagataatacaatgaagatttatacatacatacatacttttatgtacacgcaaacatttatatttgatatgaataaaaatgaattaaaaacatagcaaggtatctccccaattgaacgtagatgggtaatttcgatctaagcaactttgtttgaagacaggagctgtctgggccagattgagtacgttgatatgggaaataaaagataacaatgaagacttggttggctgaatcagtgaaattgtacgaaactttagtggaattcaaattagcattattaagagtgattaattaagatttttctcactctaattttattaatttcctaaattttatatttatttcctaattttataatttaggaaattaataaaattaaccaaatgatgatttttgcgtaaatataagtatcgaaggaactattaatgcatttaaatatgatctcgatttgaatttagcgccaaaaacaactgacagctgtcagggcgatcagctgttgacgcactagtgtgcgtgtggcgcagtacagttgccccaaatcgcagaaattttcatttttctttgcacaagaggaaaaagggaaagcccaatgattagccaactaattgggctgtaacctggtcgcacttttcaaggacattcggctgggaaagggaagcggggcagtttggagcggggaaacttagccaagacgcctcgcagtcgatgcggaaacccgcgatgcggcttcttagccaagttatgcgtggcgctggttagtgcaagccagaacccatggatggagccgcttacctcgatcgccgtgatggccataatctgcagcggcagattggcggttgttttcacccgcggattctcctcgaaaatcgaggccagcttctgctcggtcagacagaagcggcagaccctcttctcggtcagcatggcctcgcgcacctccagtttcgcggccatcggcaattggcggtaattcgttccgggcggcggtagaaacgcggaatttcacttgcaaagtgcgtacagattacaaatgagaggaaaacaatcgcttggcgtcgcttagagatgtgcactatgcagatatcgatgtttctgtgt

SEQ ID NO: 11195 - DNA, 3008 bp, DROSOPHILA
gcttctcgcagtacacgcagatgaacttgggtacgtccgtgtgggtgcgctcgtggcgatggagcaatgccttccgtgtgaaggctttcgagcagatggcgcacttgaatggccgctcgccggtgtgcacaaagttgtgcttggccaggtcgtacttggagaagaagctcttctcgcacaggagacactggaagctgcgcgagcgagtgtgattcagccgatggatctcgagcagctgctgcagcggaaaggagcgttcgcaatcgggacaggggaacacatcggtggccaccttctcggcgttcttggtcggatcatcttgatcgtccaatggcagatccgagtccagaacctctgtcactatggccacattgccactatcatctcgcttgactttgggtgtggccaggcgcggttccaccggagcggcgggtcccttgttcaagatcctaatcgaggacttgttcagcaccttcggcttgacgggtgatgccttctgggggatatcggggaactccttctctagctcactggccatatcctccagcatgctctgcacatcgtccatggacagctcctggttgttatccaccttcagctcataggcgtgcgaacgacgtggcactggagaggaaccggctaccgtcctgggggtcaccatggcgctctccagcacctggacgtcctcgatgatcacctgactactggatttggccattgtgttcagcagctttttgggcgtttcgcttggctcggctgtctttgctggcacgaccaacaacttcttggaagccaccatcgtcatgggcgcacggggcttctccagcggcgatggccagttacccgtgagcggatactggcgcaggagggtctccgcccgcttgcacatctgcttgaagcggtagcagtgctcgaagaggaggcggcactccagacagatgtgccccggcattccgtcgccggcgtagacctgtttttaatgttagattagataaatgtgtgagtgactaggaagctacatttattcggggaagtccgtgcttaagccaaataataaggtaatattcgtggaacacccctatatgtttttcgctacataataaattaaacgccataaatgtctctttcccttaaaatgaacaatataatgttagagtttaaatttaaacaaaggcgccgaggaccagaacaccctctacaaattaatcgatggccaccaatcgatgattagtgctatcgacgagcggccatcgccgcttggcggcaagtgcatacacacgactacatgcaatcgcagtttgttttcgccgctcagagcacgcttaacctccgttaattgattgattaaacacgtccgactgtgagccataaaaggacattcgctcgatcgaaagccgacaaaagctggctgagaagcgcaaaacagctgcgctgcgcaaagtttggccaacgcagagcaatagaaaacagaagcagtgtcagaataaaacaagaatcagaccaaaaagggcgcaacaactgcggagagagaaaaggaaggaaagagcagcgcgtgagcgagggaggagcaggagggagcgaacaaaaggcaagaggaaacacaaggagaaacgcaaacaatcaaaacaagaacttaagcaagaaaaggggcgcaagatgaccgacgagtgcgtaaccagaaactacggagtaggcattcgcagcccaaatggatcggaaaatcggggcagctttataatggctgataataccgatgccaagggctgtacgccggagtctcttgttgttggtggtgcaactgcagcgagccccttgccggccaacaagtttgtggctcgaatgcccgtggaacgatatgcaagcgaatacaacatgagtcacaagcaccgcggagttgcgctgatcttcaaccacgaattcttcgacataccctcgctgaagagccgcaccggaacaaatgtcgatgcccaagagctgaaaaaggcctttgaaaacctgggattcgcggtgtccgtgcacaaggactgcaagttgagggacatcctgaagcacgtggggaaggccgccgagttggaccacacggacaacgactgccttgcggtggccatactctcgcacggggagcacggctacctgtacgccaaggatacgcagtacaagctggacaacatctggcactacttcactgccaccttctgcccctcgctggcgggcaagccgaagctgttcttcatccaagcctgccagggcgatcgcttggacggaggcatcactctggagaagggcgttaccgagacggacggggagtcctcgacgagctacaagatacccatacacgccgactttctcttctcctactcgaccattccgggctacttctcctggcgcaacatcaacaatggctcctggtacatgcaatcgctgatccgcgagctgaacgccaatggcaaaaagtacgacctgctcaccctgcttacattcgttaaccagcgcgtagccctagactttgagtcgaacgtgcccgccacaccgatgatggatcgccagaagcaaataccgtgcctcacctccatgctgacgcgcatactgcgcttcggcgacaagccgaacggcaataaggctggctaggaagagatctcccttcgaagaagaactttcaacagaggttgtacaaccatcgcccgcaatcattcacgttggattccaattcacttcaagtttagttttagctgacgcgtgcgattatcccgatggatattgaagcacccgactccctttcattcattcccctgcctttcccatgcccatttcggccttatcattgacgaaattcgttacccatttacccactagatgacttccgtatgcataagcgagaccttgccaatagaaaacccacaaatttgagataagataatacaatgaagatttatacatacatacatacttttatgtacacgcaaacatttatatttgatatgaataaaaatgaattaaaaacatagcaa

SEQ ID NO: 11196 - protein, 323 aa, DROSOPHILA
MTDECVTRNYGVGIRSPNGSENRGSFIMADNTDAKGCTPESLVVGGATAASPLPANKFVARMPVERYASEYNMSHKHRGVALIFNHEFFDIPSLKSRTGTNVDAQELKKAFENLGFAVSVHKDCKLRDILKHVGKAAELDHTDNDCLAVAILSHGEHGYLYAKDTQYKLDNIWHYFTATFCPSLAGKPKLFFIQACQGDRLDGGITLEKGVTETDGESSTSYKIPIHADFLFSYSTIPGYFSWRNINNGSWYMQSLIRELNANGKKYDLLTLLTFVNQRVALDFESNVPATPMMDRQKQIPCLTSMLTRILRFGDKPNGNKAG

SEQ ID NO: 11197 - DNA, 4880 bp, DROSOPHILA
ggtctacggaaacgtgcaacgcttgtccaatgaccccaattcgctgacgtcacacttcttcgctggctccatcgctggtgtcgcccagggtttcgtgtgtgcgcccatggagttggccaaaacgcgactccaattgtccacgcaggttgatagcggcatcaagttcactggacccattcactgcctcaagtacatagtaaaaacggagggtatcagaggtgccttcaagggattaacagccaccattctaagggatattccaggtgagtacgatgtacatcgatgatgataacgacatttaggctaacattccatttcgtttgcttgaccaggctttgccagctactttgtgtccttcgagtaccttatgcgtcaagtggagacacccggcgttgcgtacactctaatggccggcggatgtgctggcatgtcgtcctggttggcgtgctaccccatcgacgtggtgaagacccacatgcaggccgatgccctgggcgcgaatgccaaatacaatggcttcatcgactgtgccatgaagggctttaggaacgagggaccgcagtacttctttcgcggtctaaactccaccttgatccgggcttttccgatgaacgccgcctgcttctttgtggtgtcctgggtactggacatctgcaatgccaagggcggcatggattccgtaatgcattccgatcagccactgactctcgtcaacctagacaacaagagccaagcggacttggaggcgacggcgccaacggttgaggaagtggtgcgcaaaataatcacggacaatgccatgtcccatcagtatgtgtccacgccaaaggatgtcgttcacagccattacacgagtagcacaatcaacattcccaaagaatctaaagcacgtttagcatccgattgtaatttaaaataaagtataaattgtttagtacctttataaatgcgcttgttgaaggtaacagctatttgaattattcataatttaagtttatttcaacgtagtgatattacaattaaatacaatatattagtctatgtgaatgcttttaagaaccgcaggacatgcaggcgtccttattttcgagcgaacaaaccatatcggccattttccgttccctatcctcttcgtacttttgggggcttccctcggcggtgccattctggccattcatgctcactgcaccctgcttcttgttcacggtgaactgaatggcattcgcagctggcttggtgcgcagatagtacattccggttttgagaccagctttccaggaataaaaatgtatggaggtcagctttccatagtttggctcggccacatgtatgttgaacgactgactctgatctatgaacgcaccacgatcggcggccattttaatcgtggacttgaccgagatttcccacaccgtcttgtacagatcgcgcaccttcgggggtatggtctcaatgttttggatcgatcctctgctggatatgatctggttcttcatgtcgtcgtcccacaagtccagctcggttaggtcgcgcaacaaatgatggttgaccacctggaattcgccggacagaactcgccgggtgtatatgtttgtggtgtagggctcgaaggattcattattgcccattatctgagctgtagatgccgtgggcatgggagcaacaagcagagagttccggacaccgtgcatcctaatggactccttcaatttctgccagtcccacaggttcgttggcaccttgtcccacatgtcgtattgcaaaattcccttgcttaccgggctgccctcgtaggtttcgtatggaccttcggtctgggccagttcgcagctggcttccaaggcgccatagtaaatcgtttcgaatatctgctgattcaagagaccggcttcttcgctttcgtacgggaaacgcatgagaatcaaagcatcagcgaatccctgaataccaatgcccacgggacggtgcctcaaattggatttccttgcctctggcagaggataatagttgatatcaattatcttgtttagatttttggtaactatcttggtgacttccttgagcttcttgaaatcatacgtcttctccggcgttacaaacatgttgagggcaatggaggccaagttgcagactgctatctcatccggtgcggagtattctacgatttccgtacacaagttgctgcacttgattgtgcccacattctgctggttgctcttcctgttgcaagcgtccttgaacagcatgtacggatttccggtctccacttgcgcctcaatgatggcaaaccacagggattgagccttaaccgttcggttggcccgaccctcttgctcgtatttctcgtacagcttttcgaattcatcgccccacacgtcgtggagaccaggacacttgtgggggcacatgagcgaccaatcaccgttggcctccacgcgtttcatgaagagatcgggtatccacagggcgtaaaacagatcgcgtgcgcgattctcttctttgcctgtgttcttcttcagttccaggaactcaaagacatccgagtgccagggttccaggtaaatggcaaaggcaccgggacgcttgccgcctccctgatccacataacgtgccacattattgaaaaccctcagcattggaaccaacccattcgaagttccatttgtgccgcaaatcgatgtgccctttgcacgaatgcagtgtacgttaagtccaatgccaccggcggacttggagatcatggcgcactgctccacagacttgaaaatgccctcgatggagtcggctgtcatggtcagaaggaaacacgacgacaactgcggccggtttgtggcagcggcaaacagtgtgggcgatgcatgcgtgaagtagcgctccgatagaagattataagtttccacggccgcatcgatatcctctccatggattccgatcgccacgcgcatcagcatatgctgcggtcgctctgcgatctttccgtttcttttgagcagataggaacgctccagggtcttgaagccaaaatagttatagccaaagtcacgatcatagattatggacgagttcagccgtgtggcgttcttcttaaccacattgtagtgaaactcggataccaagggcactttttgattcgtctccttgtttacatgattatacagatcctcgaagacgtctaataagaatcatgattggattaaccgaagaactcagaatacaagctatgaacttaccagaaaaagccttcttggtttccttgtgcaaattggacactgcaatgcgagcagccaggatggcgtagtcgggatgattgcatgttaatccagctgcgatttctgctgccaagttgtccagctcctgggtggtcacgccgcagtacagaccattgatgacttgcagggtgatagtaacctataaagataaagcataataacacatcaggaaaacttcccaaataatctgctgataacttattacaaatggtttgtatatcttgggactcccacatgagtttcaccaggggcgctcgcacattctgttgcagataaaatcaaaccccatcacatataaatacgcatcatacttactaggttcgagtgcaacctgtgtgatgagcacctttaaacaatagaaacaaacttacaggatcaacaaaatccatgttcaagttgtagcaaagcttctggattcttgaggttattttatcgaagtgcacctcctcctgcctgccatctgaaataaatatattaagaacagtcatagcgacaaggaattgtaacccacctctcttaataacatataactttgaggttttcatggacttgttcttcaacatcttgactgctatatttcacaagaggcggcaaattgattgttgcaagcacaaaaaggcgccaaattaaagtcattattagtgttaccgtgcgacatgttgatcaaatgccgcactttcaaaacgcctaactttgaaacgatcaagaaacaaaattatttcgaaccgttccactcacatttatatcatattcttaaaaaatatatcattttagataatcaaataaatatataaataactgcttgtatcaatacacaggtgttttataaaaacaaatttagtttagtgttaatataaataattagttgtattttttatttatttagctttatataattacataaatataacagtgtttgaagaacatttgagtatgtgttttataaacggtctcggtagattgttatcaattatacaagagattataatatttgtaaacaagttgttaataaaatatgcaatttcaagtgtttaatctaaatggccgtgtctaactattttattgacttgctgtccagattgctgttggaaaacactagaaagaaatattaacattaatacacacagttaaaataagataatatttgtatacatacaaaaagttatttattttttcgagatcgtgtaatatatcatcttggtccgaattcaaatcgtctcgctccttaaggctctccagtagtgtgacgtttaggttttcaatatattcctggagattgttgaccaatagctggagagtcggaacttggattccagtgagcagctgcctcgaaatccatcgatggttggagttcattttgatgccaacatcacacagcattgatcgaattacgtccacaatgggagttacgccatgtttccttgcctacaaatagataattacaattacatttgaataaaaaataaataaatcctgtggaaaacacacctttactttcatctgagctatttccttcgattgagctagtgctattctaacctctatttgaagttttgattgattcgcaaagaaaaacaagttttcatccgacggataatctgttgtaccaat

SEQ ID NO: 11198 - DNA, 2539 bp, DROSOPHILA
tgcttgcaacaatcaatttgccgcctcttgtgaaatatagcagtcaagatgttgaagaacaagtccatgaaaacctcaaagttatatgttattaagagagatggcaggcaggaggaggtgcacttcgataaaataacctcaagaatccagaagctttgctacaacttgaacatggattttgttgatcctgttactatcaccctgcaagtcatcaatggtctgtactgcggcgtgaccacccaggagctggacaacttggcagcagaaatcgcagctggattaacatgcaatcatcccgactacgccatcctggctgctcgcattgcagtgtccaatttgcacaaggaaaccaagaaggctttttctgacgtcttcgaggatctgtataatcatgtaaacaaggagacgaatcaaaaagtgcccttggtatccgagtttcactacaatgtggttaagaagaacgccacacggctgaactcgtccataatctatgatcgtgactttggctataactattttggcttcaagaccctggagcgttcctatctgctcaaaagaaacggaaagatcgcagagcgaccgcagcatatgctgatgcgcgtggcgatcggaatccatggagaggatatcgatgcggccgtggaaacttataatcttctatcggagcgctacttcacgcatgcatcgcccacactgtttgccgctgccacaaaccggccgcagttgtcgtcgtgtttccttctgaccatgacagccgactccatcgagggcattttcaagtctgtggagcagtgcgccatgatctccaagtccgccggtggcattggacttaacgtacactgcattcgtgcaaagggcacatcgatttgcggcacaaatggaacttcgaatgggttggttccaatgctgagggttttcaataatgtggcacgttatgtggatcagggaggcggcaagcgtcccggtgcctttgccatttacctggaaccctggcactcggatgtctttgagttcctggaactgaagaagaacacaggcaaagaagagaatcgcgcacgcgatctgttttacgccctgtggatacccgatctcttcatgaaacgcgtggaggccaacggtgattggtcgctcatgtgcccccacaagtgtcctggtctccacgacgtgtggggcgatgaattcgaaaagctgtacgagaaatacgagcaagagggtcgggccaaccgaacggttaaggctcaatccctgtggtttgccatcattgaggcgcaagtggagaccggaaatccgtacatgctgttcaaggacgcttgcaacaggaagagcaaccagcagaatgtgggcacaatcaagtgcagcaacttgtgtacggaaatcgtagaatactccgcaccggatgagatagcagtctgcaacttggcctccattgccctcaacatgtttgtaacgccggagaagacgtatgatttcaagaagctcaaggaagtcaccaagatagttaccaaaaatctaaacaagataattgatatcaactattatcctctgccagaggcaaggaaatccaatttgaggcaccgtcccgtgggcattggtattcagggattcgctgatgctttgattctcatgcgtttcccgtacgaaagcgaagaagccggtctcttgaatcagcagatattcgaaacgatttactatggcgccttggaagccagctgcgaactggcccagaccgaaggtccatacgaaacctacgagggcagcccggtaagcaagggaattttgcaatacgacatgtgggacaaggtgccaacgaacctgtgggactggcagaaattgaaggagtccattaggatgcacggtgtccggaactctctgcttgttgctcccatgcccacggcatctacagctcagataatgggcaataatgaatccttcgagccctacaccacaaacatatacacccggcgagttctgtccggcgaattccaggtggtcaaccatcatttgttgcgcgacctaaccgagctggacttgtgggacgacgacatgaagaaccagatcatatccagcagaggatcgatccaaaacattgagaccatacccccgaaggtgcgcgatctgtacaagacggtgtgggaaatctcggtcaagtccacgattaaaatggccgccgatcgtggtgcgttcatagatcagagtcagtcgttcaacatacatgtggccgagccaaactatggaaagctgacctccatacatttttattcctggaaagctggtctcaaaaccggaatgtactatctgcgcaccaagccagctgcgaatgccattcagttcaccgtgaacaagaagcagggtgcagtgagcatgaatggccagaatggcaccgccgagggaagcccccaaaagtacgaagaggatagggaacggaaaatggccgatatggtttgttcgctcgaaaataaggacgcctgcatgtcctgcggttcttaaaagcattcacatagactaatatattgtatttaattgtaatatcactacgttg

SEQ ID NO: 11199 - protein, 771 aa, DROSOPHILA
MDFVDPVTITLQVINGLYCGVTTQELDNLAAEIAAGLTCNHPDYAILAARIAVSNLHKETKKAFSDVFEDLYNHVNKETNQKVPLVSEFHYNVVKKNATRLNSSIIYDRDFGYNYFGFKTLERSYLLKRNGKIAERPQHMLMRVAIGIHGEDIDAAVETYNLLSERYFTHASPTLFAAATNRPQLSSCFLLTMTADSIEGIFKSVEQCAMISKSAGGIGLNVHCIRAKGTSICGTNGTSNGLVPMLRVFNNVARYVDQGGGKRPGAFAIYLEPWHSDVFEFLELKKNTGKEENRARDLFYALWIPDLFMKRVEANGDWSLMCPHKCPGLHDVWGDEFEKLYEKYEQEGRANRTVKAQSLWFAIIEAQVETGNPYMLFKDACNRKSNQQNVGTIKCSNLCTEIVEYSAPDEIAVCNLASIALNMFVTPEKTYDFKKLKEVTKIVTKNLNKIIDINYYPLPEARKSNLRHRPVGIGIQGFADALILMRFPYESEEAGLLNQQIFETIYYGALEASCELAQTEGPYETYEGSPVSKGILQYDMWDKVPTNLWDWQKLKESIRMHGVRNSLLVAPMPTASTAQIMGNNESFEPYTTNIYTRRVLSGEFQVVNHHLLRDLTELDLWDDDMKNQIISSRGSIQNIETIPPKVRDLYKTVWEISVKSTIKMAADRGAFIDQSQSFNIHVAEPNYGKLTSIHFYSWKAGLKTGMYYLRTKPAANAIQFTVNKKQGAVSMNGQNGTAEGSPQKYEEDRERKMADMVCSLENKDACMSCGS

SEQ ID NO: 11200 - DNA, 5388 bp, DROSOPHILA
atggagtcgagccgggaattggtgtccactcgccagcgcttctgttgcacctcgctgacgcgggccaccaccacgtccccgatctcgcccacatagcgactcttaagcgggcgcaccgagatcagcttgttgaccttctggatcaccccggccaccgaggacttgatgttctcgtcctcgacgaaggttccgtggccgcgcatgaatcccgcctccggcatcagcacttcccccggcgtatacaccctcggctgttcctccgtctgcgcggccaggtcgcgccagtccacccggtccagggccagatctatcgccgcgttggtggacatctcagtttggccaaagcgaggtaaacaaaaatttaattttgagcgaggcaaaaagagcaacagctggcaaaacacgcgccacgcggaaccggttcgggttcggggttcgttgctggttccggttcaagttccatttcttcgccgcaactacagtgcctatcggttgcggcgaattgcaattttaaaaaccaattttgttgaaattcgaaagtaaatgtaacgaagacttgcaaattctattgcctaacaaaaaatacatacaatcgaaataaaataaaagtaaaggggattaaaaaaaactgttaaaatcacgtttttagtttccttagttttatgaaataacatttattgttaatgtgtataatatatatgtcgaaagcatttttgagtttgtccttagataagcagcatacaaattataattttaaagaacagctttgaaataattgctctggcatttcaatgataagttatctgtcttctttaagttagctaagctccattagacttctgaaacattcatcatcttgtttcagttggattgcctcagagctcgcaggcacattcccatccggaataatattttctagaataagactaaaaacttgaagtagaaaatgcatcggcttctgttcctaatttttttggctctcaaataccagagcaatgcaatgaacttttcgccattgccgaatcgagtgatagatgctccaaagcacctaaaaacccgaatgatccaagtgcgaagctcctactttggatactcgctcgtcatccgtccaaccaggtgagatcttatcctagggaagctatcgatcccagactgtgattgcacttgaaattccatgaagttccttctaacaaaaaacttcgtgatcaatgcagcatcttcgtgggagctccgcgtgctcagtccaccttggaatcgcaaggcagcattaatgagactggagctgtctacagatgccccctggccagtggatcctgctcgcattacgtcctaaacgacaagctaaataagcaattccagtggctgggcggctctatggatggcggcaccaaggatacggacaagctgctcgtgtgcgcacctcggtttttcgtgccgaagaacaagaactatggccaaatgagaggaatttgctactgggttcgggacacagtggcagacactcctccgctgagcgacgtgaggactatcagtctaatcccttcgcaagcagaagaacatttcatgctggagctggggctcagtgcccatgtgacggacgacaactcggggttcctgatcggcgccccgggagtccgtagctggaagggatcggtgttagtgcaccgcggagaagatttggctgcccagggaagctatgcagtcaagatgctcgattcgtgggattgggtaaagaatcacttcacatacgtcggttacgccctgagctccggatactttagcagcaataaccggaccagtctgctctacgtgaccaccgcgccgagctctgtcctgaataccggcaaggcatacattttcgacgttgtgggagagatagtccgtaagctgcatgtgtttcacggcgagcagttgggcgagtacttcggttactccgtggtggcggaagatctcaatggcgatggactaacggatgtggtcgtatccgcgccactcaacgctctaggggattcctatgacgtgggtgccatatacgtgttcatcaacaagggattggtgagttaaccgaattccctataatcgccattagtcagactgcttctatttcccgcttcagtttaaattcgagaaaaagataattcgcttgccattgagcagtggtgcccgtttcggaagttcgctttctaaagtgggcgatatcaaccacgacggatacaacggtgagtaatcctctgggtattcgatatagtatctcattagttcacatgtagacttggccgttggagcgcccttcgcgggaaacggagcggtattcattttcctgggcagcgagcacggattgcgggatgagccgagccagcgactggatgctccttcgcgggagccgggtccatacggagcccacatgtttggacaaggcctctcccgcggatcggacatagatggcaacggattcaatgacctggcgattggagcgcccggtgccgaggcagtgtatctgtatcgcgcatatccggtggtcaaaatccatgcgactgtgcgctcggaatcgcgcgcgatcaggccggagcaggaaacgattacggtgaccgcctgctaccgactggaaactacttccaaggcgaggcagatgcagcagcaggagctgactttccggatgaccatagatgagctcctgcagcgggtatcgtttgcgcccatgcgcaccaatgaggtgtcattccaggcgcaggccggattgagcgggagttgccggaacttttcggtgggggtgcactacaccggtggcatattcacgcccattgatctcgagctgcactacgaactggccaagaagattccccattctcacgaagcattctgcgaatcctgcgccgttgtcgatcccctggagcccaagtatgccacggggacgctcagctttatgacgggatgtgccgcccatgtgtgtgtatctgacttgcagctgagcagcaaggatgtgaagtaagatgaaatctcgatcattcgtgtgtgattccatctaatctaatcgtgtttctcagttctagtttcatctttggctccttggaagtcctcagtttcagttacgagattaccaacagcggagagcccgcctacgtggcccagttcaatgtgaccagctccgcccgtctgcccttcgccaaggttcctgggaactgcagggtgcggcacgaggtcatgctgtgcgatctgaacggcggacgagcgctggccagaggtgacagcgaatccctaaccatcatcttcgatgtcacccagctcagtggtcaatcacttaccatcgaggcagccgtatcctctgcgggaatggaccagaatccgaaggataacacgatgagcactacgattagcctaagggaatacgccgagatcgacgccagtgggtaggattgaatggaaaatcattagatattgggcggatacgactaaatcaacttggtatttcagtggtcccatagatggacatatcgctctcaaggagtatccctactccgcggaagttaacaacagctacgagttcaaaagtcatgggcccagcatcatagatgagctcactgtgtacgttgatgtacccatagcttatacagtaacgggatccgcggggatcaagtccatctttaatataagcagtctacagatgcaggccacccacggttccgaactggtgcccataaagctctacgaccagactaacactctggctaaggagtaccccttggaggactccagtcgaagagcgaaccgaaagcgaagggaactccagcaggatcagtatgccatcatgccggatgtgaatatcagcgacatactgaccaaagagaatcttcccgcgaatcgcactcttgtgctcgactgcctgcgcggcaactggaccatctgcgtccgatcgcaaatgcgggtgcaactgaagccggagcagcccattgacctaaggataagcttcaaagtggacctaaatgatttcgtgaataccttcgattacttagtcatcttcaccaacgttgaaatgttcaaggaaggcgattccacatcaattgccctcaagcgaaacctcaagcccaatgtgatcttcaactattcagagactccactgcccatttggtacatcattctgtccctgatcgctggacacctgctgctcggtgcgatgacctatatcctctacaaggttggtacagtgtgtattctggaaattttttctaatgctgccatatcctcagcttcggttcttcaaacgcggcaagaaggaggagctcaagagattgctggaggagcacagatccgagacgaaagaacctgcaacggattgtgaaggcaaccaagaggaaatcaacgtggaaatgcattctgatttagaaaattaataagttgttaatgatgaaggtccttgtagataatcttaatggataatccctttaatacaaataattaaatattatagcataagagacgaattaaaggaaatatttattaaatattatagaaattattatacaaataaatcacaataataatataaattaatatgaataatataaatggttttgtatgaataagatggaatggtttgcctaataaaagctaacgtgtcgatttctttgttcagcttacgtcttagccagcgcccactgtacttcgccgtgtcgccgttcgaacagctgttttctgttgtggacagctgttgtggctgctccgcgaaaattgcgcagaaaataaaaaagtgaattggcagcaggaaaatggaccagcccgacgaccatttccgctacatacacagctcctcgctccacgagcgagtgcaaatcaaggtgtaagtgaagaaggccacgaagaggccacgtggggaggaactggcgaacccaatcattattgttgcttttcacagagggacgctcgaggggaaaaagcgccagccggactatgagaaactgctagaggatccgatcctgagattctcgggcctgtactccgaggagcacccctcgttccaggtgcgcctgcaggtgttcaaccagggcagaccctactgcctcccagtgaccagctcctacaaggcgttcggcaagcgatggagctggaacgagtgggtgacgctgccgctgcaattctccgacctgcccagaagcgccatgctggtgctgaccatcctggactgctcgggcgcgggccagaccacggtcattggaggcacctccatctcaatgttcggcaaggacggcatgttccgccagggaatgtacgacttgcgagtgtggctgggggtcgagggcgatggcaactttcccagtcgcacgcccggcaagggcaaggagtcgtccaagtcgcagatgcagcgcctaggaaagctggccaagaaacacagga

SEQ ID NO: 11201 - DNA, 3003 bp, DROSOPHILA
atgaacttttcgccattgccgaatcgagtgatagatgctccaaagcacctaaaaacccgaatgatccaagtgcgaagctcctactttggatactcgctcgtcatccgtccaaccagcatcttcgtgggagctccgcgtgctcagtccaccttggaatcgcaaggcagcattaatgagactggagctgtctacagatgccccctggccagtggatcctgctcgcattacgtcctaaacgacaagctaaataagcaattccagtggctgggcggctctatggatggcggcaccaaggatacggacaagctgctcgtgtgcgcacctcggtttttcgtgccgaagaacaagaactatggccaaatgagaggaatttgctactgggttcgggacacagtggcagacactcctccgctgagcgacgtgaggactatcagtctaatcccttcgcaagcagaagaacatttcatgctggagctggggctcagtgcccatgtgacggacgacaactcggggttcctgatcggcgccccgggagtccgtagctggaagggatcggtgttagtgcaccgcggagaagatttggctgcccagggaagctatgcagtcaagatgctcgattcgtgggattgggtaaagaatcacttcacatacgtcggttacgccctgagctccggatactttagcagcaataaccggaccagtctgctctacgtgaccaccgcgccgagctctgtcctgaataccggcaaggcatacattttcgacgttgtgggagagatagtccgtaagctgcatgtgtttcacggcgagcagttgggcgagtacttcggttactccgtggtggcggaagatctcaatggcgatggactaacggatgtggtcgtatccgcgccactcaacgctctaggggattcctatgacgtgggtgccatatacgtgttcatcaacaagggattgtttaaattcgagaaaaagataattcgcttgccattgagcagtggtgcccgtttcggaagttcgctttctaaagtgggcgatatcaaccacgacggatacaacgacttggccgttggagcgcccttcgcgggaaacggagcggtattcattttcctgggcagcgagcacggattgcgggatgagccgagccagcgactggatgctccttcgcgggagccgggtccatacggagcccacatgtttggacaaggcctctcccgcggatcggacatagatggcaacggattcaatgacctggcgattggagcgcccggtgccgaggcagtgtatctgtatcgcgcatatccggtggtcaaaatccatgcgactgtgcgctcggaatcgcgcgcgatcaggccggagcaggaaacgattacggtgaccgcctgctaccgactggaaactacttccaaggcgaggcagatgcagcagcaggagctgactttccggatgaccatagatgagctcctgcagcgggtatcgtttgcgcccatgcgcaccaatgaggtgtcattccaggcgcaggccggattgagcgggagttgccggaacttttcggtgggggtgcactacaccggtggcatattcacgcccattgatctcgagctgcactacgaactggccaagaagattccccattctcacgaagcattctgcgaatcctgcgccgttgtcgatcccctggagcccaagtatgccacggggacgctcagctttatgacgggatgtgccgcccatgtgtgtgtatctgacttgcagctgagcagcaaggatgtgaattctagtttcatctttggctccttggaagtcctcagtttcagttacgagattaccaacagcggagagcccgcctacgtggcccagttcaatgtgaccagctccgcccgtctgcccttcgccaaggttcctgggaactgcagggtgcggcacgaggtcatgctgtgcgatctgaacggcggacgagcgctggccagaggtgacagcgaatccctaaccatcatcttcgatgtcacccagctcagtggtcaatcacttaccatcgaggcagccgtatcctctgcgggaatggaccagaatccgaaggataacacgatgagcactacgattagcctaagggaatacgccgagatcgacgccagtggtggtcccatagatggacatatcgctctcaaggagtatccctactccgcggaagttaacaacagctacgagttcaaaagtcatgggcccagcatcatagatgagctcactgtgtacgttgatgtacccatagcttatacagtaacgggatccgcggggatcaagtccatctttaatataagcagtctacagatgcaggccacccacggttccgaactggtgcccataaagctctacgaccagactaacactctggctaaggagtaccccttggaggactccagtcgaagagcgaaccgaaagcgaagggaactccagcaggatcagtatgccatcatgccggatgtgaatatcagcgacatactgaccaaagagaatcttcccgcgaatcgcactcttgtgctcgactgcctgcgcggcaactggaccatctgcgtccgatcgcaaatgcgggtgcaactgaagccggagcagcccattgacctaaggataagcttcaaagtggacctaaatgatttcgtgaataccttcgattacttagtcatcttcaccaacgttgaaatgttcaaggaaggcgattccacatcaattgccctcaagcgaaacctcaagcccaatgtgatcttcaactattcagagactccactgcccatttggtacatcattctgtccctgatcgctggacacctgctgctcggtgcgatgacctatatcctctacaagcttcggttcttcaaacgcggcaagaaggaggagctcaagagattgctggaggagcacagatccgagacgaaagaacctgcaacggattgtgaaggcaaccaagaggaaatcaacgtggaaatgcattctgatttagaaaattaa

SEQ ID NO: 11202 - protein, 1000 aa, DROSOPHILA
MNFSPLPNRVIDAPKHLKTRMIQVRSSYFGYSLVIRPTSIFVGAPRAQSTLESQGSINETGAVYRCPLASGSCSHYVLNDKLNKQFQWLGGSMDGGTKDTDKLLVCAPRFFVPKNKNYGQMRGICYWVRDTVADTPPLSDVRTISLIPSQAEEHFMLELGLSAHVTDDNSGFLIGAPGVRSWKGSVLVHRGEDLAAQGSYAVKMLDSWDWVKNHFTYVGYALSSGYFSSNNRTSLLYVTTAPSSVLNTGKAYIFDVVGEIVRKLHVFHGEQLGEYFGYSVVAEDLNGDGLTDVVVSAPLNALGDSYDVGAIYVFINKGLFKFEKKIIRLPLSSGARFGSSLSKVGDINHDGYNDLAVGAPFAGNGAVFIFLGSEHGLRDEPSQRLDAPSREPGPYGAHMFGQGLSRGSDIDGNGFNDLAIGAPGAEAVYLYRAYPVVKIHATVRSESRAIRPEQETITVTACYRLETTSKARQMQQQELTFRMTIDELLQRVSFAPMRTNEVSFQAQAGLSGSCRNFSVGVHYTGGIFTPIDLELHYELAKKIPHSHEAFCESCAVVDPLEPKYATGTLSFMTGCAAHVCVSDLQLSSKDVNSSFIFGSLEVLSFSYEITNSGEPAYVAQFNVTSSARLPFAKVPGNCRVRHEVMLCDLNGGRALARGDSESLTIIFDVTQLSGQSLTIEAAVSSAGMDQNPKDNTMSTTISLREYAEIDASGGPIDGHIALKEYPYSAEVNNSYEFKSHGPSIIDELTVYVDVPIAYTVTGSAGIKSIFNISSLQMQATHGSELVPIKLYDQTNTLAKEYPLEDSSRRANRKRRELQQDQYAIMPDVNISDILTKENLPANRTLVLDCLRGNWTICVRSQMRVQLKPEQPIDLRISFKVDLNDFVNTFDYLVIFTNVEMFKEGDSTSIALKRNLKPNVIFNYSETPLPIWYIILSLIAGHLLLGAMTYILYKLRFFKRGKKEELKRLLEEHRSETKEPATDCEGNQEEINVEMHSDLEN

SEQ ID NO: 11203 - DNA, 6231 bp, DROSOPHILA
agactaacactctggctaaggagtaccccttggaggactccagtcgaagagcgaaccgaaagcgaagggaactccagcaggatcagtatgccatcatgccggatgtgaatatcagcgacatactgaccaaagagaatcttcccgcgaatcgcactcttgtgctcgactgcctgcgcggcaactggaccatctgcgtccgatcgcaaatgcgggtgcaactgaagccggagcagcccattgacctaaggataagcttcaaagtggacctaaatgatttcgtgaataccttcgattacttagtcatcttcaccaacgttgaaatgttcaaggaaggcgattccacatcaattgccctcaagcgaaacctcaagcccaatgtgatcttcaactattcagagactccactgcccatttggtacatcattctgtccctgatcgctggacacctgctgctcggtgcgatgacctatatcctctacaaggttggtacagtgtgtattctggaaattttttctaatgctgccatatcctcagcttcggttcttcaaacgcggcaagaaggaggagctcaagagattgctggaggagcacagatccgagacgaaagaacctgcaacggattgtgaaggcaaccaagaggaaatcaacgtggaaatgcattctgatttagaaaattaataagttgttaatgatgaaggtccttgtagataatcttaatggataatccctttaatacaaataattaaatattatagcataagagacgaattaaaggaaatatttattaaatattatagaaattattatacaaataaatcacaataataatataaattaatatgaataatataaatggttttgtatgaataagatggaatggtttgcctaataaaagctaacgtgtcgatttctttgttcagcttacgtcttagccagcgcccactgtacttcgccgtgtcgccgttcgaacagctgttttctgttgtggacagctgttgtggctgctccgcgaaaattgcgcagaaaataaaaaagtgaattggcagcaggaaaatggaccagcccgacgaccatttccgctacatacacagctcctcgctccacgagcgagtgcaaatcaaggtgtaagtgaagaaggccacgaagaggccacgtggggaggaactggcgaacccaatcattattgttgcttttcacagagggacgctcgaggggaaaaagcgccagccggactatgagaaactgctagaggatccgatcctgagattctcgggcctgtactccgaggagcacccctcgttccaggtgcgcctgcaggtgttcaaccagggcagaccctactgcctcccagtgaccagctcctacaaggcgttcggcaagcgatggagctggaacgagtgggtgacgctgccgctgcaattctccgacctgcccagaagcgccatgctggtgctgaccatcctggactgctcgggcgcgggccagaccacggtcattggaggcacctccatctcaatgttcggcaaggacggcatgttccgccagggaatgtacgacttgcgagtgtggctgggggtcgagggcgatggcaactttcccagtcgcacgcccggcaagggcaaggagtcgtccaagtcgcagatgcagcgcctaggaaagctggccaagaaacacaggaacggccaggtgcaaaaggtggactggctggacagactgacgtttcgcgaaatcgaggtgatcaacgagcgcgaaaagcgtatgtcggactatatgtttcttatgatcgagtttcccgccatcgtggtggatgacatgtacaacgtgagtcattggaacactgatcctggccagcattgagcttacagtcttgtcttacagtacgccgtggtctacttcgagccggagggtgacgtcaaatacaagctgccggccaaacctaagctggtttctgtgccggactccgagatccaaatggaaaatctggtcgagcgcaagcaccatcgattggcccgttcggagcgttcaggcatctcggacagagatgccaagccgacagccaggtaaaccgtacatcttcagagattagaactgcactcatgcatggcattcccgcagcattcgcgatcagctccacacgattgtctataggtatccacccacctatgttctgagcagcgaggagcaggatctggtgtggaagtttcgcttttatctctcctcgcacaaaaaggctctgaccaagttcctcaagtgcatcaattggaagctggaggacgaggttacgcaggccctttggatgctggccaactgggcgcccatggacgtggaggatgccttggagctgctgagtccgacttttacgcacccgcaggtgcgaaagtacgctgttagtcgattggcccaagcgccagacgaggatctgctgctctacttgcttcagctggtgcaagcgctgaagtacgaggatccgcggcacattgtccacctgcatggctgcatctttcccgagcgcgatgtggtgcggtccatcctggacgacaacggctctctgctggaccagagcagcctatcggatctgagcgccacgagcagtggactccacggctcggtcattccggccaatcagcgagcggccagtgttttggccgccatcaagagcgataagtcagtgagtcccggttcagcgggtggcagtggcagtggtggtcagggatcggttgcgctgccaaacccctctgctcccgccactccgggcagcagctcgttgccctgcgactcaaactccaatgccctaatgctggccgagggcatcagcttcggcagtgttccagccaatctctgcacattcctgatccagcgcgcttgcacgaacgccacgctggccaactacttctactggtacttgtccatcgaggtggaggaagtggagtcggtgaggaagcaggacgagagggcccacgacatgtacgccatggtgctcaagatgtttctgaaggtgctagagaacggtgggtgtaatttaacgaaatcatggctcattctctaattccctaattctctaatccgctcatccgcacaggcaacttcaacctgagaggcatcttctacaacctccggaagcagcggcgcttcatcgacgagctggtcaaactggtgaaactggtggccaaggagccgggaaatcgcaataagaagactgagaagttccagaaactgttggccgaacaggacatgttcaaggtgaacttcaccaacttcgagcccattccgtttcccctggatccggagatctacatcaccaagatcgtgcccatgcgcacatcgctcttcaagagcgccctgatgccagccaagtacgccatgaccaaccaacaaactctactcactcactgaatacttcaatcctaatccttaatcctattcgcaggctcacctttgtcacttcgattgcccatcacgagtacgcggccattttcaagcacggtgatgatctgcgccaggatcagctcatcctgcagatgataactttgatggacaagctgctgaggcgcgagaacctcgacctgaagctgactccctacaaagtgctggccaccagctccaagcacggcttcctccagtacgtcgactcctgcaccgtggcggaggtgctggcgcgggagggcaacatccacaacttcttccgcaagcatcatccgtgcgacaatggaccctacggcatttcggcggaggtcatggacacctacatcaagagctgcgcgggctactgtgtgatcacctatttgctgggtgagactaaaggagtgtaaccaggtggattccgctaatccttggaatttcctcgcaggtgtgggcgaccggcacttggacaacctcttgctgaccaccaacggcaagctcttccacatcgatttcggctacattctgggacgcgatcccaagcccatgccgccgccaatgaagctgagcaaggaaatggtggaggccatgggcggcatcagctccgagcatcaccacgagttccgcaagcagtgctacacggcgtacctgcacttgcggcggcatgccaacgtgatgctcaacctgttctctctgatggtggacgccactgtgccggatatcgctctcgagcccgacaaggcggtcaagaaggtggaggagaacctgcagctgggcctcacagacgaggaggcagtgcagcacttgcagagcctcctggacgtgtccattacggcggtgatgccggctctggtggagcagattcatcggttcacccaatactggcggaagtagaggacattgcttgcacaagaaattgtgggaggagcgagtaatcctagttcggttcagctgagttgtttaacatcaaaagtgtacattagattaataccttatacttatcaatacttattaatattatttatcctttaaatcctagtcgtaagtttgctttagtcgtaggtggcctgtagctaaaagtccgttgtgcggaaccaaatgtatccacatatactatatatcttgtcacaattgtagtataaccatttaatcgggcaaacatgcaggtgcgctccaagaagcccgtttggttcctgttcaagatgatggagctgctgctgagcctgggctgctgcctcgtccattggacctgcttcatggaggagggtgtgccgcacatcttcctgctgtgcggaacgtacggcggctcggtgatcatatgcttcatatcactgattggagctttctacgccgagcggccgacgatgaagcacgaggcgctgttcggtgggatcttgggtggcctgcacatggtcaccgtgtacgccaacatgtatgtggccactttggaggagttccgcactgagcgctggcccagcttctatgcgtgctgtcgggacaacgccattgtggctctgtacgccggcgccatttatctgatgcactgcaccttcgctctggatctcatgttctcccactcacgcagtcgggcgaatcagaagatgcatccacagcggagcaagcgaccactgcagctgtacttcatcagccggggcgcggaggcctatctcagtcgcttctggttctttcggcgcatcgccgccaggatgctgaccagcgcccagccatcggagcattccggccggaagcggcaggtctcgtcctccgagtcggactcggatgccaaggagagggaggaggagcggattaggaactcggaggttttcaaatagctcaagtaattaaatattaacgttcacctgctcgtgtgctcactgtagttgtgccttttgaaagcccgctgctgtgcagccctggcgccatcagctgttcgccgcataacagccccgtctcttggagcgcgcgcactttgacagctgttcgtttacagttcctttggttcttggaagtttgtttggcgcgccgcgtgtgattttcgttacttttgccggaattgtgtcgattttgtggatttttgcattggtttaagcctgcggaggagtccagctttaatgacgatggcgaacggtgcggtgagttgcggggggaacgcactgcgtcgtccacttcgccattgtgcggatgcatggctggaaatttctgtctgcaaacttttccgattttcatagttcgatgcgtggtggaaacttctgcgggcggcgctcgagctctgggtctgtgtgcctgtggttttagttagttgcaggtactcgttgctaaaacttttgctaaaagttagccgttgccactaaagttgccgcccgaggcaacacaaacaaacgaaaaaaaacgaaaaaaaacgggactagcacactcgcggccatgtgcatatgaacacttagacgccgtgccaaaacgaaaggcacagtgggccttggctaactctgaagattggaattcttcccttcaagaaattccaatttctaggactttcccaatttccattctgactttggaagaggcggaaaactgagtgtgtaatcatcatttcccgttttcgcctttacaattcactcgatctgtgcaatgttgtatagtagcagcagcaacaggaatctcttatcgggagcactatgccacatgccactcttcccgaagagagcccactgcagctgcgagtgcgagtgagtgggtgggtgtgctactggcgagcgagcgagcgagcatgactcaccgctgccaactgcactcaacttggcctttgttattgtctgtggctgcaagccatcgagc

SEQ ID NO: 11204 - DNA, 3527 bp, DROSOPHILA
gctgctccgcgaaaattgcgcagaaaataaaaaagtgaattggcagcaggaaaatggaccagcccgacgaccatttccgctacatacacagctcctcgctccacgagcgagtgcaaatcaaggtagggacgctcgaggggaaaaagcgccagccggactatgagaaactgctagaggatccgatcctgagattctcgggcctgtactccgaggagcacccctcgttccaggtgcgcctgcaggtgttcaaccagggcagaccctactgcctcccagtgaccagctcctacaaggcgttcggcaagcgatggagctggaacgagtgggtgacgctgccgctgcaattctccgacctgcccagaagcgccatgctggtgctgaccatcctggactgctcgggcgcgggccagaccacggtcattggaggcacctccatctcaatgttcggcaaggacggcatgttccgccagggaatgtacgacttgcgagtgtggctgggggtcgagggcgatggcaactttcccagtcgcacgcccggcaagggcaaggagtcgtccaagtcgcagatgcagcgcctaggaaagctggccaagaaacacaggaacggccaggtgcaaaaggtggactggctggacagactgacgtttcgcgaaatcgaggtgatcaacgagcgcgaaaagcgtatgtcggactatatgtttcttatgatcgagtttcccgccatcgtggtggatgacatgtacaactacgccgtggtctacttcgagccggagggtgacgtcaaatacaagctgccggccaaacctaagctggtttctgtgccggactccgagatccaaatggaaaatctggtcgagcgcaagcaccatcgattggcccgttcggagcgttcaggcatctcggacagagatgccaagccgacagccagcattcgcgatcagctccacacgattgtctataggtatccacccacctatgttctgagcagcgaggagcaggatctggtgtggaagtttcgcttttatctctcctcgcacaaaaaggctctgaccaagttcctcaagtgcatcaattggaagctggaggacgaggttacgcaggccctttggatgctggccaactgggcgcccatggacgtggaggatgccttggagctgctgagtccgacttttacgcacccgcaggtgcgaaagtacgctgttagtcgattggcccaagcgccagacgaggatctgctgctctacttgcttcagctggtgcaagcgctgaagtacgaggatccgcggcacattgtccacctgcatggctgcatctttcccgagcgcgatgtggtgcggtccatcctggacgacaacggctctctgctggaccagagcagcctatcggatctgagcgccacgagcagtggactccacggctcggtcattccggccaatcagcgagcggccagtgttttggccgccatcaagagcgataagtcagtgagtcccggttcagcgggtggcagtggcagtggtggtcagggatcggttgcgctgccaaacccctctgctcccgccactccgggcagcagctcgttgccctgcgactcaaactccaatgccctaatgctggccgagggcatcagcttcggcagtgttccagccaatctctgcacattcctgatccagcgcgcttgcacgaacgccacgctggccaactacttctactggtacttgtccatcgaggtggaggaagtggagtcggtgaggaagcaggacgagagggcccacgacatgtacgccatggtgctcaagatgtttctgaaggtgctagagaacggcaacttcaacctgagaggcatcttctacaacctccggaagcagcggcgcttcatcgacgagctggtcaaactggtgaaactggtggccaaggagccgggaaatcgcaataagaagactgagaagttccagaaactgttggccgaacaggacatgttcaaggtgaacttcaccaacttcgagcccattccgtttcccctggatccggagatctacatcaccaagatcgtgcccatgcgcacatcgctcttcaagagcgccctgatgccagccaagctcacctttgtcacttcgattgcccatcacgagtacgcggccattttcaagcacggtgatgatctgcgccaggatcagctcatcctgcagatgataactttgatggacaagctgctgaggcgcgagaacctcgacctgaagctgactccctacaaagtgctggccaccagctccaagcacggcttcctccagtacgtcgactcctgcaccgtggcggaggtgctggcgcgggagggcaacatccacaacttcttccgcaagcatcatccgtgcgacaatggaccctacggcatttcggcggaggtcatggacacctacatcaagagctgcgcgggctactgtgtgatcacctatttgctgggtgtgggcgaccggcacttggacaacctcttgctgaccaccaacggcaagctcttccacatcgatttcggctacattctgggacgcgatcccaagcccatgccgccgccaatgaagctgagcaaggaaatggtggaggccatgggcggcatcagctccgagcatcaccacgagttccgcaagcagtgctacacggcgtacctgcacttgcggcggcatgccaacgtgatgctcaacctgttctctctgatggtggacgccactgtgccggatatcgctctcgagcccgacaaggcggtcaagaaggtggaggagaacctgcagctgggcctcacagacgaggaggcagtgcagcacttgcagagcctcctggacgtgtccattacggcggtgatgccggctctggtgcgctccaagaagcccgtttggttcctgttcaagatgatggagctgctgctgagcctgggctgctgcctcgtccattggacctgcttcatggaggagggtgtgccgcacatcttcctgctgtgcggaacgtacggcggctcggtgatcatatgcttcatatcactgattggagctttctacgccgagcggccgacgatgaagcacgaggcgctgttcggtgggatcttgggtggcctgcacatggtcaccgtgtacgccaacatgtatgtggccactttggaggagttccgcactgagcgctggcccagcttctatgcgtgctgtcgggacaacgccattgtggctctgtacgccggcgccatttatctgatgcactgcaccttcgctctggatctcatgttctcccactcacgcagtcgggcgaatcagaagatgcatccacagcggagcaagcgaccactgcagctgtacttcatcagccggggcgcggaggcctatctcagtcgcttctggttctttcggcgcatcgccgccaggatgctgaccagcgcccagccatcggagcattccggccggaagcggcaggtctcgtcctccgagtcggactcggatgccaaggagagggaggaggagcggattaggaactcggaggttttcaaatag

SEQ ID NO: 11205 - protein, 1157 aa, DROSOPHILA
MDQPDDHFRYIHSSSLHERVQIKVGTLEGKKRQPDYEKLLEDPILRFSGLYSEEHPSFQVRLQVFNQGRPYCLPVTSSYKAFGKRWSWNEWVTLPLQFSDLPRSAMLVLTILDCSGAGQTTVIGGTSISMFGKDGMFRQGMYDLRVWLGVEGDGNFPSRTPGKGKESSKSQMQRLGKLAKKHRNGQVQKVDWLDRLTFREIEVINEREKRMSDYMFLMIEFPAIVVDDMYNYAVVYFEPEGDVKYKLPAKPKLVSVPDSEIQMENLVERKHHRLARSERSGISDRDAKPTASIRDQLHTIVYRYPPTYVLSSEEQDLVWKFRFYLSSHKKALTKFLKCINWKLEDEVTQALWMLANWAPMDVEDALELLSPTFTHPQVRKYAVSRLAQAPDEDLLLYLLQLVQALKYEDPRHIVHLHGCIFPERDVVRSILDDNGSLLDQSSLSDLSATSSGLHGSVIPANQRAASVLAAIKSDKSVSPGSAGGSGSGGQGSVALPNPSAPATPGSSSLPCDSNSNALMLAEGISFGSVPANLCTFLIQRACTNATLANYFYWYLSIEVEEVESVRKQDERAHDMYAMVLKMFLKVLENGNFNLRGIFYNLRKQRRFIDELVKLVKLVAKEPGNRNKKTEKFQKLLAEQDMFKVNFTNFEPIPFPLDPEIYITKIVPMRTSLFKSALMPAKLTFVTSIAHHEYAAIFKHGDDLRQDQLILQMITLMDKLLRRENLDLKLTPYKVLATSSKHGFLQYVDSCTVAEVLAREGNIHNFFRKHHPCDNGPYGISAEVMDTYIKSCAGYCVITYLLGVGDRHLDNLLLTTNGKLFHIDFGYILGRDPKPMPPPMKLSKEMVEAMGGISSEHHHEFRKQCYTAYLHLRRHANVMLNLFSLMVDATVPDIALEPDKAVKKVEENLQLGLTDEEAVQHLQSLLDVSITAVMPALVRSKKPVWFLFKMMELLLSLGCCLVHWTCFMEEGVPHIFLLCGTYGGSVIICFISLIGAFYAERPTMKHEALFGGILGGLHMVTVYANMYVATLEEFRTERWPSFYACCRDNAIVALYAGAIYLMHCTFALDLMFSHSRSRANQKMHPQRSKRPLQLYFISRGAEAYLSRFWFFRRIAARMLTSAQPSEHSGRKRQVSSSESDSDAKEREEERIRNSEVFK

SEQ ID NO: 11206 - DNA, 4182 bp, DROSOPHILA
tgccaagttgtccagctcctgggtggtcacgccgcagtacagaccattgatgacttgcagggtgatagtaacctataaagataaagcataataacacatcaggaaaacttcccaaataatctgctgataacttattacaaatggtttgtatatcttgggactcccacatgagtttcaccaggggcgctcgcacattctgttgcagataaaatcaaaccccatcacatataaatacgcatcatacttactaggttcgagtgcaacctgtgtgatgagcacctttaaacaatagaaacaaacttacaggatcaacaaaatccatgttcaagttgtagcaaagcttctggattcttgaggttattttatcgaagtgcacctcctcctgcctgccatctgaaataaatatattaagaacagtcatagcgacaaggaattgtaacccacctctcttaataacatataactttgaggttttcatggacttgttcttcaacatcttgactgctatatttcacaagaggcggcaaattgattgttgcaagcacaaaaaggcgccaaattaaagtcattattagtgttaccgtgcgacatgttgatcaaatgccgcactttcaaaacgcctaactttgaaacgatcaagaaacaaaattatttcgaaccgttccactcacatttatatcatattcttaaaaaatatatcattttagataatcaaataaatatataaataactgcttgtatcaatacacaggtgttttataaaaacaaatttagtttagtgttaatataaataattagttgtattttttatttatttagctttatataattacataaatataacagtgtttgaagaacatttgagtatgtgttttataaacggtctcggtagattgttatcaattatacaagagattataatatttgtaaacaagttgttaataaaatatgcaatttcaagtgtttaatctaaatggccgtgtctaactattttattgacttgctgtccagattgctgttggaaaacactagaaagaaatattaacattaatacacacagttaaaataagataatatttgtatacatacaaaaagttatttattttttcgagatcgtgtaatatatcatcttggtccgaattcaaatcgtctcgctccttaaggctctccagtagtgtgacgtttaggttttcaatatattcctggagattgttgaccaatagctggagagtcggaacttggattccagtgagcagctgcctcgaaatccatcgatggttggagttcattttgatgccaacatcacacagcattgatcgaattacgtccacaatgggagttacgccatgtttccttgcctacaaatagataattacaattacatttgaataaaaaataaataaatcctgtggaaaacacacctttactttcatctgagctatttccttcgattgagctagtgctattctaacctctatttgaagttttgattgattcgcaaagaaaaacaagttttcatccgacggataatctgttgtaccaatgggattgccattcatatgattcatgcttttatcttggttgatttggttcttttgaaagattttatcgttttcaaattccttattgcgtttcgtttcacagaattcagattgcttgcgaagtactccacttgatagttttggacacgtctcagagtcggagctataactttcattatcggatccggttagaaattcctccttcttaatgtctaaatataaaatataatatttaagaaaatatagtaatgaaagaatatctttggtcttaccattatttaaagaatctttatctccgattgccaatctcttgcgtatctcatctcgattgaatcgccgctgtaattggaatatatatttaataaatgatattattattccgattatattgtacctacctttttctctatctgtttaacctttttataatggttttgcaatgtttctacatccatatcgtttgcaatcttgtacgcatcaaattgttctataaaaatttaaatattaatatactcaagaatctataacgattaattcatatttgaaattacctaaaaccatggtggagcatggatctttggagtacttgatgggatcttccaagtactgagaccagcgcgattgatttgagtacttccgactagccaccttgttattgtcctcgtccagattctgctggcttccacttccaccgatttccaagctgctcatgttgggtatttcagcctgatttaggttcggactatcgtttttgttcttttccggaacggacgagtattggtcagcatcacaaatgatatattttcgttggctatacgttttgtagtcgaacgtgtccggtggcaattgacgttcgtcatgagacggctttggatgcttcgttttcacgatctgatgtccgtacggtgtgttcttctttttattttttcgagtactattcccggacaatcgcgtcgaggatgtttgcttaagagcctccgttccatttgatagttctgcatcgcaaatctgcaaggtacaattatgcttttacgtgcctgatctcttttattttaactaactacataccttatctaaatttgatcccttcaactcatccgcttccttcttgtttttatatccagtgagaagtagctcgaattcacgttccacttctccgccaaaatcaccaacaatatcgataggactttggccttgcaactgcccttcgtatttcgaattaattgtacatgaccaggatggaaactcaggattggtcgtataattctggcttagattgtagataaggtcaggtttttgcaaagctcgcttggagttttccgacgttgcactatagttttcatttacaatatccggaatgttttccgatcggttcacgctttcctcttctgatatatatgtgtttccattgtcgcagttacttaaaatcgaatcttggccattcttaaaggtttccgagcccgattccttggccatcttacttgggaacgttgggtcatcttctctatcgctgtcggttagatcgctttcattgcactccatgtcggagtactctatgtagtcatcggaaagggtatgcgcgaacttttgaaatcctgggtagttggggttggtgatgccctttgttatatagatatccattcttggcatgggcattggaataagttgtctagaagaaataaaaaagtttagatgacttaaatattgattacaactacagtgtattaataacataacataattaaaacatagtaaaagcaataaaatggtttttttcttatttccttttacttgctaaaggacaccactatctccactccactattttctttagttcaactcattatcgtatttataaattactttaagagtcaatttggtatttaacttcatatgtgtttagatgttacattgtccttaacaacacatgaatgaactgacattttgtatattcttaaaatcgagaaacaagaatcaagccgaaaaaagttggtgtaggtgcaaatttttgtaacagaaatatctgaagatagtcaaagttacttgcaattataatttcttgtatttgctttatttaaacgattgtttcgactgttaacaactaaaatgtattccgtttgtttaaaatgttaattattgaatcaatgaagacttacaaggacttcggccttcctgcattcagatgtaaaaattactcccacacatataaagcaaattacacgtttgacgcatgcgcaaatcttggtatatagtgttgttaacaatactaaatattattacaaataatttaatttactaaggaacaaaaaatttattaattatttattatttttttatatgcaaaaactgagaaaacaacttaaaaatcgaaactgaaaatgtctctgagttttaccatggcacaaaattttcttttaatgtaaacttatattattattatttaaggaataggcttaaaactttttgctatgtttttttcaaagttcttaaaaaatcccaatcccaacaatttatgaatacctctgattaaattttttgcactcagtatttttctcattttgagatatggtaacacttaagcacaatgtgatttaaaaaaccataacattgtatataaaagtaatagaaatccaaacacaac

SEQ ID NO: 11207 - DNA, 1690 bp, DROSOPHILA
atggatatctatataacaaagggcatcaccaaccccaactacccaggatttcaaaagttcgcgcataccctttccgatgactacatagagtactccgacatggagtgcaatgaaagcgatctaaccgacagcgatagagaagatgacccaacgttcccaagtaagatggccaaggaatcgggctcggaaacctttaagaatggccaagattcgattttaagtaactgcgacaatggaaacacatatatatcagaagaggaaagcgtgaaccgatcggaaaacattccggatattgtaaatgaaaactatagtgcaacgtcggaaaactccaagcgagctttgcaaaaacctgaccttatctacaatctaagccagaattatacgaccaatcctgagtttccatcctggtcatgtacaattaattcgaaatacgaagggcagttgcaaggccaaagtcctatcgatattgttggtgattttggcggagaagtggaacgtgaattcgagctacttctcactggatataaaaacaagaaggaagcggatgagttgaagggatcaaatttagataagatttgcgatgcagaactatcaaatggaacggaggctcttaagcaaacatcctcgacgcgattgtccgggaatagtactcgaaaaaataaaaagaagaacacaccgtacggacatcagatcgtgaaaacgaagcatccaaagccgtctcatgacgaacgtcaattgccaccggacacgttcgactacaaaacgtatagccaacgaaaatatatcatttgtgatgctgaccaatactcgtccgttccggaaaagaacaaaaacgatagtccgaacctaaatcaggctgaaatacccaacatgagcagcttggaaatcggtggaagtggaagccagcagaatctggacgaggacaataacaagcggcgattcaatcgagatgagatacgcaagagattggcaatcggagataaagattctttaaataatgacattaagaaggaggaatttctaaccggatccgataatgaaagttatagctccgactctgagacgtgtccaaaactatcaagtggagtacttcgcaagcaatctgaattctgtgaaacgaaacgcaataaggaatttgaaaacgataaaatctttcaaaagaaccaaatcaaccaagataaaagcatgaatcatatgaatggcaatcccattggtacaacagattatccgtcggatgaaaacttgtttttctttgcgaatcaatcaaaacttcaaatagaggttagaatagcactagctcaatcgaaggaaatagctcagatgaaagtaaaggcaaggaaacatggcgtaactcccattgtggacgtaattcgatcaatgctgtgtgatgttggcatcaaaatgaactccaaccatcgatggatttcgaggcagctgctcactggaatccaagttccgactctccagctattggtcaacaatctccaggaatatattgaaaacctaaacgtcacactactggagagccttaaggagcgagacgatttgaattcggaccaagatgatatattacacgatctcgaaaaaataaataactttttgtatgtatacaaatattatcttattttaactgtgtgtattaatgttaatatttctttctagtgttttccaacagcaatctggacagcaa

SEQ ID NO: 11208 - protein, 553 aa, DROSOPHILA
MDIYITKGITNPNYPGFQKFAHTLSDDYIEYSDMECNESDLTDSDREDDPTFPSKMAKESGSETFKNGQDSILSNCDNGNTYISEEESVNRSENIPDIVNENYSATSENSKRALQKPDLIYNLSQNYTTNPEFPSWSCTINSKYEGQLQGQSPIDIVGDFGGEVEREFELLLTGYKNKKEADELKGSNLDKICDAELSNGTEALKQTSSTRLSGNSTRKNKKKNTPYGHQIVKTKHPKPSHDERQLPPDTFDYKTYSQRKYIICDADQYSSVPEKNKNDSPNLNQAEIPNMSSLEIGGSGSQQNLDEDNNKRRFNRDEIRKRLAIGDKDSLNNDIKKEEFLTGSDNESYSSDSETCPKLSSGVLRKQSEFCETKRNKEFENDKIFQKNQINQDKSMNHMNGNPIGTTDYPSDENLFFFANQSKLQIEVRIALAQSKEIAQMKVKARKHGVTPIVDVIRSMLCDVGIKMNSNHRWISRQLLTGIQVPTLQLLVNNLQEYIENLNVTLLESLKERDDLNSDQDDILHDLEKINNFLYVYKYYLILTVCINVNISF

SEQ ID NO: 11209 - DNA, 2837 bp, DROSOPHILA
ccaccatcacctatccttccggcgttcaggttgagctgggcaaggagctgactcccactcaggtgaaggaccagcccactgtcgtcttcgatgccgagcccaactccctgtacaccatcctgttggtggaccccgacgcacccagccgcgaggaccccaagttccgtgagctgctccactggctggtgatcaacattcccggcaacaaggtgtccgagggccagaccatcgccgagtacatcggtgctggaccccgcgagggaaccggcctgcaccgctacgtcttcctggtgttcaagcagaacgacaagatcaccaccgagaagttcgtgtccaagaccagccgcactggccgcatcaacgtcaaggcccgcgactacatccagaagtacagcttcggcggtcccgtggccggcaacttcttccaggcccaatacgatgactacgtgaagaccctcatcgagacggtccagtaatctggccaccaactgatcagctctctgtgaaataataaatattaaatatgtactagttctcataaaagttatctcatacatgcttgtgggcgggtcttttgctatgcgatttccataagcagctgaagtatatttttataagaattacttttgataacatttccggaattaatttaaacttgcccgaggctttgatatctttctttgaagttaagtttataaaagcgagagaaagaaatgtttataattaatcatttatttccctttcgctaagttaggagatatggttatttttcaatttatttcgaaatgattcattgaatagataacaatattctttaacttagatatgaatttgattcatcaaaactatcagtttccttttaaaattcgaactttgaacacctgcatgctcatttctgataactgctttcacatataacgaatatccatccaacttcaagttaccattgttaaacaagtaatgagtttggatccatgaaagcttaaatatattggttaatctagttatttttgttaaagaaatcggccaccagtttgttaaactcctccgcataacgtaaatggatattatgcttcccctcggggaactcataatattccgcatgaggcaaacgctccctcagccaaggaatgtgctccgctgctatcatgggatccttctttccgtggagtataaaagtaggtatctttattttctcaacttcggtgcgacagaagtctccatcccgttggtcatagaaggcgcatgcggcgtccacccattcggcccacaattgggggaatctttcgacgccgtaaaccttttccatgggctcacgcatgcgcggcgaccacttggccacatcccgaatgttcttaagagccttgacttcgtcagcgttcaagtaggcacctgctccccagattgctaggcgatccacagcttccgcatggcgacctgcgactatgagcgccgtgatgcccccatcgctccagcccaaaatggagaagcgtggtctgtccagggcacgcatcaaatccacggctgcctgggcatcctcccgaaagaattcaaggccgaacttgcgctgcggcggcactgatttgccataacccggcggatcccaggcgatgatggtgtgacccggcagcagtttcggcagctgctcgatctggggcctaaagtcggtccacgaggaacccagtgctcccggcatcaggagtagactccgctccccactgccgctctccacaatgttcaaatctgagccattcacacgaactttccgctccgtgtgcagcaagcgcctggtgatcggggaacgggcacccacaagccggcacagattgcccagcattacgtaagcgggatctaacggggattttggagtatggcaacaaacttagctgcttctcaagggctcttcagatgtccagagaggaatatttggcaaattctaatctttacacacgacgccttgtaaagtgcacttgataaagatccgttgataacagctgattgataagaacagctgtaagtaaacgatcgaattagtgtggctgtaggtgcgatgatgccatataccgttaaatcaaaagtaaatataccaaaaaactaattttaaaagaatcgttaattttttaataatttgaaaaatattttcatattgatatttaggcattgggtgatgcacttgcatttttaagaatgttcctgaaatttaaaagatttttccattcattttgaagaatattacttgacaatgccgaactctccacagattttaaaataatggtagtttaaaagcccttgaaagttcaagagctgccgctcagtttgattttaagcttttcgctcttcccccagcttttggcattcccaatcttagtccttgttagtccacttgaacgtcacgactccgaaggacaatggacagcacgtgctggcatttgtttagcctttagcgtgcgttaaaatattattaaaaaccgtaagtgcttaatagcaggatcctggtccctgctgtaatggtcagtgcgtgattcgtgtgctcaaattaatgtgttcgcctggactgcgacgacgattaatggaggcgacggccttgcaattgctctcctaggacgaaggagcagggtgatgggatttgacagaggcaggacatacacccacaatcgagagtaagggacatcacattccactgccaatgcaaatgcaaatcgaattcgactccgagatgtcgaagttgcgtagtaaatgtcaaggaatttacacgggtcgtctcggagatagtgagcccgggggggtgtcagcttgagttggtgtgtgtgagtgtgcgtgcggccacaggacaccca

SEQ ID NO: 11210 - DNA, 837 bp, DROSOPHILA
atgctgggcaatctgtgccggcttgtgggtgcccgttccccgatcaccaggcgcttgctgcacacggagcggaaagttcgtgtgaatggctcagatttgaacattgtggagagcggcagtggggagcggagtctactcctgatgccgggagcactgggttcctcgtggaccgactttaggccccagatcgagcagctgccgaaactgctgccgggtcacaccatcatcgcctgggatccgccgggttatggcaaatcagtgccgccgcagcgcaagttcggccttgaattctttcgggaggatgcccaggcagccgtggatttgatgcgtgccctggacagaccacgcttctccattttgggctggagcgatgggggcatcacggcgctcatagtcgcaggtcgccatgcggaagctgtggatcgcctagcaatctggggagcaggtgcctacttgaacgctgacgaagtcaaggctcttaagaacattcgggatgtggccaagtggtcgccgcgcatgcgtgagcccatggaaaaggtttacggcgtcgaaagattcccccaattgtgggccgaatgggtggacgccgcatgcgccttctatgaccaacgggatggagacttctgtcgcaccgaagttgagaaaataaagatacctacttttatactccacggaaagaaggatcccatgatagcagcggagcacattccttggctgagggagcgtttgcctcatgcggaatattatgagttccccgaggggaagcataatatccatttacgttatgcggaggagtttaacaaactggtggccgatttctttaacaaaaataactag

SEQ ID NO: 11211 - protein, 278 aa, DROSOPHILA
MLGNLCRLVGARSPITRRLLHTERKVRVNGSDLNIVESGSGERSLLLMPGALGSSWTDFRPQIEQLPKLLPGHTIIAWDPPGYGKSVPPQRKFGLEFFREDAQAAVDLMRALDRPRFSILGWSDGGITALIVAGRHAEAVDRLAIWGAGAYLNADEVKALKNIRDVAKWSPRMREPMEKVYGVERFPQLWAEWVDAACAFYDQRDGDFCRTEVEKIKIPTFILHGKKDPMIAAEHIPWLRERLPHAEYYEFPEGKHNIHLRYAEEFNKLVADFFNKNN

SEQ ID NO: 11212 - DNA, 3347 bp, DROSOPHILA
acacacataattttgggctcattcgtgtatgtcctggcatccaaaaccaaacataaccagcagagggagcggagagtacaactccaagcataccccccatcagcagaatcagacccaaaccgatcctcactagccttctcgtcctgtattgtagtcgcacccggcgagcactggttccagggcaagctggagttcatgctgagccagcgaggcaagccgctgctggtccacgacgggcacaccttcggcattcagtacgtgcgcaaggacaagaagtactggcagtgcaacctgtcgcgcaagttcaactgcaaggcgcgcgtgaccaccacggacaccggcgacataatcgtgaccaacaacgagcactgccacacagagatacgtcagcacctgcgcaaggattaccagcggaacaaagtgatgatgaatgcactgattaacctaagtacgagtcacatgcggcgaaacaatatgggtgggctgggtgccttgcccatggtgcccgaggtcctgacccagggtacacccattcacgagatggtccaaaacttacatgacatggcagcaaaagtatcggcggggcagcaacatcatcatcaacaacaacaacagcagcgggcacatgacgtggaggagccactagactgcggactccgatcgtcggcggcgctggaggagatggcacgcagcttcatgaccaacaacaaaccctcaattgcctttccgggcagcgaatctggtcataaccagcatggtagcgataccaaagaggaaccgtcgtggaaggagaagatcgagggcgacgcttaggcttaaatttacataaatagcaggtcaaatgacagttaagtacaaaagtggaatgattgcaataatactcaaatacactaaagacggcgtaaccaaaacaattccaaagaatttagttaatacataataagctaacgtacaatctgctagagcatttccatgagttttatatcgtttttattattgtacgttgcattagctttacactgtaataaatgttgaatttgaataaatctttttatatgaactacattagatgtttatcacgcggctcaacttctggatgcggttgagcagcagatcgccctgcttgatggtcgcctggtactgccagttcttgttgtcaggccgattggtctccacaatgccgccaacgcgatccaccttggcatgcagccgtccggcggcgatgaagcgtgccagctcctggtcaatgtattccactgttacgccgaacgactcggccatatactgcagggtgagggagcgatacgactccagcaactgggtgtagcccagaatgcgcatctcgcgcacgtagtagcggtagtggggatgaatgaggtagtccaagcgcaattgcttctctacgccggccaggtgtacgtagaagttctcatattggcagttgtacaaggaaaacaggaactgtttcacgtcgggcaggccatggagcacctcctggatttcggagcccttgatcactttgtcgcgcagctcattgcgcggcagggcaatcatggccacgtaaacggtgtaacgcacgaaggtggggtagtccatcagttcgtatgaggtgaaggtgcttacggtgtccaggaagaacgtggccgccgccttgaagtcacgcaccgccaccgagtaaacaccctggtagaccttcaaccggttgcgtcggtcccaatcgccgccttcctcgatcagatacttggccttgtcgatgttgcgagtgatgagatcgtggtcaaggtaaaacagtcccaagcggatcagatggaacacgatgtccaggcggtgacccagggaaacggtcttctcgtaggtcttgcggaaggcagtctctgcggcagccttgtcgccgatgcggcacaagtactctgacttcttaagattcgcctcgcgcacttccatctcgcccagattcttctccgcatcctcgattgccgcatctagctgctccacctctacgcggttgttctccttcattcgcgccagcagatccttgtctacggtccagccgagttccgagcagatgtgctcgtaccacggggccatattctccgtgcgaatcgcctccagaagcttcgccttcaatgccgcatcctgcttgtattccgccagggtaagcaggaacttcgtctgggccagctccaggttcgggttcttctccagaccctgctcctccaagttttcggcaggcattttggtcggatttgttggcttcggttttttaaacacagaaaaatagttgattttcttgacaaaactcaattttgtttttgtcaaatcgcagagtcatgtactaccagtgtgaccccaaaattatcgataaattataccgcatatttttacattgccaaaaataccagagcgatgtccatcaagatagcgacgaaattagaacagtgcaattgccaattgggaatttgtattttaatttatttttaaattctgaaagtaatttaaatttaaaaaaaaaacttgagagctgtctagaaaagaactgatgtttcatgataactttgtcgaagaattaagaaatatttagttgtaaaataattgttgaatctatttttttccaataacacgacttatatattttttgaaaatattcgagctaaatcccaagaagtaaactcaatctgggatttgaagtgcccagaactcgaataaacacttctttttaaataattgtaagaccgtatcacttatggtatatactgacctcgaagggccacactaagggggagtgaaaattgattttctgataaaaattttcgcttgaagctacagcatcgtccactgtccatgtatatatcttatatttgcatataaatatatatattacaccgacttggactaaccatcagatagcgcacaagatgattggcggcctgttcgtctacaaccacaagggcgaggtgctgatctcgcgagtttaccgcgacgacatcggtcggaatgccgtggacgcctttcgggtcaacgtcatccacgcccgccagcaggtccgctcgccagtgaccaatattgcgaggaccagcttcttccacatcaaggtcggtgaacaaagttcctatgtcacaatcaccaaccctcccacttatcatcaaaactcctttcacagagagcaaacatttggctggcggctgtgaccaagcagaatgtgaacgccgcgatggtgtttgagttccttttgaagatcatcgaggtgatgcaatcctacttcggcaagatctcggaggagaacatcaagaataacttcgtgctcatctacgagctgctggatgagatcctcgactttggctacccgc

SEQ ID NO: 11213 - DNA, 1347 bp, DROSOPHILA
tcacactggtagtacatgactctgcgatttgacaaaaacaaaattgagttttgtcaagaaaatcaactatttttctgtgtttaaaaaaccgaagccaacaaatccgaccaaaatgcctgccgaaaacttggaggagcagggtctggagaagaacccgaacctggagctggcccagacgaagttcctgcttaccctggcggaatacaagcaggatgcggcattgaaggcgaagcttctggaggcgattcgcacggagaatatggccccgtggtacgagcacatctgctcggaactcggctggaccgtagacaaggatctgctggcgcgaatgaaggagaacaaccgcgtagaggtggagcagctagatgcggcaatcgaggatgcggagaagaatctgggcgagatggaagtgcgcgaggcgaatcttaagaagtcagagtacttgtgccgcatcggcgacaaggctgccgcagagactgccttccgcaagacctacgagaagaccgtttccctgggtcaccgcctggacatcgtgttccatctgatccgcttgggactgttttaccttgaccacgatctcatcactcgcaacatcgacaaggccaagtatctgatcgaggaaggcggcgattgggaccgacgcaaccggttgaaggtctaccagggtgtttactcggtggcggtgcgtgacttcaaggcggcggccacgttcttcctggacaccgtaagcaccttcacctcatacgaactgatggactaccccaccttcgtgcgttacaccgtttacgtggccatgattgccctgccgcgcaatgagctgcgcgacaaagtgatcaagggctccgaaatccaggaggtgctccatggcctgcccgacgtgaaacagttcctgttttccttgtacaactgccaatatgagaacttctacgtacacctggccggcgtagagaagcaattgcgcttggactacctcattcatccccactaccgctactacgtgcgcgagatgcgcattctgggctacacccagttgctggagtcgtatcgctccctcaccctgcagtatatggccgagtcgttcggcgtaacagtggaatacattgaccaggagctggcacgcttcatcgccgccggacggctgcatgccaaggtggatcgcgttggcggcattgtggagaccaatcggcctgacaacaagaactggcagtaccaggcgaccatcaagcagggcgatctgctgctcaaccgcatccagaagttgagccgcgtgataaacatctaatgtagttcatataaaaagatttattcaaattcaacatttattacagtgtaaagctaatgcaacgt

SEQ ID NO: 11214 - protein, 389 aa, DROSOPHILA
MPAENLEEQGLEKNPNLELAQTKFLLTLAEYKQDAALKAKLLEAIRTENMAPWYEHICSELGWTVDKDLLARMKENNRVEVEQLDAAIEDAEKNLGEMEVREANLKKSEYLCRIGDKAAAETAFRKTYEKTVSLGHRLDIVFHLIRLGLFYLDHDLITRNIDKAKYLIEEGGDWDRRNRLKVYQGVYSVAVRDFKAAATFFLDTVSTFTSYELMDYPTFVRYTVYVAMIALPRNELRDKVIKGSEIQEVLHGLPDVKQFLFSLYNCQYENFYVHLAGVEKQLRLDYLIHPHYRYYVREMRILGYTQLLESYRSLTLQYMAESFGVTVEYIDQELARFIAAGRLHAKVDRVGGIVETNRPDNKNWQYQATIKQGDLLLNRIQKLSRVINI

SEQ ID NO: 11215 - DNA, 4431 bp, DROSOPHILA
tattccaatggtctggcggtcgagggtgtgcataagaagatcaatctagcagacaccaaactggcctgggagcacgagcggttcagcataaagcgctatccctcgttcactctatcgtctgtaaagagtccaagaagccccattcgtacaaccattttcaaaaacgacgagagtcgtctagtggagcacactcttaacacgacgcgaattattgcggaagctctggctagttttatgtacaaagtggatccaacctccagcatttttgagggacagttggtaagtttgcaatgcttggcacttagcaagatattaacttatacttcatctttaattttattaggccattaaggaggaaaacatcttgccatactttggagttaaatccatactgcataataacgacgtgaaggatgctttcgaaaaatatcttaacaatgttaagatcatttacgataaacccgacgccagagacccagaatttatgttctataacgagaacgaggttaaactgaatgtttacagagtgaagccggcgatctttgatctcttcctgactttcgtcattggcgcctatctattggctgtattcctggccatacaatacttcccccggttttacgatgaagtttccaagctaacgaaggaggatcccgcgggtcaatccaatggacactcttctgaacgagtcagaatgaagtcacattagtaacaaaatggtattgagtataatattgcgattgcgagtagggaaacttatgttcaaaattatttttcaaaacttttctaatgctaattgaacgattgttaataaactctatagaactgtagaaatctgtccacgtccatgtccatgtggctatcgaaattgactccttttgttttaaatgaaaatggctccgattatcataagtacattttttgttttattgcgtataaatttggtttatgtttaatataaatattatttgtgtacagcgtaattaattgcactcattaattagcacgagccgttgttgaagttagaactagctgagttatgcgctcgacttggcttcggtagtgggttccaatccaagttcgatgaagtgggcgacgactccctgaattggcccttaaacttgcttatcttgcttatgaacaaattactttggcctggtagttcattggtatccgatgtgctaactgatatgttggcggatgtcacttccttggacgatctattattaacgttatttaactcattgggatagttgtatttgttctcagcatatgagggcgttaaataaacctttgtgcccttcgctgcgctttcgtttagaatcttctgattcctacttatggactctagcacttccttgatggacttcttcttcctcatcctcggcgtgggcgtggaattcgattcccgttccgccgatagggaagatctatagcgatcgtttgtgggtctctcctcatatcttaatcttacattattttccagctcaaactcttctcgtatttgtagaacgtcgctggtttcagatgggttcggctgaattacattggaaaccacatggttctccgttttctttgatattgcaccatttgcattgagcacttcttttttgggcacttgactggaagcactggaactagtaatgttctcttcgaaaatctgagaaatctgtttgaccgtgccaaatgaattggttttccgctcttccacataggtgttatcatctggctcgggatgtgtccttaaagttgcggactccacgggtagttgaccaggttcgttggcaatggactgctgtttttccaatgtagaggcgccactaccttcttcggaatctaccaagacgaccgattgcttgacaacctcagcatatatcggaagttctgccggctttgaagtttccttaacaactaagtgctcttctgtgatagccacaggtatggtaccatttggctttttgttgacttggtttacatcgttatttggtttctgttcggagcagacggttatgtgttcggaagactgctttatgtgaatgctagcgttgcactcgggagtactggaagtgcagggattaggctggccagcagtattagatgtgctgcgtacttttcgaatctgaataggtgtgctgggtgtttcaggtctatggatctgctttacgtgaatggtgccattacattccggtttgggggaggtgcaggtattagtagtgttatcggattcggagatagtgaccttttccttatcaatgaccgtgctgtatccattggattgcttgacactgatggtttgtggtgctttcgaagtgctggggttgggttcgctatcgcagatgggtgcagtaatcaaaattgttggttcatttgatttggggacatcgtctacaacttcttgttttattaaagattcttttcggttgttaacaaacgcgtcaatttcagaggcaagagactcaatgtctctggtagctaggtaatcttggacctataaatatgttattcaatttatttgaaccttgtgaaaatgaattggatttaccacaagttttggcggcggcggagctctcctcttcttgcgatatcttctgctgctcatgggggaactaggacacgattccggctgagactcgaagggattagagctggctagactagattgtgataaccttaaatggcaacaagtacaattaccatcatattcgagtttataagttgcgtatatctgtaccttatgctctgattatttgccgagggatatccggaaaactgagttgtgcttctgtagcgatcattacggttgaagaaagtgccatttgaggacaatgagtccgactaagtgaatgaaatagttaataaatagttataatgttaaatacttgtagatttgtgtaatcacctcccgtcgcctatcaatatcttgcagggatgtgtgtcggtctccgcgaaaaactctggagttcaaataggaactgcatatgtgggtgttaataaaaatcttgccaaaattagcaaattaatttacatacttatcgtttagatcgcgtctaagagtgggcgggctctccgatgttttgtttatgcctaatgttgaagacttcttcttacgaaaagaatacgatttcctgaaaaaaagacacaaaatttaaattgaagataaagagcaatgatctaaaactctgacacaaaatggtgcattagccaagttatttatacattttagggatctcgaggtactaaataaactaaagaactcaccacaattcttgcaggtttccaattgacagactatgtctgccattctcgttcttctttttgctgaacccaaaaaatcgaaggcgtttgtgattatcatcttcgtagaatggattcagatgctccggatagttgtatatggatatgtgactagtgttcctcttgttccaactcattgtgaactagtgtttatgcccgccgttagtgaatctgattaaaacaaaaaaacaatacattaagcaaatagttatatatttcaaaaccattctatgagcgcactttgctgtcgatgaggttatatatatatatatatattgtaaatttctatatacgagagcattcaaaagcttatccctagttgtatttcgaataccatatacccctgatctttgtaatgttcgagtataaatataatcaccagcatgacgacataactatttattgatgggtgcagtacgtttctacacacaaacccggtttttgtggccttcaaaattggttatatgaactataaagtatatgtatattgtcaatcaatcgtatattatatacaaaattattaaggaattagcactactgcaaaaatcaagcgattcgtgcaagaaactaatttttagacacaccttaaccaaaattcgactaaccttaccctagagttctgctggttatcatgttttttatcagcaaactgagtacaacaattataattatgcaattaccgttgactttctttcgatttccagaggcaaattaattgtcaacgttgctaactgattaagcaggtgacgaatcacagggcttatactaagttactttcgaaaaaaaaaaaaacaaaaacaacattaaaacaatactaaatgtttatatgtatgtatatattttgaaatgtgcttttgtttatacgaaagttttttgaggatacatgaatatgtacatacacatatgatgagtacacttatagcacgtatctgtgaatatacgaattcacgggtttttgtttggaaaatatcattttaattagagtaaaatattctttcatgagcatagaaactgactgaatacacttcggaataaagaagactattgaaattacataaagtgctagatttttagattttatttgatgcatattgcacttattttgtatctataaggtttctgaacataatattctat

SEQ ID NO: 11216 - DNA, 1884 bp, DROSOPHILA
atgagttggaacaagaggaacactagtcacatatccatatacaactatccggagcatctgaatccattctacgaagatgataatcacaaacgccttcgattttttgggttcagcaaaaagaagaacgagaatggcagacatagtctgtcaattggaaacctgcaagaattgtggaaatcgtattcttttcgtaagaagaagtcttcaacattaggcataaacaaaacatcggagagcccgcccactcttagacgcgatctaaacgataagttatcacaatctagtctagccagctctaatcccttcgagtctcagccggaatcgtgtcctagttcccccatgagcagcagaagatatcgcaagaagaggagagctccgccgccgccaaaacttgtggtccaagattacctagctaccagagacattgagtctcttgcctctgaaattgacgcgtttgttaacaaccgaaaagaatctttaataaaacaagaagttgtagacgatgtccccaaatcaaatgaaccaacaattttgattactgcacccatctgcgatagcgaacccaaccccagcacttcgaaagcaccacaaaccatcagtgtcaagcaatccaatggatacagcacggtcattgataaggaaaaggtcactatctccgaatccgataacactactaatacctgcacctcccccaaaccggaatgtaatggcaccattcacgtaaagcagatccatagacctgaaacacccagcacacctattcagattcgaaaagtacgcagcacatctaatactgctggccagcctaatccctgcacttccagtactcccgagtgcaacgctagcattcacataaagcagtcttccgaacacataaccgtctgctccgaacagaaaccaaataacgatgtaaaccaagtcaacaaaaagccaaatggtaccatacctgtggctatcacagaagagcacttagttgttaaggaaacttcaaagccggcagaacttccgatatatgctgaggttgtcaagcaatcggtcgtcttggtagattccgaagaaggtagtggcgcctctacattggaaaaacagcagtccattgccaacgaacctggtcaactacccgtggagtccgcaactttaaggacacatcccgagccagatgataacacctatgtggaagagcggaaaaccaattcatttggcacggtcaaacagatttctcagattttcgaagagaacattactagttccagtgcttccagtcaagtgcccaaaaaagaagtgctcaatgcaaatggtgcaatatcaaagaaaacggagaaccatgtggtttccaatgtaattcagccgaacccatctgaaaccagcgacgttctacaaatacgagaagagtttgagctggaaaataatgtaagattaagatatgaggagagacccacaaacgatcgctatagatcttccctatcggcggaacgggaatcgaattccacgcccacgccgaggatgaggaagaagaagtccatcaaggaagtgctagagtccataagtaggaatcagaagattctaaacgaaagcgcagcgaagggcacaaaggtttatttaacgccctcatatgctgagaacaaatacaactatcccaatgagttaaataacgttaataatagatcgtccaaggaagtgacatccgccaacatatcagttagcacatcggataccaatgaactaccaggccaaagtaatttgttcataagcaagataagcaagtttaagggccaattcagggagtcgtcgcccacttcatcgaacttggattggaacccactaccgaagccaagtcgagcgcataactcagctagttctaacttcaacaacggctcgtgctaa

SEQ ID NO: 11217 - protein, 627 aa, DROSOPHILA
MSWNKRNTSHISIYNYPEHLNPFYEDDNHKRLRFFGFSKKKNENGRHSLSIGNLQELWKSYSFRKKKSSTLGINKTSESPPTLRRDLNDKLSQSSLASSNPFESQPESCPSSPMSSRRYRKKRRAPPPPKLVVQDYLATRDIESLASEIDAFVNNRKESLIKQEVVDDVPKSNEPTILITAPICDSEPNPSTSKAPQTISVKQSNGYSTVIDKEKVTISESDNTTNTCTSPKPECNGTIHVKQIHRPETPSTPIQIRKVRSTSNTAGQPNPCTSSTPECNASIHIKQSSEHITVCSEQKPNNDVNQVNKKPNGTIPVAITEEHLVVKETSKPAELPIYAEVVKQSVVLVDSEEGSGASTLEKQQSIANEPGQLPVESATLRTHPEPDDNTYVEERKTNSFGTVKQISQIFEENITSSSASSQVPKKEVLNANGAISKKTENHVVSNVIQPNPSETSDVLQIREEFELENNVRLRYEERPTNDRYRSSLSAERESNSTPTPRMRKKKSIKEVLESISRNQKILNESAAKGTKVYLTPSYAENKYNYPNELNNVNNRSSKEVTSANISVSTSDTNELPGQSNLFISKISKFKGQFRESSPTSSNLDWNPLPKPSRAHNSASSNFNNGSC

SEQ ID NO: 11218 - DNA, 3792 bp, DROSOPHILA
aggacgaagccatggatctaaatgagtcagcttctgatcaagaggtacctaagcgtaaaaagatttcgaaaactgaggccgtgattgaaccagtcgctaaggatgtctccatggccgagccaaatgagtcgttacattctaaaaaggaaacttcaccagctagtttgagtaagcaggaaagcaaaaggaagcaaaaaaggagcttaaggagaccatctagtgattctgatagcactaagacaacgaacgaattcgagaagcaacgtcagattatagaaaaccagaaggcacagctggaaaaaatgggtaagaagatcagcgttatgcggcagggtcaggatcgtcgggttagctacaagggtcataacccctacagcgctgacccggatctggagtctaggccaccgatggacaccagcttcgaaaaggacagaacgggggattaccagggactgggccatcagcgtcgcaaagtagtcgtggcgccgccctttcatccgcctatcaatccacgagtacgcgtgccgcgaccacctttcgatggacgggatcatgagttccatacgatgactaccgcgccagtggacagacaccttgctccggcagctaagtggtcgtctttgcccacgactctgaagctgaatcgcaactccctggttgccaacatacaggtcaagcactttgccgctctgccctgtcaggcgttgccgaaacccatattaaagttgccgatgggagtgccacgcacgcccacgttttcaaagatcctctgcgccttgcagttgggattgctggcctcctacctcgcttgcaggaaggactaagtcctagattagtagctcggcttttcgattcccccaatagcagcatgatcagcatcagcatcagaagcatgatatagaatactttacttttttaaaaaataaatggtgttagattcaatctaaataaagggtgttcgaattcatttacatagagggtgttagatttaatctaatggctatagccatatcagttcttggagatgctcctgctgcagcggcactatatgttgacggtgaaatatcagtcgattctcctgcgattgtagtggccggaaattctttagcaacggccgaccgcgctcatctcggaggttccagaatttgggcagatcctggtgcgaaatgggaaggacctcaccgaacacgtgccactgaaccaccggtgagcatggtggcgtcgttagggagcccttgtacgtgtaaaagtttcccctgtcaagagatcccagcaaggatcccagggtgagccgttcctgcacagtgtagctggcattaaagttgcccaaatggaggagggaactaaagatttcactgagtccgggctgataaaagaatggccccgactaaaaagtgaattggtaaatcggtaagtagagcggtaaagttaagcaaatcccgcatctctacttactcgaacaaccttaaagagcaccgccagtactgtaacgccatcgctgtacttaacagcctcctccaagtttaaatactttgtgttccgatggactatgtgcatttccagatcaaagcggcgtccattgagcaggtgctccgagcccttgctctcgggggatccccaatggaaatgcacggcctcggcatcgtagcagtcccgcaagagacctcctgttacgtagggcttcacgccatagatcgtcgtcggaaccttaaattccactatcaacggaaatggattagttttccctttcacttggaagtccgtcttataaaaacctgtgtgtccactattcctaattgtcaccagctcatcgaagaactcatcataaagtgcgaaaatcagaggcggcaagttaaggggtatcgccttgcgtctgctaatcgcaatgggcgactgttctgatccaccacaatttgggtatttttccggccacctctccggggatttgtagtcgaaatcagtcgatctgaaatctgtaacaaagttatataagtctttacaattcccacacattcttgatttatcttgggcgagcttctccatatttgacgaaatacccaagagcatccaccaccaatggacgtggtcactttgcaaaaccattaggaaggccgttggagcaatttctgcacttgccaatttcccaaaacgtcttcgcaatttcagctatttcgcagagcctacggattatgtctaagcgtagcataattgcttgattttgggtccggaccatggaaacctccttttgtttacattgttccgagcgatggatcgcacacgccgctcttataacaatggatggtacttcgacatctactccgcccccgaaattgacgcgctcattgggtttcatggggcatttgtggatgcaaatttaattattgttattatttacagccaccgggttgtttgctatccattagatgaaccgcgatgagacagctatatgggcgtcgagtgtgacatatgagggttcggttcggttcggttcggattggtttagttcggttcagccggaggggatggctcataaattcccgtacgggcaaaggctacgcaataggtgaataggttggttccgggtcgaaaaatctcaagatctggggcacgttgtctggggacgacgatcagtctgctatcgatggcgtctcaataccaaggtgatccacagttgtatcgtatttcgttggatgcgacacacctcactggcttgcatttcggtactcacttgcggcgaacggcagcagaaacagaagacgctgatagaagtcatcaagagccggaagatgcattttccacctgatcactcgctatacactactacaggctataggagttgtcttcgccaatctagtccaaatacgctccacacagtaacccctgaccgaagaccgaagatttccaagcgcgcgtagctctgcagactgaaccacgatcggcttaggccaaaacctttataccaaagggccacagtctgggctttggtttggcttccgtctccgtctcgtggactgggagagccacattgtcaaacgctccacggagcagcaatagatggtaatctcgactcgaagttgtcatacccgctacgcgtactgctgtctgagcaccgttaccccgaaattaaaaactataattgaaaaacttggttcgatggggacaaatgcagattacacaaattgaagttgaaattccttggcataacttaacccgtctatggtataatatctaggttctgcaagttccatttataaggcgttttatttatataacggagaaaggaaaagtttattcatatatttaggttccaaataaagtacttcatactttaacattgtttaataacttaatattgcgtatataggtaagtttggacatatttgaaagtttaaaataccctgcatcttttttggttacaatattttaaaatatttcaaatgtttttttttttattaaaacgcaagtaaatcgtgtttgctttgatctctgcttatgacatcctcttgtaagtcagatacgcggctctttggttggttcttgaattacatgttaattttgtaagcctggcttagaaaggtaagcagactgcagactcttgagatccagtttctcagttttcgtcagttgcagctgcagaattgaaaaagtttttattatctaaaagacataccgcacaataaaaaaaaatatagaacatggctcgtacatacgtttatgttttacttatacaatgcgaacttgaaacagctttcaggtgagtttatttaataaatcagctaaatttaaaaacga

SEQ ID NO: 11219 - DNA, 969 bp, DROSOPHILA
atgcatcttccggctcttgatgacttctatcagcgtcttctgtttctgctgccgttcgccgcaaatttcagatcgactgatttcgactacaaatccccggagaggtggccggaaaaatacccaaattgtggtggatcagaacagtcgcccattgcgattagcagacgcaaggcgataccccttaacttgccgcctctgattttcgcactttatgatgagttcttcgatgagctggtgacaattaggaatagtggacacacaggtttttataagacggacttccaagtgaaagggaaaactaatccatttccgttgatagtggaatttaaggttccgacgacgatctatggcgtgaagccctacgtaacaggaggtctcttgcgggactgctacgatgccgaggccgtgcatttccattggggatcccccgagagcaagggctcggagcacctgctcaatggacgccgctttgatctggaaatgcacatagtccatcggaacacaaagtatttaaacttggaggaggctgttaagtacagcgatggcgttacagtactggcggtgctctttaaggttgttcgatcggggccattcttttatcagcccggactcagtgaaatctttagttccctcctccatttgggcaactttaatgccagctacactgtgcaggaacggctcaccctgggatccttgctgggatctcttgacaggggaaacttttacacgtacaagggctccctaacgacgccaccatgctcaccggtggttcagtggcacgtgttcggtgaggtccttcccatttcgcaccaggatctgcccaaattctggaacctccgagatgagcgcggtcggccgttgctaaagaatttccggccactacaatcgcaggagaatcgactgatatttcaccgtcaacatatagtgccgctgcagcaggagcatctccaagaactgatatggctatag

SEQ ID NO: 11220 - protein, 322 aa, DROSOPHILA
MHLPALDDFYQRLLFLLPFAANFRSTDFDYKSPERWPEKYPNCGGSEQSPIAISRRKAIPLNLPPLIFALYDEFFDELVTIRNSGHTGFYKTDFQVKGKTNPFPLIVEFKVPTTIYGVKPYVTGGLLRDCYDAEAVHFHWGSPESKGSEHLLNGRRFDLEMHIVHRNTKYLNLEEAVKYSDGVTVLAVLFKVVRSGPFFYQPGLSEIFSSLLHLGNFNASYTVQERLTLGSLLGSLDRGNFYTYKGSLTTPPCSPVVQWHVFGEVLPISHQDLPKFWNLRDERGRPLLKNFRPLQSQENRLIFHRQHIVPLQQEHLQELIWL

SEQ ID NO: 11221 - DNA, 2940 bp, DROSOPHILA
agagagctgggaaagattcaacatttaaattgattacaagcttactgcccggaatgcttaccagggcgagtcccaggccatttctgccccagttaacctgcgacaggaaactcttcagagcatcggccaccggggagaccaggttggcgttgggaaagatctccacactgcaggcggggcactggtgaccccgaggggctgtgttggcaggcagtgcggcttggcgggcgttcaggcagtcccagtggaaaacatctggaaatggcaggattatgggtaagtgtgtggtgtctggattagctcaaaactggcagatccctacggtagcagacgaggcgcacgcaatcgccctgctccaatgtggtgccgcacagagtgcagttggagatgtagtcgctgtcccgcagccactgcagatacgactgcacaatgcactgaaaaagagtggatatggtgtattccaagcatccataaaactagaggacaggaatccttacctttggatgagactgaaccatacagtgttcgcaaacattgactcgatgctcaaagcaaaactggttggtcaccaggcgcttggggcacttgcacaaacccatttccttaaattcggggttcctaaggcggcggaggaattgcacttggcggccttgggacagctatcgcataataacgcctcaataaaattaaattttatttcgtttcgcagcttttgtcggaattttcgagttttcattcacatattcaacagccacgtatctgttcatgcgttccgggcgattggcaaccagctgacatattctgcgaatatcgtagcgatgaatgatgaaatacgatatgtgtttgcgatttaaaaaatcggtttcaaattttccttttttttatggtaaccataacatttaagagttaataatgtttgtgctacaaaaagcttaataaacaataagttcaatttgtaatacttaatataaaataaaatccagagttttcgagctaatccctaatccaaccaatctcgcatatattcacaagttatagcagttacatcgccacaattggagcagtttttgatgacgggacaaatgccacatggcatctggaccagaccagtcggaggaagtggggcgttcaccgcccggtagacgaaggatccatcctgctggcgcactcgctccgcattgccgtcgtacaccactgttttgagaattgtttccagatcggcctccgccagattaaccttgctgatgcccaagtccgagatgaacttctgaacctcgttcaccgtgcagcaagacatctgcttgaaggccagtggcccctcgcgcttcttttccgcactgtcgcgtttcatttgcagaaagcgcaggcactgctggttgagcacatccacaaactccacctcaaagtcctgatcctggtaccaggctcctcccgtaatggagagatccggctctaggttgtacagcatgtacactttctttttgctggcctgcgcgaagaaaatttggaatcacattgaacttggaatatgggatcatagaacctacgttcaccgacttgaccgccttgatgagcttcttggtttctaggttcttgaggatcttgttgagctgtatcatgttcaggttggacttcatacgtatatccctaatccagatgcctttgttgccgccctcctcaacaatgccgtagacgaccttctcctcattgtccgcatccttgggcagggcactcttcttttccgggtccttggcacggtacaccagcttttcacccttcttcaggatctcgatcccgccctcctgcagcagtatattcaaagcttccacccgcgtggccgccggcacatcgggcagcgccttggtcaggtcatcgttggtggcaccggctgggatgccctggaccaccgccagcaaaagttgcgacacctcagtggccatttttctattctcgaaaatttgttatttaaaattcaattaaatcgagaaaaacaacacgcttaccgtgaaaagcaaaacaaaaacaaacggttccgggcgaatggctaccgctgctaagaagaagctaaaaaataacaaaaatcacaaaccaattttaaaaatataagtttgttctattaaaaataatactttacgcaactgaataaatgaggataaataaggagcatatgttttaggctttattacaaattgctttaaataaaatttaaagctttccgaagaccccaaatgttatatcgtgaatctggtatgtatataccaaatggtatttattttaaaaacgagtggcttttttaggctcattggtgccaactgttttttcgaacagatcgccggacgcactgtttctgattggagtgttcgctgcctgtgcatttaaattgaattaaaataattccaaaacaggaagagcaaatacatctttccgcgagttcacctttactgtcaaaaacaggtaattatcagatcttcttgatacgacctcaagctaaacatcattccattataatacgctagaaattttgctaacgaaattggcgggggcaagacatttgtttttgctgttgttgatgatgcaagcaatttctccacattatgtagaattgcgtttgccgcctcacaaaacacatacacacaagcacggctgcgaattcaattcgcacacccatacaatctcaaaagaacctcgttagcgaaatgtgtaaaggtgaaatagaagtcattccatgcggagcgcgccacaagtaaaataacctacaccatcgcaatcacaccctattaaacatgccatcggaaataatgcagcaataataatcttgaaccgctgtaaacttccactatcgcaattgtttaattgctctgtgacgacgacgctttcagcgatgatgagtaattttgcataaatttgctctgtgccggattgtctgaattatatttgaaa

SEQ ID NO: 11222 - DNA, 882 bp, DROSOPHILA
atggccactgaggtgtcgcaacttttgctggcggtggtccagggcatcccagccggtgccaccaacgatgacctgaccaaggcgctgcccgatgtgccggcggccacgcgggtggaagctttgaatatactgctgcaggagggcgggatcgagatcctgaagaagggtgaaaagctggtgtaccgtgccaaggacccggaaaagaagagtgccctgcccaaggatgcggacaatgaggagaaggtcgtctacggcattgttgaggagggcggcaacaaaggcatctggattagggatatacgtatgaagtccaacctgaacatgatacagctcaacaagatcctcaagaacctagaaaccaagaagctcatcaaggcggtcaagtcggtgaacgccagcaaaaagaaagtgtacatgctgtacaacctagagccggatctctccattacgggaggagcctggtaccaggatcaggactttgaggtggagtttgtggatgtgctcaaccagcagtgcctgcgctttctgcaaatgaaacgcgacagtgcggaaaagaagcgcgaggggccactggccttcaagcagatgtcttgctgcacggtgaacgaggttcagaagttcatctcggacttgggcatcagcaaggttaatctggcggaggccgatctggaaacaattctcaaaacagtggtgtacgacggcaatgcggagcgagtgcgccagcaggatggatccttcgtctaccgggcggtgaacgccccacttcctccgactggtctggtccagatgccatgtggcatttgtcccgtcatcaaaaactgctccaattgtggcgatgtaactgctataacttgtgaatatatgcgagattggttggattag

SEQ ID NO: 11223 - protein, 293 aa, DROSOPHILA
MATEVSQLLLAVVQGIPAGATNDDLTKALPDVPAATRVEALNILLQEGGIEILKKGEKLVYRAKDPEKKSALPKDADNEEKVVYGIVEEGGNKGIWIRDIRMKSNLNMIQLNKILKNLETKKLIKAVKSVNASKKKVYMLYNLEPDLSITGGAWYQDQDFEVEFVDVLNQQCLRFLQMKRDSAEKKREGPLAFKQMSCCTVNEVQKFISDLGISKVNLAEADLETILKTVVYDGNAERVRQQDGSFVYRAVNAPLPPTGLVQMPCGICPVIKNCSNCGDVTAITCEYMRDWLD

SEQ ID NO: 11224 - DNA, 3405 bp, DROSOPHILA
tcaacgattgttgatccgcgggtgcgccttgtgccgtcaaagaagctgcttgactttctggacgcccaaaagaagcacttaaaggagttgcccgaaaatgtggccaagattatgaagcaaagaggccacacactgcccacctctattaggattatcaaggatgcgggcttggagtacaaacgaccaaaactcaattacgagctgttgacaaaactaactgaaaacctagccgacaaaccagaagaacctgctaaggataaatcggaaccagattcaggggtcaaggatagtgatgacgcaaagtcaacaagggaggttaaacatttcctatacttaaccgacctgcactggctctcaaaaacactggctgaactgcgtcgtcaggatcactgccaagtctttctgcatcagctaattgagtcctgtgatctgctcctgcccgaaaacgaaatgaagccgcgcaatcctgagctagaagcgcgctgccaacgtcttcgcgcagagcaacaaaatcgggattacctcaaaatgaccaagaatgtggatgccggcttaaaacactatccagaggacactatcagctatcagagtaagtgaatacgcccagcttgttagatccgcccttttaaaacctttttcttcttcccttccctttcagttaagagccttaacaagcaaatcattgccgtggtgcagttcatcttctccgtggccgctggctttacgttcggctttttcggcgtcaatttgatggtgggcccgctgcctttcggctttcgcatcttgctgggcgtgattgtagcgctcatcatagccctggctgagatgtacttcctggccaagaagctgcacgagtacgatgaggtcttggacgcgcccaaacgtaagccgcagccatcgacgccggctaagcgcaccccgcccgccgagggaagtcaagtccagacattgaaaccccatgttgactagatagatgatctgcgagtaaaaatcgttctttgtcgttgtattatttcgctttgcaatgttaggttatataaatagctgtaaaagttttattctttcggaatcggggacttggatatcgattatatgctacgtatgcttatttcgaccgtgaatgcacaccctattcgtagtggttcggctgtggattggggttattccagccctcgtccacggcatcagatcctccgcgacccagccaggccataagatagacgaacaagacaaaggccaaaatgccggcggtcaccaggaaccaagtgcgacgccacggcggccgcgaggagggcgcatagaagcggcgtgtccatcgcgagaacaattccgcaggagtgcggcgctggtacttattatcgtctcgatctgtcccaccaattggcgactgacggggcagcagcggtcttctgctgctggctgcaggtgcgtaagattataattataatatgactcaaagtgtatgctagattatgcgcaccgtagtcgcccgcacttgggggattaaatgcatccattaggagcacggaatgtgggctcacggcgtcatggccattgggcttcgtgcgctctcgctcgccaccggaatggatgtggtgcactttggtcatgttgctgacagccgcctggcttgccaccttgggcttaatggccttcagactgctgctctgctcctcagagagctgggaaagattcaacatttaaattgattacaagcttactgcccggaatgcttaccagggcgagtcccaggccatttctgccccagttaacctgcgacaggaaactcttcagagcatcggccaccggggagaccaggttggcgttgggaaagatctccacactgcaggcggggcactggtgaccccgaggggctgtgttggcaggcagtgcggcttggcgggcgttcaggcagtcccagtggaaaacatctggaaatggcaggattatgggtaagtgtgtggtgtctggattagctcaaaactggcagatccctacggtagcagacgaggcgcacgcaatcgccctgctccaatgtggtgccgcacagagtgcagttggagatgtagtcgctgtcccgcagccactgcagatacgactgcacaatgcactgaaaaagagtggatatggtgtattccaagcatccataaaactagaggacaggaatccttacctttggatgagactgaaccatacagtgttcgcaaacattgactcgatgctcaaagcaaaactggttggtcaccaggcgcttggggcacttgcacaaacccatttccttaaattcggggttcctaaggcggcggaggaattgcacttggcggccttgggacagctatcgcataataacgcctcaataaaattaaattttatttcgtttcgcagcttttgtcggaattttcgagttttcattcacatattcaacagccacgtatctgttcatgcgttccgggcgattggcaaccagctgacatattctgcgaatatcgtagcgatgaatgatgaaatacgatatgtgtttgcgatttaaaaaatcggtttcaaattttccttttttttatggtaaccataacatttaagagttaataatgtttgtgctacaaaaagcttaataaacaataagttcaatttgtaatacttaatataaaataaaatccagagttttcgagctaatccctaatccaaccaatctcgcatatattcacaagttatagcagttacatcgccacaattggagcagtttttgatgacgggacaaatgccacatggcatctggaccagaccagtcggaggaagtggggcgttcaccgcccggtagacgaaggatccatcctgctggcgcactcgctccgcattgccgtcgtacaccactgttttgagaattgtttccagatcggcctccgccagattaaccttgctgatgcccaagtccgagatgaacttctgaacctcgttcaccgtgcagcaagacatctgcttgaaggccagtggcccctcgcgcttcttttccgcactgtcgcgtttcatttgcagaaagcgcaggcactgctggttgagcacatccacaaactccacctcaaagtcctgatcctggtaccaggctcctcccgtaatggagagatccggctctaggttgtacagcatgtacactttctttttgctggcctgcgcgaagaaaatttggaatcacattgaacttggaatatgggatcatagaacctacgttcaccgacttgaccgccttgatgagcttcttggtttctaggttcttgaggatcttgttgagctgtatcatgttcaggttggacttcatacgtatatccctaatccagatgcctttgttgccgccctcctcaacaatgccgtagacgaccttctcctcattgtccgcatccttgggcaggg

SEQ ID NO: 11225 - DNA, 1159 bp, DROSOPHILA
ctcgaaaattccgacaaaagctgcgaaacgaaataaaatttaattttattgaggcgttattatgcgatagctgtcccaaggccgccaagtgcaattcctccgccgccttaggaaccccgaatttaaggaaatgggtttgtgcaagtgccccaagcgcctggtgaccaaccagttttgctttgagcatcgagtcaatgtttgcgaacactgtatggttcagtctcatccaaagtgcattgtgcagtcgtatctgcagtggctgcgggacagcgactacatctccaactgcactctgtgcggcaccacattggagcagggcgattgcgtgcgcctcgtctgctaccatgttttccactgggactgcctgaacgcccgccaagccgcactgcctgccaacacagcccctcggggtcaccagtgccccgcctgcagtgtggagatctttcccaacgccaacctggtctccccggtggccgatgctctgaagagtttcctgtcgcaggttaactggggcagaaatggcctgggactcgccctgctctctgaggagcagagcagcagtctgaaggccattaagcccaaggtggcaagccaggcggctgtcagcaacatgaccaaagtgcaccacatccattccggtggcgagcgagagcgcacgaagcccaatggccatgacgccgtgagcccacattccgtgctcctaatggatgcatttaatcccccaagtgcgggcgactacgccagcagcagaagaccgctgctgccccgtcagtcgccaattggtgggacagatcgagacgataataagtaccagcgccgcactcctgcggaattgttctcgcgatggacacgccgcttctatgcgccctcctcgcggccgccgtggcgtcgcacttggttcctggtgaccgccggcattttggcctttgtcttgttcgtctatcttatggcctggctgggtcgcggaggatctgatgccgtggacgagggctggaataaccccaatccacagccgaaccactacgaatagggtgtgcattcacggtcgaaataagcatacgtagcatataatcgatatccaagtccccgattccgaaagaataaaacttttacagctatttatataacctaacattgcaaagcgaaataatacaacgac

SEQ ID NO: 11226 - protein, 299 aa, DROSOPHILA
MGLCKCPKRLVTNQFCFEHRVNVCEHCMVQSHPKCIVQSYLQWLRDSDYISNCTLCGTTLEQGDCVRLVCYHVFHWDCLNARQAALPANTAPRGHQCPACSVEIFPNANLVSPVADALKSFLSQVNWGRNGLGLALLSEEQSSSLKAIKPKVASQAAVSNMTKVHHIHSGGERERTKPNGHDAVSPHSVLLMDAFNPPSAGDYASSRRPLLPRQSPIGGTDRDDNKYQRRTPAELFSRWTRRFYAPSSRPPWRRTWFLVTAGILAFVLFVYLMAWLGRGGSDAVDEGWNNPNPQPNHYE

SEQ ID NO: 11227 - DNA, 3295 bp, DROSOPHILA
aacccaagggatgtgaacccagcccaattcaaaccgtcagaccttaagcaaaacgaagctgcgtgcgcaatttctaatttatacaaaacaattacaaatatttcataataataaaaaaaaaaaaacagaaaaccatacaatgtacatctgtaacacacaagaaatcgcgggaaaaacagaacacaacatcaaagtgaagacaacttttctatctggaacatcgggatacattgtaaggagctgaaggatgcgcggagtgcgcaagggaaacttttaataataattatgagtaacaaattatagcaaattaaaggtgatttatttaagagcatgtgctttcaacgaacgctgtttcgccaataaaatgtagccacctacctttatttcaagtttatgaattgtaaatgtcgctattgatttcctaaatagtttactttggccgcaaaacattatgtacatccctataaggattcgacctccgataaatggtacaccttagtttagctaaaaattttaagttgcatgtcatcgatgtactttgtttcttttatacaatacgaaagggaaagcaatttatataaaaaagcatttttgtttgcagacagaattctaaataaaacggagaaaagtaattttgtaaaatacataaattggtgactattgttgttttgcattggatttatgtgccgagcttgaatgaaacccagcgatgtacaaacatattggattcatttatttatttgcatttagggtttacgctaatgagtcacgtccggagcatctattgaaatcagggagcaggcattcgatgagggcgagcacgggatccaggagctgcaaacatgctggtccaagtagaaaaatacacaaaactctgcagagtatgatcgcgacctcagtgctaactgagccggcagcggcggggcagtcctctcagcagcatcagttggcgttgaaagaggcgcatgagcaagcccttgcgcttggcccgctccctggatcaggaacgcgatgatccgcccatggagccggacccggagccgccgccagccatgcgccgcttctttttcttcttggccgtcagactctcctggccgctgtccgtgttggaatcgccgccatcgtcgctctcctcctcctccgaagacgaggagctgctcgacgaggaggagcttgaattgctggagctgtccgatgcgaagccggtgctctcgttcaggttaatactatcggcgatctgggccagctccggtcgctggtctcgcagcacgcgcagccacttgcgtgacaactttggccggccgcgaacagtcttgtgccagacgcaggggaagttcgtctgcgaactgaagttctgggtgatggcaatggtgtcgtccatgttgagcaccacgtgccaccagccgccgggcacgaatacagtctcgcctgctccctgcagcacttcgatggggcggtattgctccggccaactaggcagctgggtgcgcggatatatggtgctgaaccaggtgatggcctcgtctcgctgcttgccacccatggcactggtgaccttgagcagctccttgggcgtttgggtggggaacaggcaccagcgcttgtggccgcggatcagcgtgttccaggcactagtgcccagtggatcaatgtggatgccggtgccggagcgagccggtcccatgacaaaccagcggtaaggcggacgacgattctcgccgcagtactggaagaggtcgtcgcgaaaatacttgggcaccacatagtcatccaggagcttgcgccgacgatggtgttcgccgaagctgctgtcgaagatgtacagcgggctgtcatcgcgcgtgctctgcatgtactccacgtagtacttcatcttcatcttgacgctatagccctcgttgtcctcgccgcacttgaacttctggttgcgatacttcttggccaggcgggctagtgtccacttttccagcgccaaccagccatcggtgcagccgcgaatgaccaccggcttgtagggtcgctcgaagcgttcgatgaactccgactccggcacctgcgactcctcgatccgctccaggttatcggtgaaatcccaaaatggctcgaacttctcacagtaccgcatggccgaccaggcattctcgccgtccagctccggacgagccttgcgcttcacctcacgtgtgcgcttgcgggaacgcttgggcagcttgaattcctcgctcatcctgctgaaattggccaattttccacagctcctggaaattaaagcagcgtgagtgcagtgtggccagacgccgcaggttcgaacatgctgaaaacgcgacgcgggaccgcacctggtcactcagctggtcgccagacaagcactcctttactggttttatcagatgtttaccgagtaaacggacattttcaaaacatttcattattaaagaattgtacacaggtccagtatgaaccagcccatacataaaagaacctaaatggtagtagtgcgctactaccccatgttccccatgttccaaactcaaccgttcccccaccaacgctcacttaaatttaaccctcgcgagtgtaagttgtattttcattgagagccagggctgcaagactttaaggtgaccagcgtttgttagccaaattcaaagtacaaaataaataaaattaaaaataaaactattgtgagcaggatctttcatactatctgtgctaaagcacaggcctcaaaagcaatgcaaaaattaatggataaataacttaagataacatcttaagtatatcatacgatatacgatagtggaagccctggttcgctacgatttctcatgtgacagctgtgggcgaatgaaaataatgataagccaagtcggacgaggtggagtttttgaaaagcagtgtaaaatcgttaataaccaggtgctaccaactcttccagagctctacaaggtgccgcttcgcattctagaccatcgcgtgttcgtaaacggcgagatcgaggcctttcttgagaacttcgaggtgcggcgcaacgacagcgaagtggagaaacttttccaggtcaccgaaacagtgggatctctgaagtacgatctgtcccggtgcagtgcaaccggaaggggtagcggagccgagaacctcgcccaactggacacggaagtcagccatctgctggacggggtcaacgcactcttggcgaaagcgaaggtggaacgaactgttagtgggccagcgtaatctccgcctgtttatcattgattaattggtcttccgttcgaattgcaggctagcaccc

SEQ ID NO: 11228 - DNA, 1295 bp, DROSOPHILA
tctggccacactgcactcacgctgctttaatttccaggagctgtggaaaattggccaatttcagcaggatgagcgaggaattcaagctgcccaagcgttcccgcaagcgcacacgtgaggtgaagcgcaaggctcgtccggagctggacggcgagaatgcctggtcggccatgcggtactgtgagaagttcgagccattttgggatttcaccgataacctggagcggatcgaggagtcgcaggtgccggagtcggagttcatcgaacgcttcgagcgaccctacaagccggtggtcattcgcggctgcaccgatggctggttggcgctggaaaagtggacactagcccgcctggccaagaagtatcgcaaccagaagttcaagtgcggcgaggacaacgagggctatagcgtcaagatgaagatgaagtactacgtggagtacatgcagagcacgcgcgatgacagcccgctgtacatcttcgacagcagcttcggcgaacaccatcgtcggcgcaagctcctggatgactatgtggtgcccaagtattttcgcgacgacctcttccagtactgcggcgagaatcgtcgtccgccttaccgctggtttgtcatgggaccggctcgctccggcaccggcatccacattgatccactgggcactagtgcctggaacacgctgatccgcggccacaagcgctggtgcctgttccccacccaaacgcccaaggagctgctcaaggtcaccagtgccatgggtggcaagcagcgagacgaggccatcacctggttcagcaccatatatccgcgcacccagctgcctagttggccggagcaataccgccccatcgaagtgctgcagggagcaggcgagactgtattcgtgcccggcggctggtggcacgtggtgctcaacatggacgacaccattgccatcacccagaacttcagttcgcagacgaacttcccctgcgtctggcacaagactgttcgcggccggccaaagttgtcacgcaagtggctgcgcgtgctgcgagaccagcgaccggagctggcccagatcgccgatagtattaacctgaacgagagcaccggcttcgcatcggacagctccagcaattcaagctcctcctcgtcgagcagctcctcgtcttcggaggaggaggagagcgacgatggcggcgattccaacacggacagcggccaggagagtctgacggccaagaagaaaaagaagcggcgcatggctggcggcggctccgggtccggctccatgggcggatcatcgcgttcctga

SEQ ID NO: 11229 - protein, 408 aa, DROSOPHILA
MSEEFKLPKRSRKRTREVKRKARPELDGENAWSAMRYCEKFEPFWDFTDNLERIEESQVPESEFIERFERPYKPVVIRGCTDGWLALEKWTLARLAKKYRNQKFKCGEDNEGYSVKMKMKYYVEYMQSTRDDSPLYIFDSSFGEHHRRRKLLDDYVVPKYFRDDLFQYCGENRRPPYRWFVMGPARSGTGIHIDPLGTSAWNTLIRGHKRWCLFPTQTPKELLKVTSAMGGKQRDEAITWFSTIYPRTQLPSWPEQYRPIEVLQGAGETVFVPGGWWHVVLNMDDTIAITQNFSSQTNFPCVWHKTVRGRPKLSRKWLRVLRDQRPELAQIADSINLNESTGFASDSSSNSSSSSSSSSSSSEEEESDDGGDSNTDSGQESLTAKKKKKRRMAGGGSGSGSMGGSSRS

SEQ ID NO: 11230 - DNA, 3962 bp, DROSOPHILA
tgaacaaacaacacaaacggttatcgcaagatcacccaacaatgactgaagaataaaaaatatactgctaaactgcttaattttgctggtaatattcggattgatgaacataagtaacaagggtcccatgctggccggtagatggtcttctttgtaattctgcagaaatgcaagctctgcaatcacaaaaagcagaacgggaatgaaaacactggtgttcgtgtaaagagccaaaagaaatccaaagcaagccgccaaaataatgtgaactctgctcttaagaaatgcatttcgtgacgtggttctttggggcgcaggttgttctggcagaaatgaacgccttattggaatatccggctccacctccggatcggaatattgcgtatttgagggttcaccatctgcaattaggaaatcataaacatttatagatggagagtttgacacaaatcataacattggcatatgtacaatatatgtacacatctgtatgtacataaaagatcatgtgttaccgaggttttcattctgaaacgccgacgtcgatctgctattcaatttgtccagtcgtgccttggacgcttccaatattttctttctgcgcaattcccgccgcaaagcaagcgactgccgtgcagaattcgcatctgctgttcctgaatcattactatccataattataaacactaagataacttgcaatttgacaatttgggtgtgaccttattgctgtaaaataccatcttgcccctgtcaaggtaacgccgacaagccgattggaaacgaaccgctgttggtaaattttaaaccaagccgttatttgagtaaaacatatgcattaaatattaaaactttttcttatggaaacctaataatcattttgtgtcacaaaccaatgcgaattgaagacttggaaatgagagctcacccttaaggatttggttatttattcagaattattatattaacaatacaaatgtaatgacgttaacacaattacttatagtttctccaaacgtctgggcgcatataacaggacataggcgcaatgccagtctccgccaccggaaagccgcaaaatctcgtccgtggccacggcggagacctcatcatcatcgaacttgaaccacacatcgccgctggagcgaacccaggccacataatgacccgacgaactggagcgtcccttgtgcgtgagcaccgcctgcagcgtatagtatcccgaattgttgctgcccaagtcgtcgtcgaaccagaactgctcgtacttaacgtccttcttctcttcgttgggttcattgcgtttgacaacgtcaacttccattttcttgtcttccagatccttgaatttcgaacgcattgggcagagcttgttttgcaattcgggggtacacaactcaaaggcatcgaagtcaatggggaatttgatatccttcaacaccttggcatttatgccctcctttcctttgtattgaaagcgcacgaattgtacggtgagataggctggaagtcggctcaccaagtactgaaacaggataagattagtttcgtaacgcgaacattagctacaatccttacagttcgaatgtactttgcatcgcgtcccagggtttctgattttttcaccagctgctctttcattttctgaaaatgtatgcacaattagcgctgcttaaaagtgcttacgattatatactgacagatttcagaccactctgcatgtacttcacatccatggaaatgaagcaacttaactgcaagaaattttcgcttgttactgttgaaggttcatcgggatcctcttctgagctcatcttaacttcaaaagtgccaccaaaaaactggtcgataaacgagctaaaattggagtatccaataaatattttcgaaaagaagcataaagattgtgtgcacacacttacctgtgccttttctggacagtattcgagggttcctggttttttggccgcagcttttgctgcaacattttcaggatctccgcccagcactcattggcgtcctgctgcctgtatgtgccattttcgccagtctgggcaaattgcggtgatgcccggtgcaatgcctgcagcagcacaattggcgtcacggtggtgcccttctccatttgagcaaatatagacttcatggcagacgatatggaaaatgcggtcgacatagtgtcggttccatcattactgaaagtgctcagggcagtgcgaagctcgggcactgcattcaggcactggacagtggcattcatgtagcacgtattgcccagatttgtcagcccagccggtagacgcatctgaaaagatgtatagcttatatgagaatatataggtacataaatacaaagaaaaaataatccgcaaataatgatataagcaaatcaaggatctaaagcttatttagttggattgcaataggaacttttgcatttttactataactctcctatctagttagttgtaattgtaatcattattgtaattgccttaaatccggcaaaatacctaccgctgtggctgcctcagcttcattcatgtcctcaatgaatttgacaggagtggcaggcacttctggaacactttccttgctgcccagcaacaggaccacagcgccctacaaaagaagaaaccgatgctggttaggcgccaaagtataatggatggccacttacgtccttgatctgcagattccactggtcatccttcagaatgccgcccttgcacataactttctggcgatccggttgaacgccagtgagggcaaacaactgagccttaaacaaaatcggctcctcgtcggtgtttacaacgatatctgtgtagagctcccggccccacttcaccttaactgaaagtaggacgattagtctgtgcgcaaacaggagttgtaaaacacaatgctacctttaaatgcgggcatggctaattttttcttttataaaagttgttctttctgtaaaattcaaagtcatactagccgaagcagagatgcgcaaaacaccgatacttttctgcattgcgaactacataaagtgcaccagttatcgtccagtttgaaatcctcgaaatggaacgaattgagcagtgatcagcaaaatactttaaaataagtatttcaacagataaatttaaatacatttattgttgttgacagaagtaataaaaaagggcttaaaagaagtgcatataatataataagaattttcattcttgtaagttgctccacttcttattatatgatatcttgttcctaaattggcaatacaattaagtttttattaactaattaactaaacaataaataaagttcccagttttaaatatttggacgctcacaagattcgaattgtgttctatttcatcattccaaaataacaaaaataccgtagtccgattgacacacacatttcaaccaccataaacatcgataaaacagctgatagttttccaaattcatttttacaataagttaattgcccacatcggtaaatttattagaaaattattctattaaaacgataaatgatgaatgaagcggacagtttaaccgaaatattcaggggcggcttacctcactgccttctgattgtgttttccctgttgttaacatgctcaccggtaatgccaagcgaattcgaggttatttccatgtccaaatacgatctaaatggacaacattatggtaagcaaataatgcaaatgacatatattaattatgtaagttcattgtagatcacgtctcggatattttgtacaccaatgcatcgaatataaacttaacaatttcgagggtgcgctgacccacatttttatgtgcactgacgagggctttatttaattagcacttttgtatctcattaaaacacaattttcactaattattattcttatccgatgtattttggaatatacttaactaaccatgtgaaaaatgattatcttcaattttttagg

SEQ ID NO: 11231 - DNA, 1462 bp, DROSOPHILA
gaaagaacaacttttataaaagaaaaaattagccatgcccgcatttaaagttaaggtgaagtggggccgggagctctacacagatatcgttgtaaacaccgacgaggagccgattttgtttaaggctcagttgtttgccctcactggcgttcaaccggatcgccagaaagttatgtgcaagggcggcattctgaaggatgaccagtggaatctgcagatcaaggacggcgctgtggtcctgttgctgggcagcaaggaaagtgttccagaagtgcctgccactcctgtcaaattcattgaggacatgaatgaagctgaggcagccacagcgatgcgtctaccggctgggctgacaaatctgggcaatacgtgctacatgaatgccactgtccagtgcctgaatgcagtgcccgagcttcgcactgccctgagcactttcagtaatgatggaaccgacactatgtcgaccgcattttccatatcgtctgccatgaagtctatatttgctcaaatggagaagggcaccaccgtgacgccaattgtgctgctgcaggcattgcaccgggcatcaccgcaatttgcccagactggcgaaaatggcacatacaggcagcaggacgccaatgagtgctgggcggagatcctgaaaatgttgcagcaaaagctgcggccaaaaaaccaggaaccctcgaatactgtccagaaaaggcacagctcgtttatcgaccagttttttggtggcacttttgaagttaagatgagctcagaagaggatcccgatgaaccttcaacagtaacaagcgaaaatttcttgcagttaagttgcttcatttccatggatgtgaagtacatgcagagtggtctgaaatctaaaatgaaagagcagctggtgaaaaaatcagaaaccctgggacgcgatgcaaagtacattcgaacttacttggtgagccgacttccagcctatctcaccgtacaattcgtgcgctttcaatacaaaggaaaggagggcataaatgccaaggtgttgaaggatatcaaattccccattgacttcgatgcctttgagttgtgtacccccgaattgcaaaacaagctctgcccaatgcgttcgaaattcaaggatctggaagacaagaaaatggaagttgacgttgtcaaacgcaatgaacccaacgaagagaagaaggacgttaagtacgagcagttctggttcgacgacgacttgggcagcaacaattcgggatactatacgctgcaggcggtgctcacgcacaagggacgctccagttcgtcgggtcattatgtggcctgggttcgctccagcggcgatgtgtggttcaagttcgatgatgatgaggtctccgccgtggccacggacgagattttgcggctttccggtggcggagactggcattgcgcctatgtcctgttatatgcgcccagacgtttggagaaactataa

SEQ ID NO: 11232 - protein, 475 aa, DROSOPHILA
MPAFKVKVKWGRELYTDIVVNTDEEPILFKAQLFALTGVQPDRQKVMCKGGILKDDQWNLQIKDGAVVLLLGSKESVPEVPATPVKFIEDMNEAEAATAMRLPAGLTNLGNTCYMNATVQCLNAVPELRTALSTFSNDGTDTMSTAFSISSAMKSIFAQMEKGTTVTPIVLLQALHRASPQFAQTGENGTYRQQDANECWAEILKMLQQKLRPKNQEPSNTVQKRHSSFIDQFFGGTFEVKMSSEEDPDEPSTVTSENFLQLSCFISMDVKYMQSGLKSKMKEQLVKKSETLGRDAKYIRTYLVSRLPAYLTVQFVRFQYKGKEGINAKVLKDIKFPIDFDAFELCTPELQNKLCPMRSKFKDLEDKKMEVDVVKRNEPNEEKKDVKYEQFWFDDDLGSNNSGYYTLQAVLTHKGRSSSSGHYVAWVRSSGDVWFKFDDDEVSAVATDEILRLSGGGDWHCAYVLLYAPRRLEKL

SEQ ID NO: 11233 - DNA, 2901 bp, DROSOPHILA
tgttcagatgggagtctatggagccagtgctgtcgttctcgttccgcatatcggtcgagtgattatattgaaaatttggctgggacgagtagatgggatggcgatcccgcggattgaagctcaacaccgttcccatgatggctgcaattgcgaatgggtttgcaaatcaataagactgagaccaagaccctcgtcgcccttcgttagtaaggttattttaaaatattgattttcaatcaaagtactcatgcctcattctcacttaaagcagttatattcaaatggatagcattcaaatcgaaatcacacccagaaaactcagcttaatttgtagtttcttaaactttattcatggataccagaggtagtttttaccttattagtttcgtattactcgggggaaaaaaaatctgccaagtgcgtttgtaaatccgaatatccttgcgcagcagctcgatgttatgccatttttaacggctgcataattacacttatctacggtagccgattgcaccaatcatatattttttcaagcactaatttccaccttgcacttgtttatgaaaacatcttttcgccacaagcttatgaaataagtacacagtcttaaaatcgatacaaagtatgcgcaggcccacaggcgagggtgggcacttttccttttttcgcgtttctgggcatgctcagtgaaggtgttttccaattactattactatgtcctgacaggcggacgggcctgggtctatttttagaaattcttaaaagaaatgtaagaaaccaagagaattgttatttttcgcaaagatattttttgtatttctatctaacaacgtattaacaacttattattctttgttttaagagatttgaagacattttttcagagttaaatgagtttttttaataatcagccaacttaagttagaaaatttagacttaaaactgagggttgttaacggtttcaaagtttttatacataaatatttcagataaacagtgctgtacagcacctaaagtcgctgccagtgctgaaaacgcaatggtggttgttttttggccatcgactgacgtccttaatctgagatgaatgaatgattcaactagctttgatagtatttgtcttgctaatcatgttgcacacccctaaataagacataatttttatttaacaattgtagcatattcgggtctaaaatttagtaagagcatgcttcctgaacaaacaacacaaacggttatcgcaagatcacccaacaatgactgaagaataaaaaatatactgctaaactgcttaattttgctggtaatattcggattgatgaacataagtaacaagggtcccatgctggccggtagatggtcttctttgtaattctgcagaaatgcaagctctgcaatcacaaaaagcagaacgggaatgaaaacactggtgttcgtgtaaagagccaaaagaaatccaaagcaagccgccaaaataatgtgaactctgctcttaagaaatgcatttcgtgacgtggttctttggggcgcaggttgttctggcagaaatgaacgccttattggaatatccggctccacctccggatcggaatattgcgtatttgagggttcaccatctgcaattaggaaatcataaacatttatagatggagagtttgacacaaatcataacattggcatatgtacaatatatgtacacatctgtatgtacataaaagatcatgtgttaccgaggttttcattctgaaacgccgacgtcgatctgctattcaatttgtccagtcgtgccttggacgcttccaatattttctttctgcgcaattcccgccgcaaagcaagcgactgccgtgcagaattcgcatctgctgttcctgaatcattactatccataattataaacactaagataacttgcaatttgacaatttgggtgtgaccttattgctgtaaaataccatcttgcccctgtcaaggtaacgccgacaagccgattggaaacgaaccgctgttggtaaattttaaaccaagccgttatttgagtaaaacatatgcattaaatattaaaactttttcttatggaaacctaataatcattttgtgtcacaaaccaatgcgaattgaagacttggaaatgagagctcacccttaaggatttggttatttattcagaattattatattaacaatacaaatgtaatgacgttaacacaattacttatagtttctccaaacgtctgggcgcatataacaggacataggcgcaatgccagtctccgccaccggaaagccgcaaaatctcgtccgtggccacggcggagacctcatcatcatcgaacttgaaccacacatcgccgctggagcgaacccaggccacataatgacccgacgaactggagcgtcccttgtgcgtgagcaccgcctgcagcgtatagtatcccgaattgttgctgcccaagtcgtcgtcgaaccagaactgctcgtacttaacgtccttcttctcttcgttgggttcattgcgtttgacaacgtcaacttccattttcttgtcttccagatccttgaatttcgaacgcattgggcagagcttgttttgcaattcgggggtacacaactcaaaggcatcgaagtcaatggggaatttgatatccttcaacaccttggcatttatgccctcctttcctttgtattgaaagcgcacgaattgtacggtgagataggctggaagtcggctcaccaagtactgaaacaggataagattagtttcgtaacgcgaacattagctacaatccttacagttcgaatgtactttgcatcgcgtcccagggtttctgattttttcaccagctgctctttcattttctgaaaatgtatgcacaattagcgctgcttaaaagtgcttac

SEQ ID NO: 11234 - DNA, 787 bp, DROSOPHILA
tgtttataattatggatagtaatgattcaggaacagcagatgcgaattctgcacggcagtcgcttgctttgcggcgggaattgcgcagaaagaaaatattggaagcgtccaaggcacgactggacaaattgaatagcagatcgacgtcggcgtttcagaatgaaaacctcgatggtgaaccctcaaatacgcaatattccgatccggaggtggagccggatattccaataaggcgttcatttctgccagaacaacctgcgccccaaagaaccacgtcacgaaatgcatttcttaagagcagagttcacattattttggcggcttgctttggatttcttttggctctttacacgaacaccagtgttttcattcccgttctgctttttgtgattgcagagcttgcatttctgcagaattacaaagaagaccatctaccggccagcatgggacccttgttacttatgttcatcaatccgaatattaccagcaaaattaagcagtttagcagtatattttttattcttcagtcattgttgggtgatcttgcgataaccgtttgtgttgtttgttcaggaagcatgctcttactaaattttagacccgaatatgctacaattgttaaataaaaattatgtcttatttaggggtgtgcaacatgattagcaagacaaatactatcaaagctagttgaatcattcattcatctcagattaaggacgtcagtcgatggccaaaaaacaaccaccattgcgttttcagcactggcagcgactttaggtgctgtaca

SEQ ID NO: 11235 - protein, 204 aa, DROSOPHILA
MDSNDSGTADANSARQSLALRRELRRKKILEASKARLDKLNSRSTSAFQNENLDGEPSNTQYSDPEVEPDIPIRRSFLPEQPAPQRTTSRNAFLKSRVHIILAACFGFLLALYTNTSVFIPVLLFVIAELAFLQNYKEDHLPASMGPLLLMFINPNITSKIKQFSSIFFILQSLLGDLAITVCVVCSGSMLLLNFRPEYATIVK

SEQ ID NO: 11236 - DNA, 2925 bp, DROSOPHILA
taaaccagatatgtatgctgagaacaattttcgacttctagcgaatagattgctgggtaactttctttgagagtatatgtcctattttagtaagtatattaaaattttagttagacaccaaaagcgtcccttcagtttacccgccactcttattgtttcgataccaaggaatgtcccaaagatcttcctttagattatagacctgcttttgagcccatcccccaactattccggtcatcaacttcttgcggcttcgttgagttgacaggacaaacaatgggcgacacttcagcactttcatttttcccgctcaaacacttgcgaaaaacactccgccgcagactcaacgctccgccacacatacattttgcggatttttatttattattttgcttcttttctgcggtggtgctgttggtgtcggtggtgcagctcactcacacagacgccccacaatttgcgagtcgcactcaacgtgaagtgttttgtgcggttttttcgtgttgcatgttttatattcgtacacatatatttttagaaattgtttttagttgaatgttttacttttatgctgagttcggtgacagctcgaaacgagtcctggtgggcggaggtcctgctaggccggagcaggcacgctgacaaataagtctcatacgtattgttcgagttctttctgggctttgggagattggaagccaaatctggttacggattagaaaaaaaaattctagaaaaatctagaatctgttacatctgtttattcaaggttattcaaaatcctcgaatttaataaagatattttcaaaaaagccagttcactttttttgcagtaactgacacagctgctgctctcacatgaatgaatattgagtacacacacacacatgtgcacggcaaccaatacacccatgcgatcggccgccccaaaagtatgcaacactttgcccgactctctatgcgcatctttattaattatgccagcgatttaattaaaaacttaaccagctgtcgccttgagcgccgcagcactgagcaaggggatcgtctcctggccacccgaaggaggcggacatagcgcggggggcgtggctttggggctggcaggagcggcaacttccgacggattcctgccgagttggcaacttgctggcgctgcagttgccgcagatgggtatgggctaattaaaatgcattgtttaatgcaaataatggattatataagttggtagttttcagtgtttacttacggcgggtggctctcgactcgtggcgcccaaacggctgcagctgcggctggcggcgccttaacgacttttggcccgactcctccatattgttgtgccgtctgaattggctttggctggagacgcagttgctggcctggttgttcaggttgcacattgacgccattgaacccggccaatatttgaggtggttgacccgcggcgttttcataaacaaaaaagtgttgcccctgttcctgttgcggttgatttgtggcctgttgttgctgccattttggttgctgttgttggtagtgttgctgctgctgctgccgtggctgctgatgtttctgctgctgctgtggctgctgccaatttggcacagtttggcccagtaactcgtgcaacaatggcgccaacgcttcgctgcccgtgatttgttgcagatgctgctggagcgcggcttcctcaatcttctgtccctccgcccgattgatgctcaggatgccggtgttgtggtgcctgtaagcaaatagtttgctcaatagattgacccgctaaccaccacccacacactgggcgagattcattccagcacattcacacgacctactttgtcagcggctgtgcaaatgtttgcgaaacaactcccaaacaaaccagcggcaagtggagcagaacgagccaatttggatacatatttaaagacttattagtgccagagaccttccactcgaaactctcggtgagaactaactccggctaactaacttcacacatcaaatattctccgatgccatggattctaattgggagatgcttgcttttgcctaggcattcgattaggtttcttgttttcgggcattaattatttcgaagctaattatacatgcacattaatatgcaaatattatgaagtgtgaacattttgatgtgccccattggtttcggtatgataattaccagttcggctttacagatccaactggaggcccgacagcggttctcgattgagtggatctcaattagccggctacaaaaaatatgactagctaattggcttaatcaaatagtaaaaataagctaatagaaactaaatagtaacgttatacctctcttaaattgattagaatacatttattcatctaaatagtttacttcttattggtaaagtttaatattttagctttaataagaaatatgttttttataataagctgcctttcagctgctgtaaatgcctccataagttatatgattatgtgctttcaacaaaaagggctcttaaactcaaatccataaaactacgcttctcaaactgttgcattaacatacgagccatttcaaagaggtggccataaatccaagctaaaatgtcaaccgtctggcagtgactgtcaaactgtaaagtggcccttggcttcagctcccattttccgctctccgtggatgtgtggcaaaatgtttttccattaaattacaattccccttctcggaaaataccccctcccctctaccccctcatcatcggcggccttcgtcgaccagcaaagtcatgaaatttagtgttggcggcataattagaccatcaattgcggaaaactcatgacagtcatgaatggccgactgtgtgcatgtgcctgtgttggtgggccaaaaccacatgggcggggggcgtggccaggggcctaggcacact

SEQ ID NO: 11237 - DNA, 765 bp, DROSOPHILA
atgtatccaaattggctcgttctgctccacttgccgctggtttgtttgggagttgtttcgcaaacatttgcacagccgctgacaaagcaccacaacaccggcatcctgagcatcaatcgggcggagggacagaagattgaggaagccgcgctccagcagcatctgcaacaaatcacgggcagcgaagcgttggcgccattgttgcacgagttactgggccaaactgtgccaaattggcagcagccacagcagcagcagaaacatcagcagccacggcagcagcagcagcaacactaccaacaacagcaaccaaaatggcagcaacaacaggccacaaatcaaccgcaacaggaacaggggcaacacttttttgtttatgaaaacgccgcgggtcaaccacctcaaatattggccgggttcaatggcgtcaatgtgcaacctgaacaaccaggccagcaactgcgtctccagccaaagccaattcagacggcacaacaatatggaggagtcgggccaaaagtcgttaaggcgccgccagccgcagctgcagccgtttgggcgccacgagtcgagagccacccgcccccatacccatctgcggcaactgcagcgccagcaagttgccaactcggcaggaatccgtcggaagttgccgctcctgccagccccaaagccacgccccccgcgctatgtccgcctccttcgggtggccaggagacgatccccttgctcagtgctgcggcgctcaaggcgacagctggttaa

SEQ ID NO: 11238 - protein, 254 aa, DROSOPHILA
MYPNWLVLLHLPLVCLGVVSQTFAQPLTKHHNTGILSINRAEGQKIEEAALQQHLQQITGSEALAPLLHELLGQTVPNWQQPQQQQKHQQPRQQQQQHYQQQQPKWQQQQATNQPQQEQGQHFFVYENAAGQPPQILAGFNGVNVQPEQPGQQLRLQPKPIQTAQQYGGVGPKVVKAPPAAAAAVWAPRVESHPPPYPSAATAAPASCQLGRNPSEVAAPASPKATPPALCPPPSGGQETIPLLSAAALKATAG

SEQ ID NO: 11239 - DNA, 4636 bp, DROSOPHILA
gaaacacttacacacaatagcgacaatgaaccgagaaataatgccgaatttcaataattgcagatcagcgacacaactcccttggtcagcgagcagttgccactcacctgcttgtatgcggaatacagtggcgacgagatcttcaccgccaagatccaggatctgtccaaaaagtacaagttcattcgccgcacccgccccgatggcaattgtttcttccgagccttcgcctactcctacttggagtacttgatctcaaacaccagtgcctaccaggagttcaaaaaactggccgaggagtccaaggagaagctcgttcagctgggatttcctagttttacattggaggactttcacgaaacggtatgtttagccgtacaaatgcaaaacgaattccctatgcttatgcagccttttgtatgtccagttcatggaagtcatccagcgcgttagccccgacaatgcaggaggacacagcacggtccaagatgagttgcacaagatcttcaatgagcagggttactcagactacgtggtggtttacctacgtttgatcacctcgggaaaactgcaggaggaggccgatttttaccaaaatttcatcgaaggcgacctcaccattgaggcgttccgccatctggaagtggagccgatgtacaaggaatcggatcacatccacataatcgctctatgcaccgccctcggcgctggagttcgtgtcgagtacttggaccgtggcgaaggtgggactgtgaaggcccacgatttccccgagggaagcgagccccgaatttacctgatatatcgaccaggccactacgatatactgtatccaaattgaattgctctcagtagtttctagattacgaaacgatttatgtatataagatgtataataaactaccatttatttgcatatatggtgaatattttccttctcttttggttctgcataagattgagattgattgattagcccagcaatggaaacacagattttacacatatcgtagatgttaatttatttaaacactaatctttattatttgatttgaacgattgtgatagtgacataatgaaattgtctaatgttttataaaatattaagttttattaacggtacttcgccatcatttcatccggaaatttctggcgatgcgcagacaatgagaggttgacaataatctcccggtcgtccatccgtcaggcgcctccacagtatgatttaattgtaggatgatattgaccacaagatttcagctcagtaaagacttcggtaaaaaatcccggctcagcattgattttaagcattttatcacttagcttgttcacaatgacgaggcacctgtatgttacattaaagattaagatgcagatggaaaatatttcattgaaattaacttattatttgacatacctgtcccaaaacttttccttcgagtcttcaaccaaaaacggtttgagtggataactgatttcattgcccatatacgaataagacagatacaaacaggtgagtactgatgcctgaagatccgattccttgctctcttctccgctgaccagctcgcggactagcatgtagacaaacaccacattggctgggtttatgaacgccacgtccttggaattaaatgttgtgcttattgtttgaaggacatgtggcagagtagctactgtacctgccatccttggagcaaaaggctgcgatccactgctctgagccacatgaccgcatccccggcatcgaaattgtttagcctctgacaacgacagtgcaagaacatgcccaagcacttaagcaattccgaagtggaggcctgcgaggtgttcgaaaataatataaagtatcctatataaaaccaatttcatcttttgtttggaaagctgaaaccagctatctttgacaagcgggagttttaaatctattgtatcgcttatataattaaatctaaacgtatttctttaaatcagttccaattcctgaacttaaggatgtaccatgcaatagattcgccaaagaaaatatattatctcgtattttgttaaagaacttattatgaaacacagtgaaatgcttaaaaatctcatgatttgactttcattatatgatatgatatggtatctaagttcaaaattttcttttcaaaagtatgctacacaagttggatccccactaatatgttaggatctcaaaactgacttgctagatataataccatattttggtacaatacgcacctgaatgacggtcttgcgtgggatctggttggtgtttttggtctgaatggacgaggcctggacttgctggggcaggctgagcgtcaggggctgtttctggatcagcttgttgtggttcgacatggagttcttgttgttgaccttgacggggtctttcgccttggaaggattctgcgatttacccggcggaccggtcatgacctcctcccggatatcctgcacctgattctggttctgattctgattctgattctggtgctggtgctgattctggagctgaagctgatgctggtgcggatggggatggggatgctggttgcagtgctgctggttgtgctcatcgatgcgattgcagtgcagctggatgttgcgattcttgtccgaggacgaggcgaacgaggactccagcagctgggccttgaagcaggccgtgggcaggttggcgcacttgttcttgttctcgatcttcttcttgttgtgcgacgtggagagcttcttccacgagagcgcattgatgaagatcgaatgcttcttcaggttcttctcgaacgagctcttctccgccttgagcaccgagttctcattatgcgtgtccagcacattggtgatggtgtccttggaggcgttcgccagattgttcaaattgtgtgagctcagctgggtttgtgtctgcagattgatgtgaacgccgccacactgaccacccggctggccaatcacattcttggccatcggatggcaggcggacttcttgttctcccgattcttggcattgttcagctgctcgtaggagaagttgttcagatgggagtctatggagccagtgctgtcgttctcgttccgcatatcggtcgagtgattatattgaaaatttggctgggacgagtagatgggatggcgatcccgcggattgaagctcaacaccgttcccatgatggctgcaattgcgaatgggtttgcaaatcaataagactgagaccaagaccctcgtcgcccttcgttagtaaggttattttaaaatattgattttcaatcaaagtactcatgcctcattctcacttaaagcagttatattcaaatggatagcattcaaatcgaaatcacacccagaaaactcagcttaatttgtagtttcttaaactttattcatggataccagaggtagtttttaccttattagtttcgtattactcgggggaaaaaaaatctgccaagtgcgtttgtaaatccgaatatccttgcgcagcagctcgatgttatgccatttttaacggctgcataattacacttatctacggtagccgattgcaccaatcatatattttttcaagcactaatttccaccttgcacttgtttatgaaaacatcttttcgccacaagcttatgaaataagtacacagtcttaaaatcgatacaaagtatgcgcaggcccacaggcgagggtgggcacttttccttttttcgcgtttctgggcatgctcagtgaaggtgttttccaattactattactatgtcctgacaggcggacgggcctgggtctatttttagaaattcttaaaagaaatgtaagaaaccaagagaattgttatttttcgcaaagatattttttgtatttctatctaacaacgtattaacaacttattattctttgttttaagagatttgaagacattttttcagagttaaatgagtttttttaataatcagccaacttaagttagaaaatttagacttaaaactgagggttgttaacggtttcaaagtttttatacataaatatttcagataaacagtgctgtacagcacctaaagtcgctgccagtgctgaaaacgcaatggtggttgttttttggccatcgactgacgtccttaatctgagatgaatgaatgattcaactagctttgatagtatttgtcttgctaatcatgttgcacacccctaaataagacataatttttatttaacaattgtagcatattcgggtctaaaatttagtaagagcatgcttcctgaacaaacaacacaaacggttatcgcaagatcacccaacaatgactgaagaataaaaaatatactgctaaactgcttaattttgctggtaatattcggattgatgaacataagtaacaagggtcccatgctggccggtagatggtcttctttgtaattctgcagaaatgcaagctctgcaatcacaaaaagcagaacgggaatgaaaacactggtgttcgtgtaaagagccaaaagaaatccaaagcaagccgccaaaataatgtgaactctgctcttaagaaatgcatttcgtgacgtggttctttggggcgcaggttgttctggcagaaatgaacgccttattggaatatccggctccacctccggatcggaatattgcg

SEQ ID NO: 11240 - DNA, 1845 bp, DROSOPHILA
acttatttcataagcttgtggcgaaaagatgttttcataaacaagtgcaaggtggaaattagtgcttgaaaaaatatatgattggtgcaatcggctaccgtagataagtgtaattatgcagccgttaaaaatggcataacatcgagctgctgcgcaaggatattcggatttacaaacgcacttggcagattttttttcccccgagtaatacgaaactaataagatgggaacggtgttgagcttcaatccgcgggatcgccatcccatctactcgtcccagccaaattttcaatataatcactcgaccgatatgcggaacgagaacgacagcactggctccatagactcccatctgaacaacttctcctacgagcagctgaacaatgccaagaatcgggagaacaagaagtccgcctgccatccgatggccaagaatgtgattggccagccgggtggtcagtgtggcggcgttcacatcaatctgcagacacaaacccagctgagctcacacaatttgaacaatctggcgaacgcctccaaggacaccatcaccaatgtgctggacacgcataatgagaactcggtgctcaaggcggagaagagctcgttcgagaagaacctgaagaagcattcgatcttcatcaatgcgctctcgtggaagaagctctccacgtcgcacaacaagaagaagatcgagaacaagaacaagtgcgccaacctgcccacggcctgcttcaaggcccagctgctggagtcctcgttcgcctcgtcctcggacaagaatcgcaacatccagctgcactgcaatcgcatcgatgagcacaaccagcagcactgcaaccagcatccccatccccatccgcaccagcatcagcttcagctccagaatcagcaccagcaccagaatcagaatcagaatcagaaccagaatcaggtgcaggatatccgggaggaggtcatgaccggtccgccgggtaaatcgcagaatccttccaaggcgaaagaccccgtcaaggtcaacaacaagaactccatgtcgaaccacaacaagctgatccagaaacagcccctgacgctcagcctgccccagcaagtccaggcctcgtccattcagaccaaaaacaccaaccagatcccacgcaagaccgtcattcaggcctccacttcggaattgcttaagtgcttgggcatgttcttgcactgtcgttgtcagaggctaaacaatttcgatgccggggatgcggtcatgtggctcagagcagtggatcgcagccttttgctccaaggatggcaggacgtggcgttcataaacccagccaatgtggtgtttgtctacatgctagtccgcgagctggtcagcggagaagagagcaaggaatcggatcttcaggcatcagtactcacctgtttgtatctgtcttattcgtatatgggcaatgaaatcagttatccactcaaaccgtttttggttgaagactcgaaggaaaagttttgggacaggtgcctcgtcattgtgaacaagctaagtgataaaatgcttaaaatcaatgctgagccgggattttttaccgaagtctttactgagctgaaatcttgtggtcaatatcatcctacaattaaatcatactgtggaggcgcctgacggatggacgaccgggagattattgtcaacctctcattgtctgcgcatcgccagaaatttccggatgaaatgatggcgaagtaccgttaataaaacttaatattttataaaacattagacaatttcattatgtcactatcacaatcgttcaaatcaaataataaagattagtgtttaaataaattaacatctacgatatgtgt

SEQ ID NO: 11241 - protein, 472 aa, DROSOPHILA
MGTVLSFNPRDRHPIYSSQPNFQYNHSTDMRNENDSTGSIDSHLNNFSYEQLNNAKNRENKKSACHPMAKNVIGQPGGQCGGVHINLQTQTQLSSHNLNNLANASKDTITNVLDTHNENSVLKAEKSSFEKNLKKHSIFINALSWKKLSTSHNKKKIENKNKCANLPTACFKAQLLESSFASSSDKNRNIQLHCNRIDEHNQQHCNQHPHPHPHQHQLQLQNQHQHQNQNQNQNQNQVQDIREEVMTGPPGKSQNPSKAKDPVKVNNKNSMSNHNKLIQKQPLTLSLPQQVQASSIQTKNTNQIPRKTVIQASTSELLKCLGMFLHCRCQRLNNFDAGDAVMWLRAVDRSLLLQGWQDVAFINPANVVFVYMLVRELVSGEESKESDLQASVLTCLYLSYSYMGNEISYPLKPFLVEDSKEKFWDRCLVIVNKLSDKMLKINAEPGFFTEVFTELKSCGQYHPTIKSYCGGA

SEQ ID NO: 11242 - DNA, 4240 bp, DROSOPHILA
attcgcaaatatatttaggaatagaatacagttttactcattttttttttggctgtacctaatgcaaacgatatataagtcgggaccgacgttgaggccgtccggtgaaaacttcctggacttctgcaatcgaggatttgataaaggacatggccatctggctgtacatataccacgcccgatacggacattgatcgaagcggatcaacgcctgctgaaccactattccattggccaggacattggccaccagcaccaagacatacaagcatgtcacgcccatgatcactagcttcctggaggagggattctcgcaacgttcgttccacttggaaagggcaaacaccgtaacggcactgagtggtgcggcggccatcgccatataggaatcaaaccggtagctcagcaccattaccaccgagtgattgacctgcaggaagaacgagtccacgaatatgctgaagttcatctggggacgcaccaaagcagccaggagcagcacatacaagcccaaaaacgcaactccttggcgtatgctcacttcaacaggaggcatttcaaattaatctgaagagaatatgaaaaatattaataatgcgtttatttactcgatttacaagatttataaaactaactggcgattacaaattttcaaatatttttcaaaaccaacattcgacgccccctttataatttcaacatgacatgaagccaatctttcagtccgatcttgccaaactccagctaacccgcttctttggaactgcttaagcggatggaggctcgtttgtttacccaatacactaattaagaccctctcctccggcactcaaaacgccgacgagtgttccgaccaggccgaccatacatacatcaacccaaatagacttcaattaactgcagttcatcagtcttcgccgacaattgttgcccagtctttggtttcggcgactcatcgatgccttttgcaattacttaacacattcgaaatgtcatcacaaatgcactggcaatcgcgaaaacccagacacacagactgacagacaagtggactacagttataacctcataatatgggtcattagtgcaggcggtacaagtgccacgcccattaattacttcagtttccatcgatacagctgaatcttcacacttttcaaaggtcggaaaagtgggaaaatgcaagtgaataaagaagagaaagaaaacgggaaaagcgaaaaagtcaatgaaggcaaaaaccagcagtaagcataattaattgtgcattttccatgctggcgaactgtagtcgaaagttaactgacatggaaaatgggaaaattaaaaatgccaatagggaaaattgaacgcagcgcaatcttagcgacagcgtcaataaatcaatgcaaataccctaacaatgccggctaattgcgaaatgattaagcgaaagtggccgaatcaaaattcaaaattcacttacatgtgccagtgatgatgcgagtgtgtgcgtttgtgtttttgtgtggatgaaaagggaggtggttatgaaggtggggcgaggttgggtcacatattgtggaccgcccgttgacagcgataaatcagcaggtgtaatgagtcaaagttatcgttatgcatggatcattaatcacacacgcataacaaattaagagtacattattccaatgccacacaaacacgcacacactctctctctctcttcagttgttgtcattgtgtgcgtgaactatatattgctgcatactttcaggcatttcagttgaccattttggcaagtgtgtcctagggtttgggtggattcgcgctgaccactacatcattcaaaagcataataggattgagatgaccaatgtcaatgactatgaccaatgactattagcacctacagataaaagtcatctgtaagcttttagtaatgagctttatataataggagcgtttgtgatcctctacaataaaagggctagttcgcgatcccccaaaaatagcttttctttatattagacacccggacttggaacattcttgcagcatctctctatttacccgctcgctaattgtgaatgccaatcaggacagtgccaggacccagctgacaagacaaagccaactgtctccgagctgtgctgagtgctggggcactgccattgggcttgtgtataggattgggtctgaaagtgggatttgaagctggaatgggttgtctggaactgcaaatgggccaaaaagctgaagagccgggctgagttcagctggctgattgctccaattgccaggcgaccgggcacgcacggctgcctcatacaaacttgcaactaaacaggactctgctacgggactacaggattcgcttggcagtggctgtagcagcagcagtaacaacaacaacaacaatcgcttctgtcaacgcacaaaagacagcgctgacgtaacgaaacggttaatttagagtacgacaacgacaacaaacgaaggcagttcaaaagccgtcagcgcgagatgagattaggttgcagatgggcacaaagagaacaacacggagccgaagcagcagcaacagcactggaaaaaatgtagtgagacaaaactacaacaagcccgaaaaaaaatgtccacgcaaaagcaactgaaactggagaacttaatccaatagaaaaacgcatttgaactgagaactttctattgcattttaaatcttacttttgaagtttctttcagtgtaatagcggcaacaacagcatcatcagctttatgccatttgcataggggcgtgtacgaagtccgggatctgcaattacaaagcaccagctcgagattggaatgaaggctggcttggaatggaatgggtatggtatggaatggtatgggatggggttagatttcacgaagagatggggaaacactggatggggctcgagactctagtcatataaaacattttttagtgcgctcatgctggcgaatgtttagaatttaattagccacgctccctgattatgcgcgcatgaaattagagccttcgaatggagctctataaagtgtgtaccaaagtgccgatgacaacaaaggagtcatccgtatgccagtttactcacatctgcaagacgtcagagggtcggagtcacaaccacatccaattcaatttcagttttgactgccaggacctactgcgaacttcagatttggaagacttactttgatattaacaaatacacatttttaaaccagatatgtatgctgagaacaattttcgacttctagcgaatagattgctgggtaactttctttgagagtatatgtcctattttagtaagtatattaaaattttagttagacaccaaaagcgtcccttcagtttacccgccactcttattgtttcgataccaaggaatgtcccaaagatcttcctttagattatagacctgcttttgagcccatcccccaactattccggtcatcaacttcttgcggcttcgttgagttgacaggacaaacaatgggcgacacttcagcactttcatttttcccgctcaaacacttgcgaaaaacactccgccgcagactcaacgctccgccacacatacattttgcggatttttatttattattttgcttcttttctgcggtggtgctgttggtgtcggtggtgcagctcactcacacagacgccccacaatttgcgagtcgcactcaacgtgaagtgttttgtgcggttttttcgtgttgcatgttttatattcgtacacatatatttttagaaattgtttttagttgaatgttttacttttatgctgagttcggtgacagctcgaaacgagtcctggtgggcggaggtcctgctaggccggagcaggcacgctgacaaataagtctcatacgtattgttcgagttctttctgggctttgggagattggaagccaaatctggttacggattagaaaaaaaaattctagaaaaatctagaatctgttacatctgtttattcaaggttattcaaaatcctcgaatttaataaagatattttcaaaaaagccagttcactttttttgcagtaactgacacagctgctgctctcacatgaatgaatattgagtacacacacacacatgtgcacggcaaccaatacacccatgcgatcggccgccccaaaagtatgcaacactttgcccgactctctatgcgcatctttattaattatgccagcgatttaattaaaaacttaaccagctgtcg

SEQ ID NO: 11243 - DNA, 648 bp, DROSOPHILA
acatatctggtttaaaaatgtgtatttgttaatatcaaagtaagtcttccaaatctgaagttcgcagtaggtcctggcagtcaaaactgaaattgaattggatgtggttgtgactccgaccctctgacgtcttgcagatattaatttgaaatgcctcctgttgaagtgagcatacgccaaggagttgcgtttttgggcttgtatgtgctgctcctggctgctttggtgcgtccccagatgaacttcagcatattcgtggactcgttcttcctgcaggtcaatcactcggtggtaatggtgctgagctaccggtttgattcctatatggcgatggccgccgcaccactcagtgccgttacggtgtttgccctttccaagtggaacgaacgttgcgagaatccctcctccaggaagctagtgatcatgggcgtgacatgcttgtatgtcttggtgctggtggccaatgtcctggccaatggaatagtggttcagcaggcgttgatccgcttcgatcaatgtccgtatcgggcgtggtatatgtacagccagatggccatgtcctttatcaaatcctcgattgcagaagtccaggaagttttcaccggacggcctcaacgtcggtcccgacttatatatcgtttgcattag

SEQ ID NO: 11244 - protein, 165 aa, DROSOPHILA
MPPVEVSIRQGVAFLGLYVLLLAALVRPQMNFSIFVDSFFLQVNHSVVMVLSYRFDSYMAMAAAPLSAVTVFALSKWNERCENPSSRKLVIMGVTCLYVLVLVANVLANGIVVQQALIRFDQCPYRAWYMYSQMAMSFIKSSIAEVQEVFTGRPQRRSRLIYRLH

SEQ ID NO: 11245 - DNA, 5025 bp, DROSOPHILA
tgggggtggggtagttgaggggcacggaaggaactgaacaaaattgaaataaaataaagcaccataaaacgtacttaagattgacgattgtgttttttgggggagcgatcaatgaaagagtttcgatgaagacaatatatggcaagtacagttgagctcttttttggatttgggcattcgtgttgtctgcaaagggttattgataattctatgctcttcccaatttagttaatattcttttattactaaattatgagggaatttttgtgtctgatttcgagacgggggaacaatcgaaggagccagaaagcgaccgaagaacgcgttgagtaaatgcacattctggaatatttatatagtacatttgaatatatatgtacttgattagatataattggctgtcagtatgtctcttgatcgctccactcaatcgcaccaatactcggattcggataccgagcaaccgcacagatacattttcgaaacaaacaaaatgtcggcagctgcttgttgtgttagcttataaattaaaacgcgtttcatggcattattatttgatggttttttacttttttttttttcgtcttatggctgctcaattcattcgattgttcgtatattcacattctttttagcccattcgtacccatatacccccgatatcgctcacacctccttcccccccttctccgctcggttcatctgtccgcctgtctgctaattgaaaatcaattaatgtgactgcatcctatagctgctcatgtcaaagtcagatatcatccagggtagggtaaattcgatggaataagggaatgaaaacaagagaaggaattcaagactcaacgactcagattcagaatccgaatcagaatccttttgttttcactgaccttactgtctgaaaacaaaaacccaattgatgtgccccaagtaacactctgataattaccgaaaaactccaaatttttcgattgctttcgactttggcagtattcatcgccaagttcattgggttttcgagtgcgtcccgcgaatcgctttcgtttggtgcggaatttggcacaagttttgtatgctcaactactgggaaggccaatctggggcttctaattccactgtgcgggtaatttggggactcttgccagttactagttacctcccaatacgaatcactgatttctcacctcctgccactcgcttcttgcttccgttgcaggtcaacaaacagtattcggccaccgatctggaggcttttatgaagattgccgccaactggcaaaattccaatcacaacttgctggagggcgtcgacataaagacgggtaagttaaacaaaacgaagtgaccgttgaaggaacttaattcaatcatcgaatgcttgcagaaatgacacagtacatgaacagtccttccatgaacatgtacaagaagagggaacgcacccagaactggaaccaccaggagaagaaatacctactcgatctgtgtcgcaaggacatgcgcattatcgagaacaagagattggatgccggtctgaccgccgtgaagaacaaggcatggaagattatccaccagaagttctccaatcagtttggcaccgatcgcacctgcaatcgcctgaaggaacagtggcgtcgcatgaagggtaagtctttataaaatacatatatttaatggcaaagctaaccttttcgatctcatcctttagcatgtactcgcaacgagatcctggactacaataatcgcctggccaggtttggagcagaggtggccgatcgcaagaagccatctccgttcaccttcgaggtgtgggatttcatgcaggaggcgaagaaggcatgcaaatcggaggccctggatggcattgattactctaagattccactggccttggaggagggttttgagtatcgtgaggattacaaattcaatcccgaagaccacgacatggatgagtaagttgatcgctatgtggtagtctgaatagatctttattgagcattctctatttgagcagcagccgcacaccgccgcaggaactgtgcgatgtggacatcaaggaggaggagaacaacgagaccttcaacgagaccttcaaccatcaccacctcaaccagagcgacatccttggcagcggcgagcgtctcagtgtgtcgcctaatcacagcatcagtcgcaacgggatccacgaggccgagagtcccgccacgatttccacatctaatgtcctggactcgagcggtgcctatatggccggaggaggtgacatgtccggcttccaggccaacttcaacatgaacaacatatccgccacgctggaggcactgaatgccctccgttctggccaatttcccagtgcagcagcagcggcagcggccgccattcaccagcaccaggcacaggcccaggtcgccatgcatcaccagcacaataacaacaacaacaataacaacaacaacgaggacgacgaggacagcatgaagccgcagtctaagagacagcgcaccagcagtggtagcatgttgggcagcgaggatcaggcaccagtcctggccccatcagtgccagcatcctcggactcgcaggccctagagcggtccggcagcagcaatggattgaccatgccgggaacggcagtcagcaccaatgccaacagcagcagcagcaacaacaacaactttgagctgcgcatgttcatggagatgcagagcaaggagcacatgatgcgcatgaagatcctggaggtgcagttgcaggcggcaaagcacagtcgcgacctagtggagatcaacaagacactggcgctgcagaagctgcagttggagctggccagcaagcgactgcccagttaggaggcagtgcagcagcaaaaggagcagcagcagcaacagcagcagcagcccatcgccgtttcatgttacattagtttatagaaataaagcctgtcaactcggtcacgttcgcaggcagagagcgtgattgggaatcgactagagttagcactagagttagtcttaagttgaaagcaggatccacagctacacatccagacccgacacacagagagacattcctggcattgttgatcagtatttgaaagctagaagcgaaacccgacacacagaaccgaacccaagaaccccagcgaggatcaggaggcgctcggaagtatgccataatcttatgatgatgatgacgatgatgatgatgaatcgcctacctcacaagcacacacacacacacacacacaatatgcacacactcagctagcagacacacacacacagacacactctcttctggcctaaccagcacttgaccaagtcaagtcaagtttagttagtttctagttttagttcgtatgggaaccactctctccaagttgctcaactaccacaaatgtattgtacttacgttcttgacctctgctaccccacaactaacgatttgaacgaacatgaaatgcacacaagattatttttcatagtcctaagagaagaaccttatatatgtcaatgcatcatacacaatcggcagttgtctctgattttgattcttacttgaacttgtatttatttgtatctttgtatagactatgttgatatatatatgaccctatatatgtttgtttcaatgccatattacatgaaagttctttttaattcatattttccgtttgcgctgcaaaacaaattgttaccatatataatatatgatatgtatgtaccctacgtataagcaggcttgaagaaggccgccaactcggcttcagttgtcgtagaagacttctttgtaaagcgtgtaaatgagagatacaaattattttaaataaaatacaaaacaaaacaagcaaatgtttcagctacactttattaattttgttcatggttcatctgtgagccttcggtcttggttttttccaacgattgtatctgcttatccaccttgatgatctttgttgtgacttcgttcttctggctgagaatcttttctcgcaacgacttcagctgttcccgttgctgggtaaatttgcaattaaatttaaatagattactttcgttttttgagatcacaaaccaaccagtttaaggaaatgtatgttctcctccgccctggctttttcgaacaaatgcttggatatgttcctggatacagagatgcatctaataagcgaagccataagtgctcagaacacggaactcacttgttggattgtgaaaactgacacatcctgggtcgcaacagttggaaaagcttttcgaccaacttcagcattgtatccttacggaggaagataatttggaatttactatagtaactgatgaggtatttcaaggtggaatattgacaaacttaaaagtgatagcctaccgtttgataggtcatttttcgagactctttttgaattgctccaacaaatccttcagagctttcaattcctttagcagattctccttgtgtttccttgatttgtggctagttttggattccaaaatcttgatctcctctttcaatttgacgatatcattggcgatttctttaaccctgttcttttttatcttcataaattgctctgaggcctatggaatacccaattctacaaggttattcacaacattaaatagtttcgatacatacaagtttgagaacatagttaagttcctcgcctctgcccttctcggaaaatttgtcagtgaattgacgtctatcatatgtaaaaaaaaaattatttttacgggtcatttgaataataaaatacttacttagcaggaaattcgtttaaattattattcgaccttgggtggaaaatgtttctaccgtggtaaaagtttctatgccttggtaaatttctgtgcaactcattggaaggccaactaatatttagaagatttacaaataaagtttggataaatttccagtactacataccaaactctttcttgacatagcacctgaggttgaaatagcctgttgcacgatgccgagcctaagattcgtgcaacaggaaacatggcttcttaagtt

SEQ ID NO: 11246 - DNA, 2838 bp, DROSOPHILA
caagttcattgggttttcgagtgcgtcccgcgaatcgctttcgtttggtgcggaatttggcacaagttttgtatgctcaactactgggaaggccaatctggggcttctaattccactgtgcgggtaatttggggactcttgccagttactagttacctcccaatacgaatcactgatttctcacctcctgccactcgcttcttgcttccgttgcaggtcaacaaacagtattcggccaccgatctggaggcttttatgaagattgccgccaactggcaaaattccaatcacaacttgctggagggcgtcgacataaagacggaaatgacacagtacatgaacagtccttccatgaacatgtacaagaagagggaacgcacccagaactggaaccaccaggagaagaaatacctactcgatctgtgtcgcaaggacatgcgcattatcgagaacaagagattggatgccggtctgaccgccgtgaagaacaaggcatggaagattatccaccagaagttctccaatcagtttggcaccgatcgcacctgcaatcgcctgaaggaacagtggcgtcgcatgaaggcatgtactcgcaacgagatcctggactacaataatcgcctggccaggtttggagcagaggtggccgatcgcaagaagccatctccgttcaccttcgaggtgtgggatttcatgcaggaggcgaagaaggcatgcaaatcggaggccctggatggcattgattactctaagattccactggccttggaggagggttttgagtatcgtgaggattacaaattcaatcccgaagaccacgacatggatgacagccgcacaccgccgcaggaactgtgcgatgtggacatcaaggaggaggagaacaacgagaccttcaacgagaccttcaaccatcaccacctcaaccagagcgacatccttggcagcggcgagcgtctcagtgtgtcgcctaatcacagcatcagtcgcaacgggatccacgaggccgagagtcccgccacgatttccacatctaatgtcctggactcgagcggtgcctatatggccggaggaggtgacatgtccggcttccaggccaacttcaacatgaacaacatatccgccacgctggaggcactgaatgccctccgttctggccaatttcccagtgcagcagcagcggcagcggccgccattcaccagcaccaggcacaggcccaggtcgccatgcatcaccagcacaataacaacaacaacaataacaacaacaacgaggacgacgaggacagcatgaagccgcagtctaagagacagcgcaccagcagtggtagcatgttgggcagcgaggatcaggcaccagtcctggccccatcagtgccagcatcctcggactcgcaggccctagagcggtccggcagcagcaatggattgaccatgccgggaacggcagtcagcaccaatgccaacagcagcagcagcaacaacaacaactttgagctgcgcatgttcatggagatgcagagcaaggagcacatgatgcgcatgaagatcctggaggtgcagttgcaggcggcaaagcacagtcgcgacctagtggagatcaacaagacactggcgctgcagaagctgcagttggagctggccagcaagcgactgcccagttaggaggcagtgcagcagcaaaaggagcagcagcagcaacagcagcagcagcccatcgccgtttcatgttacattagtttatagaaataaagcctgtcaactcggtcacgttcgcaggcagagagcgtgattgggaatcgactagagttagcactagagttagtcttaagttgaaagcaggatccacagctacacatccagacccgacacacagagagacattcctggcattgttgatcagtatttgaaagctagaagcgaaacccgacacacagaaccgaacccaagaaccccagcgaggatcaggaggcgctcggaagtatgccataatcttatgatgatgatgacgatgatgatgatgaatcgcctacctcacaagcacacacacacacacacacacaatatgcacacactcagctagcagacacacacacacagacacactctcttctggcctaaccagcacttgaccaagtcaagtcaagtttagttagtttctagttttagttcgtatgggaaccactctctccaagttgctcaactaccacaaatgtattgtacttacgttcttgacctctgctaccccacaactaacgatttgaacgaacatgaaatgcacacaagattatttttcatagtcctaagagaagaaccttatatatgtcaatgcatcatacacaatcggcagttgtctctgattttgattcttacttgaacttgtatttatttgtatctttgtatagactatgttgatatatatatgaccctatatatgtttgtttcaatgccatattacatgaaagttctttttaattcatattttccgtttgcgctgcaaaacaaattgttaccatatataatatatgatatgtatgtaccctacgtataagcaggcttgaagaaggccgccaactcggcttcagttgtcgtagaagacttctttgtaaagcgtgtaaatgagagatacaaattattttaaataaaatacaaaacaaaacaagcaaatgtttcagctacactttattaattttgttcatggttcatctgtgagccttcggtcttggttttttccaacgattgtatctgcttatccaccttgatgatctttgttgtgacttcgttcttctggctgagaatcttttctcgcaacgacttcagctgttcccgttgctgggt

SEQ ID NO: 11247 - protein, 530 aa, DROSOPHILA
MLNYWEGQSGASNSTVRVIWGLLPVTSYLPIRITDFSPPATRFLLPLQVNKQYSATDLEAFMKIAANWQNSNHNLLEGVDIKTEMTQYMNSPSMNMYKKRERTQNWNHQEKKYLLDLCRKDMRIIENKRLDAGLTAVKNKAWKIIHQKFSNQFGTDRTCNRLKEQWRRMKACTRNEILDYNNRLARFGAEVADRKKPSPFTFEVWDFMQEAKKACKSEALDGIDYSKIPLALEEGFEYREDYKFNPEDHDMDDSRTPPQELCDVDIKEEENNETFNETFNHHHLNQSDILGSGERLSVSPNHSISRNGIHEAESPATISTSNVLDSSGAYMAGGGDMSGFQANFNMNNISATLEALNALRSGQFPSAAAAAAAAIHQHQAQAQVAMHHQHNNNNNNNNNNEDDEDSMKPQSKRQRTSSGSMLGSEDQAPVLAPSVPASSDSQALERSGSSNGLTMPGTAVSTNANSSSSNNNNFELRMFMEMQSKEHMMRMKILEVQLQAAKHSRDLVEINKTLALQKLQLELASKRLPS

SEQ ID NO: 11248 - DNA, 4413 bp, DROSOPHILA
gagatcgcaaaaatgagtctatttcgtcaataaaaataatgcatggctcgattcgcgatgcaagcgagaagacagcagaagtcaatttctgggattccccgtaccacttgtcggtaagaatggcgacgtccaagttgataaagcgcattcccgcctcttttgccgtcgccttcgctatcagcgtctttccacagcccggtggtccatggagcaggacgcctttgggcgcctgccacagcttcgaatgcttgaagagatccttgtgctggattggcagcaccaccgattcccggagctcctgaatgactgaatccagaccggcgatatcggcccaactgactgttatgtcggcgggaacaacaagatgtgacgcaatcataagctcgtagtcgctaaactcttgccctcttagcttgaagccctcctgctcggctagcctgcatggaaaaggtttacacatgtacaatatatgctatatgagtctaatataaacctcttaagctgctcctcagccagaactttggcctttttcttgtttttactggtcggatccatctggttcatcatccatttcaccgaataatatgtgatcagcgaggccacagacaggcgaaccagtacctggaatatctgccccttgcttagatccgatccgcccagtccgaagttgtccatgtttctgcagatattctatttagagcaaatacgttggcctgcacgaatctaatctttcttgttcttattccccatgcacaccgacgacagtgtgaccaggtgctccgactgaaattgacatcgataagctcaaaattgctgccaactgaattcaatttttgttagcctattccttttccactgttccgaaaatattttttcagcttaaaataaaaagattttttttttttttaattttgagtattaacatattgggcatatattaagtgagagcattgtgaagcatgaagattaaaacccacaaattcaagtgacaattttgctcttagggtgtatagtgcctggggtcaatactccaaatcttcaacttggcgtcgatccacggacgaagcttggccacgctggcgtacactccgggaatgttcacctcgccgcatccgatgccccaggcaacaatgccggcggacttgaagcggttcttctggccagcaattggacacaccagtggggagccaccatcacccttgcaggtgtccttgtccttctcaccgccggcgcaaatgaagctgtcgtgcagaatgaaatgcctgccgagtcgagtttcgcgcagattcgtctcgcactgctgctcgggcaccacgggcatgtcgaccttcttcaggataacctgatattccccatccttgccgaacttgttcttgccccagccggtggcatagcagcgatcgaaatcgaatttatcacccacattgggcaggcaaacggtctgaatgttctcctggagggtgaatggactttccaacagcatgacagccacatcgttatagagcgatcccttgttgaactgctcatggtagattatttccttgacatatcggtcttcgtgccttctgatctcagtctgcgtttgcgtatcccattcgccagctctcactaaatgccagttcataattagatctcatagatggcatagatggcatgtacacttaccaacaatgctactgggctgtttgttgtgaacgcaatgcgccgcggtcagaaccacattgggagctatcaatgctcctccacattcgtacaggttaaggttgccttcttcccggagaatggccagcatccaggggaattcgccgaattcggcctcctggttgacagctccagtgatcttaaagccaacgccgttgggattttggtaaccgcagccctcgggatgatcaggcttaaactcgaaaatcggatcttttctcttaacaaataaaattatagtttaatttaagtaatcaaagcttattggtatttatgtatgtgttaccttgttgggcagatcacagcaaagatccaaatagttcttgcattcggcgtccgtaccaagtcgaatgtcaatgataccatcgccactggtgttaatcgtatcattggcgcacaaccagcgaggaacacactccttttgatcgccacaggactggtactgcgttgaactcgatcctccgttttcggatcccgtgctaccggacgaatccttggggttcaccactggcgggggaggggatgatggtttgggtgtttcgtccgttttaaagatgtccgatatcaatttgtccaaggaagagtcctgggcaccacaggaaaatatgcacaggcatattactaggcaatttagtaatatcatattcctggaaagcaaaattaaatcatgctctttacatatttacataattaaggtcagaaagctcacttattcgaggaaagagatgaagatgaaggtaagcaaagtgagtaaagctcgagtattggtaatataataatgattgttattgctggaatatcgcacttaaaccggataaaaggtgaatgtgattcccccaaaacagagtgacacattttaatggaagggagacgcggatacgaatacgtttatgtttatgcggcgaacaattaacctaattaactctagaatgtattgtcttatcagtgaggctttgctttcttttttgaatactaaaattccgagcaaatatatacatatgtacgtattgtttcttttagatcgcctcattatcaatcctgattgcttttttgtttaaatatgacttttggcgataagaaatgctaatgtattgcggtgggtcaattttcgctgtcaataaaaacaaagcatgtataattactttaaaacacaaaaatagtttcttatgtgtaagcgcaatccctccatttttcgcaagagttaataataagttataacacactaattaattgccatttacacacaaaggttcaccatttttgctaacaatatgttccttgcaaataaaatagggcaaaaactggttttagtttcgagtaaacttagcattatacaattcttcttcattaacatatataaatgtattcccattgccgctgatttgtgctcataaaagtacgtgaggcggtgatattttgtacactttattcattgaactttaagatctttttgattgattaaaatatgtatatacacatgtacatacatatatggatgaaaaatgtattgtagatgttacaagacatagaaaccaccaaaaagattaaactctatcagatatccacataactgaactacacattttcaataaattgaatttgagtccaattttatttagtataaagtgtactctattagtaagacttacttaatttatcaaagtagcgcaacgttcgctgagcaatgaagaaaacactcaactgaattgatttcttattcaatcttaagtctcagccgatgatcttctgacgagaagctttgaaagctggttccaattgaagttcccagcttacgtattacacagcggaaaaccagttcaaagttttattttattttataaatttatagataataaacatacacaaattatgtacgtatatttgttattaaaaaccgttttaatggtttagcgtgtttgtaaaatgcgatttcaaatatttatttatttttattctcgagccaaggaacaactggaattgaagcccgataacgatagctgtgcgacaaaatcgaaagcatcagtgtgtccgtgagtttcgcctctagacctgtgtgtgtgacatttgatgcgcctacacatacatatgatgaacaggaattctttttagttcatcaaatgaatacaaagtaaagtaaattgaaaggaagcgccgatcgcagttgttcagtattcagagaaacatggagccgtttacccataatgatggcaatcgcgacgaactaataattcagcagaaacgggatattgaaaaagaggtgagtctgcagaaacacttacacacaatagcgacaatgaaccgagaaataatgccgaatttcaataattgcagatcagcgacacaactcccttggtcagcgagcagttgccactcacctgcttgtatgcggaatacagtggcgacgagatcttcaccgccaagatccaggatctgtccaaaaagtacaagttcattcgccgcacccgccccgatggcaattgtttcttccgagccttcgcctactcctacttggagtacttgatctcaaacaccagtgcctaccaggagttcaaaaaactggccgaggagtccaaggagaagctcgttcagctgggatttcctagttttacattggaggactttcacgaaacggtatgtttagccgtacaaatgcaaaacgaattccctatgcttatgcagccttttgtatgtccagttcatggaagtcatcca

SEQ ID NO: 11249 - DNA, 1288 bp, DROSOPHILA
aatcaattcagttgagtgttttcttcattgctcagcgaacgttgcgctactttgataaattaagaatatgatattactaaattgcctagtaatatgcctgtgcatattttcctgtggtgcccaggactcttccttggacaaattgatatcggacatctttaaaacggacgaaacacccaaaccatcatcccctcccccgccagtggtgaaccccaaggattcgtccggtagcacgggatccgaaaacggaggatcgagttcaacgcagtaccagtcctgtggcgatcaaaaggagtgtgttcctcgctggttgtgcgccaatgatacgattaacaccagtggcgatggtatcattgacattcgacttggtacggacgccgaatgcaagaactatttggatctttgctgtgatctgcccaacaagagaaaagatccgattttcgagtttaagcctgatcatcccgagggctgcggttaccaaaatcccaacggcgttggctttaagatcactggagctgtcaaccaggaggccgaattcggcgaattcccctggatgctggccattctccgggaagaaggcaaccttaacctgtacgaatgtggaggagcattgatagctcccaatgtggttctgaccgcggcgcattgcgttcacaacaaacagcccagtagcattgttgtgagagctggcgaatgggatacgcaaacgcagactgagatcagaaggcacgaagaccgatatgtcaaggaaataatctaccatgagcagttcaacaagggatcgctctataacgatgtggctgtcatgctgttggaaagtccattcaccctccaggagaacattcagaccgtttgcctgcccaatgtgggtgataaattcgatttcgatcgctgctatgccaccggctggggcaagaacaagttcggcaaggatggggaatatcaggttatcctgaagaaggtcgacatgcccgtggtgcccgagcagcagtgcgagacgaatctgcgcgaaactcgactcggcaggcatttcattctgcacgacagcttcatttgcgccggcggtgagaaggacaaggacacctgcaagggtgatggtggctccccactggtgtgtccaattgctggccagaagaaccgcttcaagtccgccggcattgttgcctggggcatcggatgcggcgaggtgaacattcccggagtgtacgccagcgtggccaagcttcgtccgtggatcgacgccaagttgaagatttggagtattgaccccaggcactatacaccctaa

SEQ ID NO: 11250 - protein, 406 aa, DROSOPHILA
MILLNCLVICLCIFSCGAQDSSLDKLISDIFKTDETPKPSSPPPPVVNPKDSSGSTGSENGGSSSTQYQSCGDQKECVPRWLCANDTINTSGDGIIDIRLGTDAECKNYLDLCCDLPNKRKDPIFEFKPDHPEGCGYQNPNGVGFKITGAVNQEAEFGEFPWMLAILREEGNLNLYECGGALIAPNVVLTAAHCVHNKQPSSIVVRAGEWDTQTQTEIRRHEDRYVKEIIYHEQFNKGSLYNDVAVMLLESPFTLQENIQTVCLPNVGDKFDFDRCYATGWGKNKFGKDGEYQVILKKVDMPVVPEQQCETNLRETRLGRHFILHDSFICAGGEKDKDTCKGDGGSPLVCPIAGQKNRFKSAGIVAWGIGCGEVNIPGVYASVAKLRPWIDAKLKIWSIDPRHYTP

SEQ ID NO: 11251 - DNA, 8267 bp, DROSOPHILA
atacgaatggaaatatgtagtcatatttgtttaactcagttgactgggtttgcttgtcgtttgtggttctgtgattgttgatgtttacgcatatcggcacgcaatattgtccatataacccatacgccgtgtgggctcggccattatttttccatttaaaacaggtcggcggcaccggctgctgacgcaaagtggccagatatgagatatgcatttaattagctggactcactctcacccagcttagggtgcattcctaaaccacttttcgcctcccgcgacctatccatatgtatgacaattatactactgatcttggttagcggcatttgaacagcaagtactcgagtatttgaatgccttgggctctgggcatcggttcggtcatatcgctacccacctccaaacagtttaagatggaatccactgattgcgactggtgaaaaattatccatttattgaaatggagctgctaagtttcttttaattggtgttattaaaagatgagggatatgaccgatttcttcatattgacagctttcttttaaaacaaatttaatttatgatacaagtgaaaccctagtaatattgaagcaacatattttaacaatttcaactttagtgatcactatcagtaagtattaagaagtctataaaatataagttaattgacacgtaattaggtatttaattggctggcgataggattgataccttttcaaaagtctagtgtgccatatcgaaaagaaatctataaataatttatgctttataaacggaactaaacaaagtattgcgatgtatgcaatatacttttcgttatccccatttctaattatatttgcacggcgcaactgaggttaaatagtttgacaacttattgaaaatcccaattaaaattagtcttgcaagctatttagccgtaggttaaaagatctgcattatgtaagcaaaatacaagcaaatatagataaattattatgaatacacaaaggcaaaatggttttcaatttaaacatttaatcaatttaaaatgaatagtaagcttttgtgaaaatcagagtacatataggtcaatcgatcctaaccaatcgagttcattttggaaaaatatgttttagagaaacaacgaagcctggcttctttccagatcactttcgtttaatagcttcgtccgaagagcgtgtagaacttgggcttgttggtgcagctggggttgatgcacttatcgctagccgcgatgggagctggttgatcgaagggtatacacagcgacttggcacccatggcaggagctcctggctcggcctcttcgccgcgggcgctgtccgccttgattttgtcctcgcaacttatctcgccgcagaagggagccaaaaggatgtttttctgctctaggaaaccacagaagtccgtccagttggtcacctttttcgtgtgactggtcatatcctcttgcgccttattaagcatgctctcgtgaatggtttcgagcagcgcgggtatcttcttctccacatcggccagcggtatggtgatcttttcgacagtgtcgcgacgcacggccaccagttgttgggccttcaggtccttgggacccacttccaagcgcagcggcacaccctttagttcccagtgattaaacttccagccgggagagtagttgtctcggtaatcaccctcgcaacgaactccaccgccgacaaggcgcttctcaagggccttgcaagcgtcaagcagctgcgcccgctcgtcatccttcgtgttaactgtgatgccgcagggcaccacaatggcctgaatgcaggcaacatgcgggggcaacaccaggccctggttgtcggcatgcaccatgatcatcacgccaatagtgcgagttgtaatgccccaggagttctggtaaacgtacttcttctgctgcgtttcagggtcctcgtaaacgatttcgaacatcttagagaaattctggcccaaatgatgactggtagcaccttgaatggcacgtcctgaagccgagatgaatgcctccacggtggtggtgtagtcaccaccagcgaacttctccttctcagtcttgcggcccttgaccacgggaatggccagcagatgggtgtacaccagggcataaagatcgagaatgtcaagaacttccttggcggcttcttccttgtcggcgaaggcggtgtgaccctcctgccacaggaactcgcgggtacgtaggaaaggagttggctgcttgaattcccagcgctacaacataaaacatgaggcaatggttagcaaacgataaattaggccaattcaaggcaatacttacgacaacgttattccactgattgaggcgaatcggcagatccctgtaggattgtacccatttggcgtaggcggggtacatgactgtctcggaggtaggacgcacggcgattggctcggccaaatcagagtcaccggacttggtgacccaggccacttccggagcgaagtccgcgatatgcgtcttctccttctccagcacagctttagaaacgaagatggggaagtagcactccttgacacccatgcgtgtaatctcagcatcaaaccaagtcttgattgctttccagatggcaaaggaccattgacgcagaatgtagcatccagacacgtcgtaatattcgatcatctcacccttggtgataacctgcgagtaccagtcaggcaagttatcctccttggtagcctccagacccaggcgtgtttgctttttcacagctccggaagcatcggcagcaggttccttcttcaccggctttgctggctttggttgtgcctcctttggcgctttcttggcggaacctcctccgccgccgcctccgcgacctgctacggggaaatcggtgcccgtgacctccttgtacttggctttgagggccaacaacttggccacttcagcatcgatgacctccttggctgccttgttacctttcgcggcgcgtaccttctccccctgagcattaatctcctgggtgagttcatccttagctggcgatgccatcgaaacgggactagcttccttttttactacagctggttcagatttagcgtctggcgtccaatccttaccgcttagcgttttatattcacctttaagagcaagcagagtcttaacctcaggatcgattacgttcttggctgccttctctgatttcaatttcctgatcttatcaccttgggcctgaatcttgctcaatacactgcctacgtcactgcctgaatctccaccagtaagatcgatcacatttacagtggtgggagcgggtgccacagtacctggtttccactcttgaccagttagagatttgtagtccgttttcaaagccagcaaaagtttaacctcggcttcaacaagggatttctccgatttcgccgatttcaattgacgtattttatcaccttgttgggcgatcttattgagcagtgtgtttacagtaaggacagaagctgggtccggattcttctcctgcttgacttttacaggagctgctgctggagctggagctgtggtacctggtttccagtcactgccggtggctgctttgtagtcagccttcaagctgagcagcgtctttactgcagcatcaacggtggccttatcggctttagctgacttcagctcccgaactttgtcaccctgggcagtgatttggctaagaatttgggctaccgaatcgttgacaccgacagagggagcagcagatgcagatggagcggcagtggtaggtacagtgcctggtttccaatcctgaccggtgagagtcttgtactgagccttaagttcaagaagagtttttacagcagcgtcaatctctggtttgctagccttctttccctttagatctctgaccaaatcgccttgtttgacaatgctggcattaactgaaacggcgtcgttggcagaggatgagctggcggcaggtacaggcgcagaagaagcagatgtttgccctggcttccaatcctttccagtagctgatttgtagtccgctttcagagcgagcagcttcttcacagcaacatcaatttgatccttggctgcttttttagactttaggtctcggaccagatcgccttgctggctaatttggctgtccaattcagaagcttggccggaagaacttacaggtgatgatgcctttttctgtaaaagaaatacatatttgttgttaaatctgataacgaggtaaagtgcagcaatgtattaatatttttcaaaagctctttgcaacgtcagcaagggctacatcttcaacgagcctctcttttaatttgttgtctttgccttactgaggttgacgataacgaaccacacgctaggtagttcagcatacaactggttttcttccaagaagaagactacgtcgttaccaacgcggcacataataaagagaaagtgaaagagcttcagagagccgctgtgggagagcgaagaagtttggagagctccaaacagctgattttctagttaattgtacttcctatgtcgaatattgaataccctattttatagtattatctatgcaaagcacaaattaactcaccgtcgccttggcatccggagcattgactttcagacctgaagttggcacatccttcgtatgtccatcaggtatagagaacaaaacaatgggagaaggaacatttgtgtatccactgggcggagcataagcgacgtccaccttaaagaagccacgcctctgtaactggatgatatcgcccttcttgcacttcttaagttcaggatcgcccagcatgggaacctcatcgcgtgtcttgtggccaataaactgcttaaagtcctcgtccttgcccagaacagctttgctgatgatattgtcaaagtaaacgcagaaagtgggtggataggcgctgggatcatcttccacagccaaccaggtgagtttaagagtctttttgaagtccttgttctccaaattgagagcagcatcaacggaagtaatgttgccagatgcatccttgtttaccttcctgatgaggatgttgccccagttaatgaaagttgcattttcaccctcctttaaggcttcggcatcaacgtagtcgatgtatatgcggggacccaacaagacggtctttttgcccagagattcatccttgggatgcacggacacctgaatcctttccaccttagcgccagccacattaacaataacgcgcttctccttctccaaagctgtgtaacgaggagcaatcggatcgatgaccttcttgttgaaggcccagatcttatcccagttcatgaacactacggatttactgctgccttgggcaatgataaactcctttaaaccttccactgtcatgccgcgtcggatgataccacgcaccgttgggaatcgaggatcatcccagccgtcaaccagaccagaatccacaaaccacgtaagtttcctcttggacaacacagtgttggtcatgttcaatcgactgtatgaccagatgtacggttttcttagcttcagggcatcaatgaaccagtagaactgatcatctcggtcatggtactcagtggtgcgcagggtgtgggtcacattttcgatggcgtccacaatggggcaggcaaaatcgtaggtggggtacaccctgcaaatgataaacgatacaactgattttctatgacaatttttttgttatactcacttgtatttggttcccgtgcgtggatgtggctcgttcttgcagcgatagatggtggggtcacgcatgcatccgttgggagagctcatgtcgatcttggcgcgcacacagtatttttgacccttctcagagcctttaaccatctcctcccatagcgaaagatttttctcgacagctaaaatagaaaacgtgaataagtatgtgtaaaataacattttttgctcatacatcatggtgaaatataatataagtgacaaatttaaccgttttaaatttcatcatatagcgctaaaaatatagtttagttattaagataaacttacagttggatcgatttgcagactcgacgcgttgctcgcgttccagcttcatttgttccggaggggtatcatccacataggccttgctctctttgataagccggacacagtagtcgagcattaggtcgaagtagttcgatgtgtgcgtaaatacgtcgggcttgatctgcagctgctcgagatcgccgagaatgacattttcgaactcgaccgtctccttggcgggattcgtgtcatcgaatctcatgatcagcgttccttggaacgccaaggcgtagtactgattcagcagtgccgccttagcatgaccaatgtggagatagccagaggcttctggcgggaagcgcacaaccaccttgcccatctcggctcctggcaggtccacgaacttgccctcctgcttgcgctcgcccgttttggcaggtgtctgctccttggaagactgtggactcctcttaacctttgcatcctctggcagggactgcagcaccttctggatcaacggctgggcggtgatgaggtcataccaacgctgcacgtgctgaggaattcccttagcggcgaggaactcatagcgcgagtgcatctcgttgaacagtgcaaaatcggcgatagtcagcttgttggccaccaggtaggtcaccggggcaatggacttgtccaggaaggagagagcccaggatatgtcatcctcgcaggtcagtgagaaagacagccagtgatcaatctgtgtccgttcgatggccgtttccccgtacagcttgtagtccggagcagcgcgagcgagggcgcgcagcacatcgttgttggagtggcacaccaacaggcgattatctgggaactgcagcgaagtctcctccttgctccacactatctccacgggcaccgtgccattgattaggtgcgccgtcgccaggccacctagttgaatgactcaattaatatcacacgataccggggctgatgcaataaaagagggttcgaatggattgccgaatatattgtgtacataaatagaccccgatgcggatataacctcactaagtgcaaatcctccgggcactgaaggtcacagcagccggcatccgtttgatactcacttatgggcggattgttaaggttcgctttgagctttattgacatgttcgcaggttgtttgtttgcaattgaaatcaaactgatgaaatttcggcttttaaacggcacgagtacggccagctgctaacgtctacacagtccaatagagatggacaaggagaactgcagttgccgtgcgatagttctctgtgaatgataaatatcgcacggatcagttacagcgaaagattattaataactttcaaaatattaaatattatttcaacacaacttacctatcaacacaattagatctaccttaaaagtggtaaataatttctgaatacaaaaataatgtttaatcattatattactagctctgtttgcttgaagcccactgtacttgccattcccttgaacacgtcggcagatgtagtgcgaatggcagcagtgcacgaagaagaactttctatgtgtgttttgctcgctggctgcatggaaaaataagatttttccatatattttgtaatcccagcccacggaaaaacttcaccacacagagaaaaacaaaaataaatggtaaggcttaagaaaaatttgcggaaaaagtgattttttcgttatcgaatgttatttgtgtgttgacgatgcggtggctccaggtgtacaagtatgtgtgtgttggtggggctgctcaatgactgtgtcggtgaaaattgggagcttcgctggccttaaaagatatgaaaaatgcattacgaccgtaaaatcaatatacgttccggacttacgaacttgctaccttattccagatgcttttcatgctgctgtttagtcggcagggcaaactgcggttacaaaagtggtacatggcctatccggataaggtgaaaaagaagatcacccgggaactggtcactacgatactggcccgcaagcccaaaatgtgctcctttctggagtggaaggactgcaaaattgtctacaaaaggtgggtaaaatcttatgaatattctaaagaataattataatacatgcattcacgtttgttgttttataggtatgccagcttgtatttctgttgcgccatcgagcagaacgacaacgaactgctgacactggagatcattcatcgctatgtggagctgttggataagtacttcggcagcgtaagtt

SEQ ID NO: 11252 - DNA, 5416 bp, DROSOPHILA
tgtccatctctattggactgtgtagacgttagcagctggccgtactcgtgccgtttaaaagccgaaatttcatcagtttgatttcaattgcaaacaaacaacctgcgaacatgtcaataaagctcaaagcgaaccttaacaatccgcccataagtggcctggcgacggcgcacctaatcaatggcacggtgcccgtggagatagtgtggagcaaggaggagacttcgctgcagttcccagataatcgcctgttggtgtgccactccaacaacgatgtgctgcgcgccctcgctcgcgctgctccggactacaagctgtacggggaaacggccatcgaacggacacagattgatcactggctgtctttctcactgacctgcgaggatgacatatcctgggctctctccttcctggacaagtccattgccccggtgacctacctggtggccaacaagctgactatcgccgattttgcactgttcaacgagatgcactcgcgctatgagttcctcgccgctaagggaattcctcagcacgtgcagcgttggtatgacctcatcaccgcccagccgttgatccagaaggtgctgcagtccctgccagaggatgcaaaggttaagaggagtccacagtcttccaaggagcagacacctgccaaaacgggcgagcgcaagcaggagggcaagttcgtggacctgccaggagccgagatgggcaaggtggttgtgcgcttcccgccagaagcctctggctatctccacattggtcatgctaaggcggcactgctgaatcagtactacgccttggcgttccaaggaacgctgatcatgagattcgatgacacgaatcccgccaaggagacggtcgagttcgaaaatgtcattctcggcgatctcgagcagctgcagatcaagcccgacgtatttacgcacacatcgaactacttcgacctaatgctcgactactgtgtccggcttatcaaagagagcaaggcctatgtggatgatacccctccggaacaaatgaagctggaacgcgagcaacgcgtcgagtctgcaaatcgatccaactctgtcgagaaaaatctttcgctatgggaggagatggttaaaggctctgagaagggtcaaaaatactgtgtgcgcgccaagatcgacatgagctctcccaacggatgcatgcgtgaccccaccatctatcgctgcaagaacgagccacatccacgcacgggaaccaaatacaaggtgtaccccacctacgattttgcctgccccattgtggacgccatcgaaaatgtgacccacaccctgcgcaccactgagtaccatgaccgagatgatcagttctactggttcattgatgccctgaagctaagaaaaccgtacatctggtcatacagtcgattgaacatgaccaacactgtgttgtccaagaggaaacttacgtggtttgtggattctggtctggttgacggctgggatgatcctcgattcccaacggtgcgtggtatcatccgacgcggcatgacagtggaaggtttaaaggagtttatcattgcccaaggcagcagtaaatccgtagtgttcatgaactgggataagatctgggccttcaacaagaaggtcatcgatccgattgctcctcgttacacagctttggagaaggagaagcgcgttattgttaatgtggctggcgctaaggtggaaaggattcaggtgtccgtgcatcccaaggatgaatctctgggcaaaaagaccgtcttgttgggtccccgcatatacatcgactacgttgatgccgaagccttaaaggagggtgaaaatgcaactttcattaactggggcaacatcctcatcaggaaggtaaacaaggatgcatctggcaacattacttccgttgatgctgctctcaatttggagaacaaggacttcaaaaagactcttaaactcacctggttggctgtggaagatgatcccagcgcctatccacccactttctgcgtttactttgacaatatcatcagcaaagctgttctgggcaaggacgaggactttaagcagtttattggccacaagacacgcgatgaggttcccatgctgggcgatcctgaacttaagaagtgcaagaagggcgatatcatccagttacagaggcgtggcttctttaaggtggacgtcgcttatgctccgcccagtggatacacaaatgttccttctcccattgttttgttctctatacctgatggacatacgaaggatgtgccaacttcaggtctgaaagtcaatgctccggatgccaaggcgacgaaaaaggcatcatcacctgtaagttcttccggccaagcttctgaattggacagccaaattagccagcaaggcgatctggtccgagacctaaagtctaaaaaagcagccaaggatcaaattgatgttgctgtgaagaagctgctcgctctgaaagcggactacaaatcagctactggaaaggattggaagccagggcaaacatctgcttcttctgcgcctgtacctgccgccagctcatcctctgccaacgacgccgtttcagttaatgccagcattgtcaaacaaggcgatttggtcagagatctaaagggaaagaaggctagcaaaccagagattgacgctgctgtaaaaactcttcttgaacttaaggctcagtacaagactctcaccggtcaggattggaaaccaggcactgtacctaccactgccgctccatctgcatctgctgctccctctgtcggtgtcaacgattcggtagcccaaattcttagccaaatcactgcccagggtgacaaagttcgggagctgaagtcagctaaagccgataaggccaccgttgatgctgcagtaaagacgctgctcagcttgaaggctgactacaaagcagccaccggcagtgactggaaaccaggtaccacagctccagctccagcagcagctcctgtaaaagtcaagcaggagaagaatccggacccagcttctgtccttactgtaaacacactgctcaataagatcgcccaacaaggtgataaaatacgtcaattgaaatcggcgaaatcggagaaatcccttgttgaagccgaggttaaacttttgctggctttgaaaacggactacaaatctctaactggtcaagagtggaaaccaggtactgtggcacccgctcccaccactgtaaatgtgatcgatcttactggtggagattcaggcagtgacgtaggcagtgtattgagcaagattcaggcccaaggtgataagatcaggaaattgaaatcagagaaggcagccaagaacgtaatcgatcctgaggttaagactctgcttgctcttaaaggtgaatataaaacgctaagcggtaaggattggacgccagacgctaaatctgaaccagctgtagtaaaaaaggaagctagtcccgtttcgatggcatcgccagctaaggatgaactcacccaggagattaatgctcagggggagaaggtacgcgccgcgaaaggtaacaaggcagccaaggaggtcatcgatgctgaagtggccaagttgttggccctcaaagccaagtacaaggaggtcacgggcaccgatttccccgtagcaggtcgcggaggcggcggcggaggaggttccgccaagaaagcgccaaaggaggcacaaccaaagccagcaaagccggtgaagaaggaacctgctgccgatgcttccggagctgtgaaaaagcaaacacgcctgggtctggaggctaccaaggaggataacttgcctgactggtactcgcaggttatcaccaagggtgagatgatcgaatattacgacgtgtctggatgctacattctgcgtcaatggtcctttgccatctggaaagcaatcaagacttggtttgatgctgagattacacgcatgggtgtcaaggagtgctacttccccatcttcgtttctaaagctgtgctggagaaggagaagacgcatatcgcggacttcgctccggaagtggcctgggtcaccaagtccggtgactctgatttggccgagccaatcgccgtgcgtcctacctccgagacagtcatgtaccccgcctacgccaaatgggtacaatcctacagggatctgccgattcgcctcaatcagtggaataacgttgtccgctgggaattcaagcagccaactcctttcctacgtacccgcgagttcctgtggcaggagggtcacaccgccttcgccgacaaggaagaagccgccaaggaagttcttgacattctcgatctttatgccctggtgtacacccatctgctggccattcccgtggtcaagggccgcaagactgagaaggagaagttcgctggtggtgactacaccaccaccgtggaggcattcatctcggcttcaggacgtgccattcaaggtgctaccagtcatcatttgggccagaatttctctaagatgttcgaaatcgtttacgaggaccctgaaacgcagcagaagaagtacgtttaccagaactcctggggcattacaactcgcactattggcgtgatgatcatggtgcatgccgacaaccagggcctggtgttgcccccgcatgttgcctgcattcaggccattgtggtgccctgcggcatcacagttaacacgaaggatgacgagcgggcgcagctgcttgacgcttgcaaggcccttgagaagcgccttgtcggcggtggagttcgttgcgagggtgattaccgagacaactactctcccggctggaagtttaatcactgggaactaaagggtgtgccgctgcgcttggaagtgggtcccaaggacctgaaggcccaacaactggtggccgtgcgtcgcgacactgtcgaaaagatcaccataccgctggccgatgtggagaagaagatacccgcgctgctcgaaaccattcacgagagcatgcttaataaggcgcaagaggatatgaccagtcacacgaaaaaggtgaccaactggacggacttctgtggtttcctagagcagaaaaacatccttttggctcccttctgcggcgagataagttgcgaggacaaaatcaaggcggacagcgcccgcggcgaagaggccgagccaggagctcctgccatgggtgccaagtcgctgtgtatacccttcgatcaaccagctcccatcgcggctagcgataagtgcatcaaccccagctgcaccaacaagcccaagttctacacgctcttcggacgaagctattaaacgaaagtgatctggaaagaagccaggcttcgttgtttctctaaaacatatttttccaaaatgaactcgattggttaggatcgattgacctatatgtactctgattttcacaaaagcttactattcattttaaattgattaaatgtttaaattgaaaacca

SEQ ID NO: 11253 - protein, 1714 aa, DROSOPHILA
MSIKLKANLNNPPISGLATAHLINGTVPVEIVWSKEETSLQFPDNRLLVCHSNNDVLRALARAAPDYKLYGETAIERTQIDHWLSFSLTCEDDISWALSFLDKSIAPVTYLVANKLTIADFALFNEMHSRYEFLAAKGIPQHVQRWYDLITAQPLIQKVLQSLPEDAKVKRSPQSSKEQTPAKTGERKQEGKFVDLPGAEMGKVVVRFPPEASGYLHIGHAKAALLNQYYALAFQGTLIMRFDDTNPAKETVEFENVILGDLEQLQIKPDVFTHTSNYFDLMLDYCVRLIKESKAYVDDTPPEQMKLEREQRVESANRSNSVEKNLSLWEEMVKGSEKGQKYCVRAKIDMSSPNGCMRDPTIYRCKNEPHPRTGTKYKVYPTYDFACPIVDAIENVTHTLRTTEYHDRDDQFYWFIDALKLRKPYIWSYSRLNMTNTVLSKRKLTWFVDSGLVDGWDDPRFPTVRGIIRRGMTVEGLKEFIIAQGSSKSVVFMNWDKIWAFNKKVIDPIAPRYTALEKEKRVIVNVAGAKVERIQVSVHPKDESLGKKTVLLGPRIYIDYVDAEALKEGENATFINWGNILIRKVNKDASGNITSVDAALNLENKDFKKTLKLTWLAVEDDPSAYPPTFCVYFDNIISKAVLGKDEDFKQFIGHKTRDEVPMLGDPELKKCKKGDIIQLQRRGFFKVDVAYAPPSGYTNVPSPIVLFSIPDGHTKDVPTSGLKVNAPDAKATKKASSPVSSSGQASELDSQISQQGDLVRDLKSKKAAKDQIDVAVKKLLALKADYKSATGKDWKPGQTSASSAPVPAASSSSANDAVSVNASIVKQGDLVRDLKGKKASKPEIDAAVKTLLELKAQYKTLTGQDWKPGTVPTTAAPSASAAPSVGVNDSVAQILSQITAQGDKVRELKSAKADKATVDAAVKTLLSLKADYKAATGSDWKPGTTAPAPAAAPVKVKQEKNPDPASVLTVNTLLNKIAQQGDKIRQLKSAKSEKSLVEAEVKLLLALKTDYKSLTGQEWKPGTVAPAPTTVNVIDLTGGDSGSDVGSVLSKIQAQGDKIRKLKSEKAAKNVIDPEVKTLLALKGEYKTLSGKDWTPDAKSEPAVVKKEASPVSMASPAKDELTQEINAQGEKVRAAKGNKAAKEVIDAEVAKLLALKAKYKEVTGTDFPVAGRGGGGGGGSAKKAPKEAQPKPAKPVKKEPAADASGAVKKQTRLGLEATKEDNLPDWYSQVITKGEMIEYYDVSGCYILRQWSFAIWKAIKTWFDAEITRMGVKECYFPIFVSKAVLEKEKTHIADFAPEVAWVTKSGDSDLAEPIAVRPTSETVMYPAYAKWVQSYRDLPIRLNQWNNVVRWEFKQPTPFLRTREFLWQEGHTAFADKEEAAKEVLDILDLYALVYTHLLAIPVVKGRKTEKEKFAGGDYTTTVEAFISASGRAIQGATSHHLGQNFSKMFEIVYEDPETQQKKYVYQNSWGITTRTIGVMIMVHADNQGLVLPPHVACIQAIVVPCGITVNTKDDERAQLLDACKALEKRLVGGGVRCEGDYRDNYSPGWKFNHWELKGVPLRLEVGPKDLKAQQLVAVRRDTVEKITIPLADVEKKIPALLETIHESMLNKAQEDMTSHTKKVTNWTDFCGFLEQKNILLAPFCGEISCEDKIKADSARGEEAEPGAPAMGAKSLCIPFDQPAPIAASDKCINPSCTNKPKFYTLFGRSY

SEQ ID NO: 11254 - DNA, 3193 bp, DROSOPHILA
caattatctaattgtaattactggcagctataatgcttatgaagaaatgacatcaagtggccacattttctcgctctgtagagcatctgctgtggtttgacttgcgtttgcttggctccaaagacaacaatgaataaatttaattttagctgcggccgacctaccgcacataactccaagttgttgccgttgtcgttgttgctgtcgttgttcatgttgactaaacacctttgagttggtgcctcgccctctggcagctgtcacacgggttgtatacgttatatttcccccagctctacgacactcgctctctttctctctctctcctcgcttgctccgtctctctcgcaccgagtgcattataactgcattttggttttgatgacgtcgtcaccatcgtcgtctgatttgtaaattatgcttggttcacagggatttcgctggggatctcttagctttcattgtgcatataactcttcgggatattcgaagagcgcaagctttagtcgtagcttttcaccttgcccaaccatgtgactggcgagagagccgaagagagcaaggatgctggtcgggaagctttgctgattttcgctgattacgtaaataaaggcgaagcctggcagccgagagcgaaaaacacaaccaccaacggaatgtgtgcggccagaactgttataaacaatttcactggaacacccgaaggctcactcgtcgtcagccgatggagccgagccgaagcttttcgcgacccgaatcctagtgtttcgttcgtgtgcgtgtgcccgtgtgtgtctacacgaaatggggcgagcagagcagtcgctgcgctgctggaagctctccaaaagagagagagagagagagcgggtgagagcgggagtacggcagagtcctgctgctccggctgcctggcatatccacatcctttgtggtgaaaagtcagtcagaacgggaacgtcgtcgcgagctgtgcttggtagcgctctctggcagctgtgtgtaacgccattttgtaacgcgaacgcaatagaccagtctatggacttgtgtcctgtgtcggtccacaagtcctatcgtccttcgccaaacgtcgtcgtcgctaaacgctaaaataaatcataaattccagcgtgtgtgtgccgccgccaatcgtatcgtatcgtatcggtattgaatcgaatcgcatcgcatcgaatcgcataaaatcaaatcaaaacgggtcaggaaagctgggaaaagtccgagaaaagtgcgtcagcagccgttgaagcaggcacatcgcatcatcagcgctgaaaggtccccggtgtggaaaccacgagacatgataaatttaggcacagatccacagtcaacaacccgcaaagacgatgtgaaaaattaaatcagaaaaagcaaagcaaaacgtttagtatcaagctaagcaagcataagaactcttaatccacaacttcaaatcctctgttcgatttctcaattttacctaatcaagtgtaaggcaacggcaacagaaacagctaaaagcaaagcaaagcaaaagcagaaagcagaaagcaaaagcagaatgcaaacagcagaagcaagcagttcaaagttcaaagcaggcgaacccaaaagcatttttcaagctcaattctgcgatatgaagatgcattgaatcaccggccatcatcggtgtttggtgaatggatgtggttgttttttgaagaatgcttggcttcggtttgctttcgctcttttttaatggataaaacatcgaagagtttttgtcattttttacgtttgcgtttttaaacgggagaagcaccacgaaagggatgtcacagatcctttttagaaagagagaacaaacaaaaaaaaaacggaacaaaacctaaagcataaatgaaaaccaaaagagaagactttcatttatattgattgtatttaaagtgcaaaacatataataaaagcataattaaagcgaaggattttgagcaaatttaatatgaactaagtgaacagatttaacaaaattaagaaatacgagaacaaattcaaatgcatttgtcgctgaaaagacttgaaagtaaatttcgatttaaatacatacatttattgaggacaagacgaagaagcagctgtcaaagcgacgaggagggaaacccgtaaacaaattgcaaccatagtatttaggcttagagaatttaaattataaaaaagaaaacaaacgaagaccccagagatttgcaaaaaaaaatataagaaaaaagaatgaaacaaaagtcaaatgcaaagtaagcaaaaccaaagggttgaatgaaaaacattttagccaattaagccacacacacacacacacaaactgaagcaaatcaacacactcataagcgtaatgagaaaatttaaatgaaaacagcaatgaaaatgtttagttcgtaggaagtacactgaaaaaatacataaagataccatacaaaatccacacatacacataaacgaaaaatagcaaaaatttagtcaaaatgttaaatggtaaactaaatgaaaccgaaataataataacgaagcaaatgattccatgcaattaaattgggctaacagcctccacaaagaatccaatcagcaaatacaagcaaacaaaaattaactcaaagcaaactcaacacgttaaagcgggcgaacattaaattaaactataaaactatgcaaagaaaaccaaataaatgaaagtacataagcataaaaaagcaaaagaaacccaaataaaaaaaaagacaacaccttctagcagaattacaataataattaagaacttcactttgaacactttgaaacaaacacacgcgaatcgatatagttaaacaaaggaagcctattcccagcccaacaaaaaaaaaaaaatcccatagacaaaggcacagttttcgagaactcgattaaaggatacttttgattttcctacgtctcaataccctatggttttcaatttttgtaggacgaatttttagccagacgatgcaaatatataatcgaatacaatgaaaaaattctaccagatgagaaataataattaattggttgtgaatgcagcttggatgttaattcgattcaggaacaatgaaatccccaattgctgaacgtttgtttattttactggccgcacacacagcaggtgtgcgtgtgagtggcattgtcttttttttttcag

SEQ ID NO: 11255 - DNA, 9191 bp, DROSOPHILA
gtgtaacgccattttgtaacgcgaacgcaatagaccagtctatggacttgtgtcctgtgtcggtccacaagtcctatcgtccttcgccaaacgtcgtcgtcgctaaacgctaaaataaatcataaattccagcgtgtgtgtgccgccgccaatcgtatcgtatcgtatcggtattgaatcgaatcgcatcgcatcgaatcgcataaaatcaaatcaaaacgggtcaggaaagctgggaaaagtccgagaaaagtgcgtcagcagccgttgaagcaggcacatcgcatcatcagcgctgaaaataaatgtgtgcgacgcgtgtgagataaattggcaaagcaacagagccaacaacagcaaaaccgaaaacgaaaacgaaaaacaacccctgctgccgatgtaataaatgactgtgccgcaaaatgagattttagtttaattaatcaaatgaataataatcagcactaaatagttgaggccagtggaaagtgaaaaagtggcaagtgcaaaagtgcacacacacacaaatggcggactagcgccggatgtacgggatactgaggacaggacatcggcatcgtcaaggacgaaaaggacctcgcccccgttgctgccgctgtgattcagattcattctggccgcccaacaaggcaacaacaacagcgagcgcggcgatcacagcggcgatcacagcggcaatagtggtgcgatcggtggtgcaccgccatctcttagtggtggtgttagtgttggtgttgcggctgcaggcgatccagcgggtccgggaggcggcggaggaggtggcggcggtggtggtggaggtggcggtgctgcaggaggaaccggaaacggaaccggaggcggaagcggaagcggaaacggaagtgctggcggggcggactgcagcagcgacggcgatcccaagaagaccttctcgctgcactgctgttgcgtgatcgtcgacatcacaccagtggcgcatccaggaggacgcctgacatcggcaacaacggcctcgggaagggatgcgggtggagccgccgctggcggaggtggtggttccggtggtggcggtggcttgggcctcggcctcggcgagaatgtctcccagttggccagccaactctttcgctttggcagcaaaaagcgtccaggcgtttgcatctgcaatgcccagtgccggctgcaatcgctgggtgagaccaaaggcagcctgggagccaccacacttaagacccatcatggcagcctggacagattgctgcaaaagggagacggaattggtacagcaaccagtggtgagcgctcgataagctgggtggtggatggtggtggggcgggctctggtgccctgctcaatgcctcctccgacgaaagtgatgacaagaagaagaaactggacgagggcaaccagctgccgccaccgccacgcccaccctcgcggtcacatgccaagcccacggcgaaggaggaattcgatcggggtgtcgaagtggagaagttctatcaccagatcaacggcgacatcttcgaaatcactcgacgggtgagagctcgcgatgaggagacaatggaacagaaatgcatcaggcggaagggatcggtgaggctaacggaacccacgggtcacgcacacgtgcgaattgagcagagacctcagttgccaccgagacggcagaaaagtgccgaggaagtggccaccatgccaaagagtgccctgcgccaaccgcccgagcaactggagtggttcgatcgccgggctcaacagcgtcactccgcccgatccgctgaaggtggccaggtgcgggaggagactatggagtggctgaagctccaaaaaactgccagtcccatccagccagtgcgcacctcctcgggtcccagtgagatcacagtcctaaaggacgaactgcccgactggctgctcgatcatctgccgcgtaagaaggagcgagaacgcgatcgattgccttcggatgcggacaaggctgtgggttctgcgtatgccaaggccttggcggatcttctcaagaaaccgctgtcccgacaaggttccggaccctgtgagttctcgctgctgaaaactgatattgtggagtggctcaccaagatgcagagcagcagtggaacggataggggcaagtcccgtcggtcgcatcatcgccggaatggcagtggtggcgatgcccagccccgttccaattcccaggaagatgcccaagatcagtcgaagaccagccatcggaagagacactccctgggacacagtggagcagtcagcgaagaggaacagcaacagctcactgccgattggatagcctatcctctccacaagctgcaatccctcggaaagcaacctcctccagctcaaccaccggagagaatgagcattcccagtggctatgcggtgcccagtgccctttcacacactcccctatgccagcggagggaggagcgttcacgggagagaagactgcggcactcggccagcgaagtggtggggagtggtggggcaggagcggcatccacatcaaacaccgcccatctggaacgactgtatgccaagccgcacaaagaacgctatcaatatgtaccgaaaaccaaggagtctagtggtcggaaggagcgttcccgtcgccatcagacccaaaggtccgccacggtctccgatatgtccgcccagcgttccggtggccacaagcgtaagtcttcgagtgcggagagggctcctcgttcaccatccccgggaccctgtacggatcccgattgtccactactgcccatctgtacggatccgcactgccggtaccaggagtgccaggcgaggcagtgcatcacgtcgtcggtgagttcggtaaatctggccaggcatcagcaactggcgcaggtgcaactgcatgcagttccagctcatctggttggagccatgggctccgatgtgccgacgacaccatccacaacggcaacgcctccgccgccaacaggaggtggaactatgggagtgggagcaaccggagcaggagctggagcgacgagcgaacgccgtctggtcatctgccacgattgtcgatcctgtgccccgctgctcagctgccggaatcgcaaatgcctcaatgccgccaagtgcaactcactgcctcgctgtgccgccgacttcaatcgcctgcgcacccagctgtcccagccgcccaccacattggatgacattgagccggcgccactggacgacctggagatgcagccactgccctcgccaccgcatccacatccgcaccatcactatcgcagcaattcacaaccaaacaccctccagagaggagactccgccagttccgcaggaatgggtgcaggagtcggaggtgctggacatggtggattaggaggaccgggatcgggcctcgcttggctggagccaacaaccacgctagtgcaaccactgcccgcctatgtgcaccactccaatggcaagctgatgaaatccgcctcggctgcctcactgaattcccgtcgacggcgtcacaaaaccgtgcactttggcgagaatcttctgcgggaggtgtgccaaaaccggaagctcatcaagacggaggcccaagtgccctccggttcggcgcccatgaaggccaacatccagatgctgtacaacttcgtggagggcgtgttgagcgcctgggtggacgacgacgaggatcaggtgcgctctggtgcggaatcggagccggagcacggtgtggtgcccatgcagccgatccacagatgcaaccgcctgcgttaccagtgcatccggcgcgttgttgaggaggctgccgatctccagggcaccctgaaactgggcaactcccgctatcgccatcgccattggcgcagcaccgccaagcagtgcaacgaaatgttccttcgcaagatttcggacgatgatcgaatgagcctaactaccgccgtttcggatgaagatgatggggaaagtgtcatggcgtcaccatataaagcaaaggcaactggcaccgctgcatcctccttcaattgcacgggagctgttcgcaaagccggcttcctatcggtaaagaaatggttactacgcaagaagcaccagatcgagctggcaagaaagcggggctggaagggctactgggtgtgcctgaagggcaccacgctgctcttctatccgtgcgattcccgggagggccggagtgtggaggcggcgcccaagcacttgattatcgtggatggtgcaattatgcaaccgataccggagcatcccaagcgcgactacatcttctgtctgagtacggcgttcggcgatgcctatctcttccaggcgccctgtcaggttgagctggagaactgggtgaatagcatacacagcgcctgtgccgccgcctttgccaggcatcgcggaaaaactggaacgctacacctgctccaggaggagatcttccggctggagaaggccattgagtcggatcacaagctgaagcacatggccgaactgcagcaatcagttgtcaccgatcaggagacgcgtcatcagatccagacgcagatactgcagtgggaggagaatctggagcggctccactgcgagcagttccggctgcgctgctacatggcctcgctgcaaagtggcgagctgcccaatccgaagtcgctgctgacacacgtttcgcggcccacgaagaacacgctgaacaagctgggcgtgttcacggtctcctccttccacgccttcatctgcgcccgctcgccctcgctgctcaacaacctgctcgccggacgcggggccaccaagcggcgaccgccgatgctgtcgcggtccaacagcggttccagccgtcgctccatgcagatgaattcacgtgacgaaccggaaaaaactttcaaagttgcaatgcccgacaatgcttactcgacagtttatctacgtgatgccatgtctgtggaggaattcctcgccagcgcctgcgcccgtcgcaacctcaatcccatggagcactttgtgcgcgtcaagaagcgacgtgacatggaggatcacaattactttgtgccgcatcgcaacgatctgattgaaaattatctacataatcacgagttcgtggaggtctgcatgaagatcctgtaccaggtggagctgcagcgcacgactctggagcagatgtggggcttctccgtggaggctgagctgatcgagaatgcggaacggcaggacgaactgtgctgctacgtgagtcgcgtggaggacaagagtgtggccatgcacaatggcattatcaaaggagacgaaataatggtcatcaatggcgcaattgtgtccgatctagatatgatgtacttggagagcgtcctgcaggaggaacaatcgctcagcatgatgatgcggtcctcgcgcacggagccaccagatctagtggggatcatgagggttacggacgatatgattgactcgctggtttgtccgccgccgcccacagatccgccggtgatgagcgaggagatgataactggactgattgttccggcccccggttggaatggcactagcaaggatttgtactcgccggaggctgaaagctcgccggccacctcctttgtggatcctgccgcaatggccgcccagctggcggtgggcggcctgggcgtggccaagccaacgtcgcgtacgagcagctttgagattgagaatctgctaaagaccgcggagcaagaaacgcggaaatcgagcccaaccggctcggtcacctcatcggtgtcgaccacggcattaacaccatcacggcagctgaccgatgcggagaagctgcgcaaagtcgtcatggagctggtggacacggaacgcacctatgtgaagcacctaaacaacctgctggagcactatctggagccaatgaaacgcgagacattcctgtccaatgccgagatcaacgctctgttcggcaacatacacgagatcgtcacattccagcgccaattcctgcagaatctggaggagtccttggacctggagccggatttcaacaagttcgagcactgcggccagttcagaaatgtgctctttgcgattggctcggccttcctgtactacgtcaatcacttcaagctctactcctcgttctgtgccagtcacagcaaggcgcagaaagtcctgcatccgaacgagggcaatcacgccctgcaggagttcctcgcagccaggaatcccaagcagcagcatagcagcaccctggaatcgtatctgatcaagcccattcagcgcatcctcaagtatccactgctcctgcagcagatgcgcaacctcacagacacccgggccgatgagcatgtgcatctttgtgaggcactcaagggcatggaaaaggtcgccgagcacatcaacgagatgcaacgcatccacgaggagtacggtgccatattcgatcacctgttccggcagcaccagaagtcttgcaaacaacccattgatctaagtccaggggatctgctctactatggcggagtggaatggctcaacatctcggactttctgggcaagatcaagaagggactggaactgcatgccatgtgctttgtgtttaagtcggcagtggtgttcctgtgcaaggagcgactgcgtcaaaagaagaagttgatgggcgtttccagcaagaatgccaccaatgaggtcgagatcattcgctaccaggtgctcatacccgtgaccgaggtgcaagtccgcgccagttcggccaaggacatggactcccacttcctgtgggagctcatccatctgcgttcccaattgcaacgccgctccgagaaggtctatgtgctgtccaacagcactgccgacttccgcaacgccttcctgaagaccattcgccagattatccgcgaaagcgtccggaacatgtcaattccgatgaagaactttggcggcagctccggctccgtctccggccattcctcgcagggcatgggcagcatgggctatccgggcaactctcagacgcttgaacgtcccaagcagcagatcaccatcgttcatggctcgcacactctgggcaaaccgaagaagaagtccggctcgcagcgccactcggctggcaacattgactacgacaatttgtcgggcagccaggaggcggacgacctgccacccagtgtgggcgtggtccactacgcctccggccacacccacggccagcagatgcagccagctggattccgcggtcgcagcaagacggtgggcgatgttacagaaatcacctgctcttccccagaacctcatcagcagcagcagcagcagcaacagcaacagcaacagctgatgcagcagggacacgcccatgcccacccacatccccatccgcatccaagggagccaccgccgcctccgatcaggcagccacatctgcaccatcacagctcggacatcgaaaggatcgatcctggaacgaaatcggagggcgaggaggactcgcagcagggcacaatcaggcccaaggccacactgggtcgaacgcccaatcacctgacgttgagcaccacatcgacgctctcggtgggcagcaccggcagccaggcgcgcctcattcaatcgtcgcatccaccggccagttaccagccggtgctgatgaaggacctagggtccccggtgtggaaaccacgagacatgataaatttaggcacagatccacagtcaacaacccgcaaagacgatgtgaaaaattaaatcagaaaaagcaaagcaaaacgtttagtatcaagctaagcaagcataagaactcttaatccacaacttcaaatcctctgttcgatttctcaattttacctaatcaagtgtaaggcaacggcaacagaaacagctaaaagcaaagcaaagcaaaagcagaaagcagaaagcaaaagcagaatgcaaacagcagaagcaagcagttcaaagttcaaagcaggcgaacccaaaagcatttttcaagctcaattctgcgatatgaagatgcattgaatcaccggccatcatcggtgtttggtgaatggatgtggttgttttttgaagaatgcttggcttcggtttgctttcgctcttttttaatggataaaacatcgaagagtttttgtcattttttacgtttgcgtttttaaacgggagaagcaccacgaaagggatgtcacagatcctttttagaaagagagaacaaacaaaaaaaaaacggaacaaaacctaaagcataaatgaaaaccaaaagagaagactttcatttatattgattgtatttaaagtgcaaaacatataataaaagcataattaaagcgaaggattttgagcaaatttaatatgaactaagtgaacagatttaacaaaattaagaaatacgagaacaaattcaaatgcatttgtcgctgaaaagacttgaaagtaaatttcgatttaaatacatacatttattgaggacaagacgaagaagcagctgtcaaagcgacgaggagggaaacccgtaaacaaattgcaaccatagtatttaggcttagagaatttaaattataaaaaagaaaacaaacgaagaccccagagatttgcaaaaaaaaatataagaaaaaagaatgaaacaaaagtcaaatgcaaagtaagcaaaaccaaagggttgaatgaaaaacattttagccaattaagccacacacacacacacacaaactgaagcaaatcaacacactcataagcgtaatgagaaaatttaaatgaaaacagcaatgaaaatgtttagttcgtaggaagtacactgaaaaaatacataaagataccatacaaaatccacacatacacataaacgaaaaatagcaaaaatttagtcaaaatgttaaatggtaaactaaatgaaaccgaaataataataacgaagcaaatgattccatgcaattaaattgggctaacagcctccacaaagaatccaatcagcaaatacaagcaaacaaaaattaactcaaagcaaactcaacacgttaaagcgggcgaacattaaattaaactataaaactatgcaaagaaaaccaaataaatgaaagtacataagcataaaaaagcaaaagaaacccaaataaaaaaaaagacaacaccttctagcagaattacaataataattaagaacttcactttgaacactttgaaacaaacacacgcgaatcgatatagttaaacaaaggaagcctattcccagcccaac

SEQ ID NO: 11256 - protein, 2044 aa, DROSOPHILA
MEQKCIRRKGSVRLTEPTGHAHVRIEQRPQLPPRRQKSAEEVATMPKSALRQPPEQLEWFDRRAQQRHSARSAEGGQVREETMEWLKLQKTASPIQPVRTSSGPSEITVLKDELPDWLLDHLPRKKERERDRLPSDADKAVGSAYAKALADLLKKPLSRQGSGPCEFSLLKTDIVEWLTKMQSSSGTDRGKSRRSHHRRNGSGGDAQPRSNSQEDAQDQSKTSHRKRHSLGHSGAVSEEEQQQLTADWIAYPLHKLQSLGKQPPPAQPPERMSIPSGYAVPSALSHTPLCQRREERSRERRLRHSASEVVGSGGAGAASTSNTAHLERLYAKPHKERYQYVPKTKESSGRKERSRRHQTQRSATVSDMSAQRSGGHKRKSSSAERAPRSPSPGPCTDPDCPLLPICTDPHCRYQECQARQCITSSVSSVNLARHQQLAQVQLHAVPAHLVGAMGSDVPTTPSTTATPPPPTGGGTMGVGATGAGAGATSERRLVICHDCRSCAPLLSCRNRKCLNAAKCNSLPRCAADFNRLRTQLSQPPTTLDDIEPAPLDDLEMQPLPSPPHPHPHHHYRSNSQPNTLQRGDSASSAGMGAGVGGAGHGGLGGPGSGLAWLEPTTTLVQPLPAYVHHSNGKLMKSASAASLNSRRRRHKTVHFGENLLREVCQNRKLIKTEAQVPSGSAPMKANIQMLYNFVEGVLSAWVDDDEDQVRSGAESEPEHGVVPMQPIHRCNRLRYQCIRRVVEEAADLQGTLKLGNSRYRHRHWRSTAKQCNEMFLRKISDDDRMSLTTAVSDEDDGESVMASPYKAKATGTAASSFNCTGAVRKAGFLSVKKWLLRKKHQIELARKRGWKGYWVCLKGTTLLFYPCDSREGRSVEAAPKHLIIVDGAIMQPIPEHPKRDYIFCLSTAFGDAYLFQAPCQVELENWVNSIHSACAAAFARHRGKTGTLHLLQEEIFRLEKAIESDHKLKHMAELQQSVVTDQETRHQIQTQILQWEENLERLHCEQFRLRCYMASLQSGELPNPKSLLTHVSRPTKNTLNKLGVFTVSSFHAFICARSPSLLNNLLAGRGATKRRPPMLSRSNSGSSRRSMQMNSRDEPEKTFKVAMPDNAYSTVYLRDAMSVEEFLASACARRNLNPMEHFVRVKKRRDMEDHNYFVPHRNDLIENYLHNHEFVEVCMKILYQVELQRTTLEQMWGFSVEAELIENAERQDELCCYVSRVEDKSVAMHNGIIKGDEIMVINGAIVSDLDMMYLESVLQEEQSLSMMMRSSRTEPPDLVGIMRVTDDMIDSLVCPPPPTDPPVMSEEMITGLIVPAPGWNGTSKDLYSPEAESSPATSFVDPAAMAAQLAVGGLGVAKPTSRTSSFEIENLLKTAEQETRKSSPTGSVTSSVSTTALTPSRQLTDAEKLRKVVMELVDTERTYVKHLNNLLEHYLEPMKRETFLSNAEINALFGNIHEIVTFQRQFLQNLEESLDLEPDFNKFEHCGQFRNVLFAIGSAFLYYVNHFKLYSSFCASHSKAQKVLHPNEGNHALQEFLAARNPKQQHSSTLESYLIKPIQRILKYPLLLQQMRNLTDTRADEHVHLCEALKGMEKVAEHINEMQRIHEEYGAIFDHLFRQHQKSCKQPIDLSPGDLLYYGGVEWLNISDFLGKIKKGLELHAMCFVFKSAVVFLCKERLRQKKKLMGVSSKNATNEVEIIRYQVLIPVTEVQVRASSAKDMDSHFLWELIHLRSQLQRRSEKVYVLSNSTADFRNAFLKTIRQIIRESVRNMSIPMKNFGGSSGSVSGHSSQGMGSMGYPGNSQTLERPKQQITIVHGSHTLGKPKKKSGSQRHSAGNIDYDNLSGSQEADDLPPSVGVVHYASGHTHGQQMQPAGFRGRSKTVGDVTEITCSSPEPHQQQQQQQQQQQQLMQQGHAHAHPHPHPHPREPPPPPIRQPHLHHHSSDIERIDPGTKSEGEEDSQQGTIRPKATLGRTPNHLTLSTTSTLSVGSTGSQARLIQSSHPPASYQPVLMKDLGSPVWKPRDMINLGTDPQSTTRKDDVKN

SEQ ID NO: 11257 - DNA, 3118 bp, DROSOPHILA
gtttgccgtaccatttcgaactgctgattagagtaggaaatggtgctgattgttactttttaaaaatgtttctttatcgaaatgtgcgcttctttcgactctcgcttctgttttcttgtttttgttttccacaaatgactcacagtctgccagcgataaagaaatttaatccaggaatgaagacgtttcctctgtatatgtatattttttatagggtgatagatcacaaaaatgcttagataaaaggcccagagaggggggcttcaattaaattaatatttgtttctggtatctacattcaacgataagaaaacttacctttcttacagcgttgacgattgtaagaatgggtaatgatgagtaatggggaatagtacaccaactttctgactggaagggaagttcgataaaactaaaatagagtaagatatctacaacgcactaaaaattcgcagtctaagacgtcatttgggcacagaaattaaatataatgttgagcctttatagaacacataaaattcgtagcatagttgtaatgatcataacagacaattaaacaataaacaaacaccgtttgtttatacctttcaagtggccatgaaaaccataaagatagttatacaaattaaatgagtacaaatgtacttttaatggggttgcaattgatatcgggtcatttggacaccgaatctatttctgggcagcagaatcacttcctggaaaaacatgtcaaagagctttgcaggtaagacaacctattggccaatgtgcaggggagttttcaacgcaataacaacactattttattcgcagagcctcgtggggattagtcattccacggggcgataacagacgtcagatgtacgtaaattggtgacagagccaggcgctccacaagtgcaggcatcgataatgggcgcaaaaataagggaaaagatacaagcctataaaaggccgttgcggatgggcagacagttcagtattaacgacgcattcgcagcgaaccgatcgcagaaccggaaccttaaagcggaagatatagaactcatatagacagtgacatcatgtgcaatagtgcgatcatctgcctggcaatcgtggccgccgtggcctccatctctcaggtttcggcccaagcccaaacaacgccacaatcctgcgcccaagccaccggcattagttttaaccagaccgctgtgagtgaaaggctcgtcatgtattgttacagtcataagaaaacatgtatatgaacaaaatgtctgtttataatgacatcggatttgctctgaatggacacatcatcgcatacatttctaggatacctaaattccataagtgctttaaatttcatacaatcgtaaaaggatagctacagtttgatagaaactttacccaagcgaattaataatttcttatttaattatcataaacatcagtgtgctaattatgatatattaaatatttttccttaacttccagtttagtggtcagtgggtcgagttggcccgcaatcccgcctcaaatgtctcctgcatttcccttaacgtggctttctggaacaacaacaattacatgctggtcaatgtcagccattcaagcaatgtcgcctccactttggtggacgtctatgaaactgcgaatatcacgctggtggagaacaacctcagcggatacaatgtcaccctggtgaatggccagaagcaggagtacgtcttcgtgaagttgcttagctttgtgaactccacctatctggttggatgcacctacaccaatgctaccaacacatcaaccagtgctggttttattctgggtaggtccacctatactccggaaggcgtaaggattgccaacaatgatgcctccgtgtccttcagcaatttccagaacaacacctacggcaatgtcactcagttggagtaagtttttatgatttaaggtggctacaactccaaaaccatactaatttttcaattctcaataatctttcagttgccgtgccagttccgccggacagactgtgcctctgaccctgatatctggcttccttgcctttgcccttttgctgatcaaggcctaaaaatggagatgtatccaatggctgctttgcctagccaccataaatgaaaaaaaaaaaactaacaaaatccaatcacttgcctaagttattgtgtcatactctttatttagtttttagttgactttaaacaccgcactctgaaatcgaggcaaggcaaaatgatgtcaataaaagtaaaccgaaatgggtgagggcccataaaaagcccccactgaaaagaatacaattcgataaaggccaagagacaagatcaggtgtctcaatgctctggtgcaatcagtgctttaatttgctggcaacttgttagaaggtatgcgcgataagataaacgtaaacgataacaaaatatatgactgtgccaccccattctcactaacggtcatagattttctatttttttttccttgctaatatctaacgagcagctcataaatcaatcaatggcctcgtgttcacaggcacaaatatccgatacgttttgccactgattaattgattgcgattgcaaaatcactacgctccggcgtttatagttggctaattacaacggttcaggggcatttttgttatcgcttgttgataggatttaagtgggtttattccaaatgatgttaaatttgcgatataaggaaaattggcttagttccgagtagcttgtcacagttatttgtttacgttttgtctggcaaaagtataatcatacaaaaaggcaataaatcttaaattgataagatgagatattaccgaaatatatatatacaaatattgataagtatgctgaacttgcatagataggaatgtcgggtaattaattaagcgtaatataaatatattctttcacaattttccttatcttcatagtcccaaaattatacaaccacaagtgttatgtgttgcagaaacgtatgtcagcatgtcgtttgagttgcactcaacaattttctctcgaactaacaagtgttttaccgtacttggtaagatgtccgaaaagtattcaactacaatccaaagaatacgaatattcagcagacacttaattgt

SEQ ID NO: 11258 - DNA, 762 bp, DROSOPHILA
cgaaccgatcgcagaaccggaaccttaaagcggaagatatagaactcatatagacagtgacatcatgtgcaatagtgcgatcatctgcctggcaatcgtggccgccgtggcctccatctctcaggtttcggcccaagcccaaacaacgccacaatcctgcgcccaagccaccggcattagttttaaccagaccgcttttagtggtcagtgggtcgagttggcccgcaatcccgcctcaaatgtctcctgcatttcccttaacgtggctttctggaacaacaacaattacatgctggtcaatgtcagccattcaagcaatgtcgcctccactttggtggacgtctatgaaactgcgaatatcacgctggtggagaacaacctcagcggatacaatgtcaccctggtgaatggccagaagcaggagtacgtcttcgtgaagttgcttagctttgtgaactccacctatctggttggatgcacctacaccaatgctaccaacacatcaaccagtgctggttttattctgggtaggtccacctatactccggaaggcgtaaggattgccaacaatgatgcctccgtgtccttcagcaatttccagaacaacacctacggcaatgtcactcagttggattgccgtgccagttccgccggacagactgtgcctctgaccctgatatctggcttccttgcctttgcccttttgctgatcaaggcctaaaaatggagatgtatccaatggctgctttgcctagccaccat

SEQ ID NO: 11259 - protein, 218 aa, DROSOPHILA
MCNSAIICLAIVAAVASISQVSAQAQTTPQSCAQATGISFNQTAFSGQWVELARNPASNVSCISLNVAFWNNNNYMLVNVSHSSNVASTLVDVYETANITLVENNLSGYNVTLVNGQKQEYVFVKLLSFVNSTYLVGCTYTNATNTSTSAGFILGRSTYTPEGVRIANNDASVSFSNFQNNTYGNVTQLDCRASSAGQTVPLTLISGFLAFALLLIKA

SEQ ID NO: 11260 - DNA, 3018 bp, DROSOPHILA
tgacatcaaacgcttaactctgctaggtgatgatgctcggagtggcactgagcttggtttgggccggccccgatgatggctacctttatgaccagccatcgggtgagcaacttcaggaactccaggtgatctctccccccaggaagctccggctaaagccacgtgtctacccagggcatccctctcaggcttgcggaaacgtggaggcgacggatcatgccgctgccctgaccacctaccatgccaaccgcccccagccgcgtcgcatttacaatcaccaggaagtcgaggtggacagctcgttctttgagcccacgccggatcggatcgaggaactcaagcgtattctcttggatcagcaatgaaatgtggtttacttggatgacggaaaatttgcgtgaaataaaagtctgcttatgtgaaagagattggtattgttgattttagttatattctttagtacaaacacatacaatttattatataaacaaaacatttacggtgatccaaatttgactttgtgtttatacataacatcaagataattaatttcttaagtgactcatggctatagcaactttgtctcctattaaggaaacatatacgtttatttattgtgacgatatttggtttatttcacagttcccaatttatctttcggtcttctttttattttgagtttcttttgatatgcatccattggatgtcagtttataaaaaaaattcgcttaaaattgtgttatttttaagccatgcaattcaattccaattaatccatttacttgtctaaaaatacccacaatcgtctcatccctgtttttattcgcccattttggcctgcattcggtgataaagtgaatgttaatggattttggccaattatatggaattagatggcatcagcaaaaaaaagtggcttaaacagcattccgatcaaaatgacgaaaatttgattgcagttaacaataaataaataatttatttgtgagcttaaaccaacggaaaacaaaaacataaacatatacagtcgatttagtagggaaccgaatccatctaggcatcgtagttgtacttcttgctatcgccgggattcaggctgtacaaatcgtagtcgaactggtcccactcctggtgatcggctcctctgggcttggtgctgcccttctttagcttgagcagggccttcttctcccggttgatgtccacgtggggaatctgctgacgagcacgtttctcctcggccgtcaagggctgaggtgccctcactggagtgtggctcaaaaactgcgattcctccattccgagatcagagtcgggactcatttgggcatcgtagaagttggcaaagttttgcagttgcatggactccgcgggatggtgatcgtagtagtcgggcatgatgaggttgtagttcccagtgagggtcatcggttcctgtggcctgggtgcataggcgaagctggggaagctggcggatgttcccaggtctttggttcgactgtatcgaggtagggcttctgagaagcccaagagcacagccaaaccgcagctcagcaggatctgaacaaaaaagaaaaaattaatcaaaattatattatttgatattgagcgtcaattggccgttatttattagatagcttttattgccgttttaattgaaatttaatcgaaaaacatttgaaatggcctcacaagaagttagtacagatttattggtaatatattttatttttttagggaacacaacctaaagcaaatgtttctcattctttacgatactaattggcaaatgataccctaatttggaaacagtaattaagcagttcaatgaagatgcttaccatttgtgtattgtacttgaaagccattggaaatgtacgagttttaacacaaaaattgattttatataattaagatgaatttaattttagcactctgttggttgttcacacttgctggaggatctttatgtgatttttggctgacgtccgactttattccccgtcagtacgcttaattcgagctcttaaaccagtctaatgttctgagctgagcgattttgtatttaaagcaaaagccaggcgaaagccgaaagaatttcatttcattcgtttgatttgttttgttttgtttgccagacttcgcttgctttacgagtattggcatgcaaatccggtttccaaactttgatttccaactgagccgagatgaatctgagcctcatgctgaatctgatgctgaggctgatgctgagatgctcagattgagattctgttcggttcgcggagtgagtgacacacgttgaggcgaggagcacaggtcaggaacacttgggggaagccggagatcgagtttgtggcgtcagggactaaatacaaaagaaatgcaaatctggccgggatgctctcgactatgaagcgctcgcgttgacacacatttgatgggatgattcatgtgaatgtgcacggcaattaatccaaattgtacgtaataaaaatattaattgcactcgctttgtaccactgaacttgagcgcttgtgtggccagcggtaattaagccggggcgggaatatgttaattaacaaattacaaattggcacatcaatcactgcattttattgcctcgcattgatctgacatttcaaattttgtcacccagctgtcacttcgagtactgataatcctgcggcggttcaataacatctcgtcacatcccatcgggaaaatcccaaggcactgccttttgaaagctgaacctcagttccgagatgatatcttaattcaaactggtagctctggtaaataaaacaaaacgaaattagagcaccatttaaagtgagctactttaattgtcggctttttatgatcacttaagataagagttaggaaaatctaagccatgttaaagaatgttaaagaaatgctcgttcacttgatacccagtatttacattcactaaatatgatgagttgaatcaacttttggcaggcacttagctttattacttgacaaattct

SEQ ID NO: 11261 - DNA, 737 bp, DROSOPHILA
attaagcgtactgacggggaataaagtcggacgtcagccaaaaatcacataaagatcctccagcaagtgtgaacaaccaacagagtgctaaaattaaattcatcttaattatataaaatcaatttttgtgttaaaactcgtacatttccaatggctttcaagtacaatacacaaatgatcctgctgagctgcggtttggctgtgctcttgggcttctcagaagccctacctcgatacagtcgaaccaaagacctgggaacatccgccagcttccccagcttcgcctatgcacccaggccacaggaaccgatgaccctcactgggaactacaacctcatcatgcccgactactacgatcaccatcccgcggagtccatgcaactgcaaaactttgccaacttctacgatgcccaaatgagtcccgactctgatctcggaatggaggaatcgcagtttttgagccacactccagtgagggcacctcagcccttgacggccgaggagaaacgtgctcgtcagcagattccccacgtggacatcaaccgggagaagaaggccctgctcaagctaaagaagggcagcaccaagcccagaggagccgatcaccaggagtgggaccagttcgactacgatttgtacagcctgaatcccggcgatagcaagaagtacaactacgatgcctagatggattcggttccctactaaatcgactgtatatgtttatgtttttgttttcc

SEQ ID NO: 11262 - protein, 177 aa, DROSOPHILA
MAFKYNTQMILLSCGLAVLLGFSEALPRYSRTKDLGTSASFPSFAYAPRPQEPMTLTGNYNLIMPDYYDHHPAESMQLQNFANFYDAQMSPDSDLGMEESQFLSHTPVRAPQPLTAEEKRARQQIPHVDINREKKALLKLKKGSTKPRGADHQEWDQFDYDLYSLNPGDSKKYNYDA

SEQ ID NO: 11263 - DNA, 3341 bp, DROSOPHILA
tattcctcgtcattttatcgccttgcttttgatagtttttcacaccgcgtttcaaagtcacattgcgttcggtttcccgattataatgttgcagatccagcttttccgatcttcttccggtattgtgagtagatccttttccgtattcaggatagctccactcggcactttcgacactattggttttattcacagcataggaattactgtgtgcagtacttccaataattattaaggttatgaataggtatccaggaatcaaagttaactgaaatagaaaggatgcgcgtaaatgaagtatgtacatacaaaatatctcctatcaaaaagacaaattggaaatatagcttaccattgggttcattttttgttaagtatatagtctcgcttggatttgaagtggtttaatcaacgccttcaacagaaatgatttgagccaatcgaagaaagtatttatatgagcacgaaacataattaaaatgtgcagaagcaaatttcttcgcttgaagtttgtacactctatatttttcttaaattaagaaattatacaaaaacatcaagaactaatttgttttggtttgattatttaaaatgtatgcatgtttttattcatttttaattagatatacaaatgtgtagctttgaaatgccgtcagaaataaacgacctttttaaaagagaataaaactgcacaagtttacttatatttttttttacgattgaaagcccacggtcgcgtgacgcaagttgtgtgtgtgtttgaagaagtgtacaagtgcaatatctttataaatgtttgaaatttctctaggtgaatatttcacagaagcccgtaaatgtaataattaaagtgcattgagctccgctttacggaaatgctatggattgtgtaatttcctgcagtatccgttgctgttttcaagactaccaaaactacgttttccggatacccattttggaatgcagagaacagggttaattaacacataacattggagctcctctcgaaaggcaaataaaaagtttattatacaaatttaagttggatatatcgggagcttgaataaacaatggtcagcttaatctaattcgattctattctctaagaataggctgctcgtgtgcatctttgattccttaatttttaagtgcgagcccagcaaatcgtccatggtgatgcggacgttgttgcgatcaagcgctgtagctgacggatctctggacgtgatgagctgcctcattcggtaaactgaagcattccggcacatttcccgcaggtctgagcccgagaagccatttgtgagcttggacaagcgattcaagtcgacatcctgacttacttcctccgattggaggatcagcttcaggatgtcttttcgttgggtctccgagggcagaccaatgtggaattgggctggcatgcggcgcacaatggccttgtctaaatcctgcggcctgttcgtggcacccatcacaatcaccgtcgagttggcgttcgtgctgaggccatcccacagcatcataaactgggtcttcatcatggcggtagcctcgtggtcgttcatgtttcgagatcgcaaaaatgagtctatttcgtcaataaaaataatgcatggctcgattcgcgatgcaagcgagaagacagcagaagtcaatttctgggattccccgtaccacttgtcggtaagaatggcgacgtccaagttgataaagcgcattcccgcctcttttgccgtcgccttcgctatcagcgtctttccacagcccggtggtccatggagcaggacgcctttgggcgcctgccacagcttcgaatgcttgaagagatccttgtgctggattggcagcaccaccgattcccggagctcctgaatgactgaatccagaccggcgatatcggcccaactgactgttatgtcggcgggaacaacaagatgtgacgcaatcataagctcgtagtcgctaaactcttgccctcttagcttgaagccctcctgctcggctagcctgcatggaaaaggtttacacatgtacaatatatgctatatgagtctaatataaacctcttaagctgctcctcagccagaactttggcctttttcttgtttttactggtcggatccatctggttcatcatccatttcaccgaataatatgtgatcagcgaggccacagacaggcgaaccagtacctggaatatctgccccttgcttagatccgatccgcccagtccgaagttgtccatgtttctgcagatattctatttagagcaaatacgttggcctgcacgaatctaatctttcttgttcttattccccatgcacaccgacgacagtgtgaccaggtgctccgactgaaattgacatcgataagctcaaaattgctgccaactgaattcaatttttgttagcctattccttttccactgttccgaaaatattttttcagcttaaaataaaaagattttttttttttttaattttgagtattaacatattgggcatatattaagtgagagcattgtgaagcatgaagattaaaacccacaaattcaagtgacaattttgctcttagggtgtatagtgcctggggtcaatactccaaatcttcaacttggcgtcgatccacggacgaagcttggccacgctggcgtacactccgggaatgttcacctcgccgcatccgatgccccaggcaacaatgccggcggacttgaagcggttcttctggccagcaattggacacaccagtggggagccaccatcacccttgcaggtgtccttgtccttctcaccgccggcgcaaatgaagctgtcgtgcagaatgaaatgcctgccgagtcgagtttcgcgcagattcgtctcgcactgctgctcgggcaccacgggcatgtcgaccttcttcaggataacctgatattccccatccttgccgaacttgttcttgccccagccggtggcatagcagcgatcgaaatcgaatttatcacccacattgggcaggcaaacggtctgaatgttctcctggagggtgaatggactttccaacagcatgacagccacatcgttatagagcgatcccttgttgaactgctcatggtagattatttccttgacatatcggtcttcgtgccttctgatctcagtctgcgtttgcgtatcccattcgccagctctcactaaatgccagttcataattagatctcatagatggcatagatggcatgtacacttaccaacaatgctactgggctgtttgttgtgaacgcaatgcgccgcggtcagaaccacattgggagctatcaatgctcctccacattcgtacaggttaaggttgccttc

SEQ ID NO: 11264 - DNA, 1285 bp, DROSOPHILA
gtcacactgtcgtcggtgtgcatggggaataagaacaagaaagattagattcgtgcaggccaacgtatttgctctaaatagaatatctgcagaaacatggacaacttcggactgggcggatcggatctaagcaaggggcagatattccaggtactggttcgcctgtctgtggcctcgctgatcacatattattcggtgaaatggatgatgaaccagatggatccgaccagtaaaaacaagaaaaaggccaaagttctggctgaggagcagcttaagaggctagccgagcaggagggcttcaagctaagagggcaagagtttagcgactacgagcttatgattgcgtcacatcttgttgttcccgccgacataacagtcagttgggccgatatcgccggtctggattcagtcattcaggagctccgggaatcggtggtgctgccaatccagcacaaggatctcttcaagcattcgaagctgtggcaggcgcccaaaggcgtcctgctccatggaccaccgggctgtggaaagacgctgatagcgaaggcgacggcaaaagaggcgggaatgcgctttatcaacttggacgtcgccattcttaccgacaagtggtacggggaatcccagaaattgacttctgctgtcttctcgcttgcatcgcgaatcgagccatgcattatttttattgacgaaatagactcatttttgcgatctcgaaacatgaacgaccacgaggctaccgccatgatgaagacccagtttatgatgctgtgggatggcctcagcacgaacgccaactcgacggtgattgtgatgggtgccacgaacaggccgcaggatttagacaaggccattgtgcgccgcatgccagcccaattccacattggtctgccctcggagacccaacgaaaagacatcctgaagctgatcctccaatcggaggaagtaagtcaggatgtcgacttgaatcgcttgtccaagctcacaaatggcttctcgggctcagacctgcgggaaatgtgccggaatgcttcagtttaccgaatgaggcagctcatcacgtccagagatccgtcagctacagcgcttgatcgcaacaacgtccgcatcaccatggacgatttgctgggctcgcacttaaaaattaaggaatcaaagatgcacacgagcagcctattcttagagaatagaatcgaattagattaagctgaccattgtttattcaagctcccgatatatccaacttaaatttgtataataaactttttatttgcctttcgagagg

SEQ ID NO: 11265 - protein, 369 aa, DROSOPHILA
MDNFGLGGSDLSKGQIFQVLVRLSVASLITYYSVKWMMNQMDPTSKNKKKAKVLAEEQLKRLAEQEGFKLRGQEFSDYELMIASHLVVPADITVSWADIAGLDSVIQELRESVVLPIQHKDLFKHSKLWQAPKGVLLHGPPGCGKTLIAKATAKEAGMRFINLDVAILTDKWYGESQKLTSAVFSLASRIEPCIIFIDEIDSFLRSRNMNDHEATAMMKTQFMMLWDGLSTNANSTVIVMGATNRPQDLDKAIVRRMPAQFHIGLPSETQRKDILKLILQSEEVSQDVDLNRLSKLTNGFSGSDLREMCRNASVYRMRQLITSRDPSATALDRNNVRITMDDLLGSHLKIKESKMHTSSLFLENRIELD

SEQ ID NO: 11266 - DNA, 4215 bp, DROSOPHILA
acttttgcctgtgttatcgccacccagatgagttacctgcgtcgtggagatcgcttttggtacgagctgcccaaccagccctcatcatttacgcccgagcaactgcaggagattcgcaaggcgaagctatcccgattgatctgcgacaacaccgacttgattgatactgtgcaaatctaccccatggtcttgccggatcatgaaatgtaagtgtgcatcgtctgcaaaagttttaaaatataaaatatcaacttttaaatactttctagcaacccacgagtgccctgtaagagcggtattataccatcaattgatctgactaaatgggcggactttggcggtcatggcgtagatccctctctctatgtaagttaacaatcgatgaatcaactcatagaacatatattaacacaccttataatatgctttttagaactacatcaatgaaatacccgacacgttgctgaactttaggaagtaaatgccatttgtttttctcacgatttgttttacaatctcgattcattttgtttgactccatatcctgtaccgtctgtcttctatagttcaaaatcttttcacttcttactgcttagtccctcaactagtctttgctcaccatccgcatttctatagcgagtcagtagttatgacactgccatttcttcagagctctttccagcatttccgtgcatgaaccatacattctgtatatattaatattaaatagcagaaatagagcctttaagttaaagcatatcgaagcaatcaaaaaaaagaaaacataaataattttaaaaatatatctcgatgtaagtttttgtatatgcaagtattttttaaataaaatttaaaatcaatatatgtttaatttttcttaggcgataatggtaagtaatacattaagatataaaaattccatcaatccattaaaagatttaactaacacccatttcatgctcaaaaacaactttggttacaacacaacacatgtatttttcttaatatttgtttatttactacacaattacaagttaataggaactctttggtttcacgctagaaagtcagttgtttagcaaaagtcatttcatcatcgttgtggtcgatatcagcagccaagatcgccaagacttgagcatcgtgttgagcatcacattgacccaaatccacacctgagtcacaggccataaaagcacacaccgccacacacaccgcacatcgcacaagaggcgcctcttatcgcttcactcgagcgcattcagaaacggggctatggaggctatatcctcgcagtccgggatggctttgcccttgaacttgaggcaggaaagggcacaggtctgcccctggaagtaatctcccagcatggtcttgcactggacgcagttgttaaggcacacctggataaaaaattaaaaatatgtaaaacaattttgttaatataatttgtggaacttttaaggatattaatatttaaatctcaggatcaaatgaatgcatatggaaagtacattttcacatcattttaataatgacccaatatgatttaagttaaatatttatttatattaaaatcactaaaacttaaatttctaacccacctgaacaaaatcaatgccacccatggagtctgcaagaaaacattaagcagaaatagtagtttagtacaagagcatacagaaagtagggaaatttatatagcttaccaaatctcttgtgcgtataatgacttatggcgggcaatgcatttccaaaatgcaccaggcacattgcaactgccacaaaggtgcacaaaatcaagggcttgcagttcatgatggtgatattggtactttgattccaacggatgtgtttggggagctgactagcttgcgaccgttgtctgtctagagcagattggaaataattattatcgctcgtttgtcttcttattttatatacatatgctctcggcccaaacgcagatgcgaaagcttaacagagtaaagaagcccgatacggcagcaaaaaaataaaaaaaaagcaactattgaagccggtcgcagatgcgagacaagtcgacacgacaagccagccccagtggcgctaaaatacgtcaggtcttcgagccaatcgaaatcgattcgagcccaatcaaatacccattttattttgtaagcgtatgcaaagtagcgggcgatacgcaaacttacacacatttgaaatgtgttctccttagaaaagagtttgtttaatttgcataattatctgaacagattttatgacacttttaaatgggcgggatgaataaatgagttgtaggaatttatttaatataataaatggaatatccaatgtggacttatacacgacaaaaaacttttttgctttaattaccaattttttttttagttttttttttgaaaagagtggttatcgaagaaattgatgatttcaaaattagtctgtaaagcacccaacccataatggcaaatccccaagaaacattactttacaaaaatttccccgattttcaagagcacatttaaaaattcaccggacttgggaaagaaagtagcaacggcgaaaagctctttttgaaaaactgctatagtatcaggaagtgtcaagcgaacggacacagccgaatcgaactgaaatcgtaatgaatgcaaatcgtatgcgactggcgagcccattaattaatggcgctgtaaatgcagtaaaaatatggttaaaatgtaaagcgtagaacggatccaagaccagatgccgccgcaacaatacgtttcgccccagtaaaatgtaaataaaataagaattcttttgtcctgcctccaaccggacacgctgccaactggtttcgatataaatatattccagcgaatctcacaaattaaaatatgaaaaatgaacaaacaaaaaagtcaaccaaatcgtgggaaattctgtagttatgttaattttatgcgccacaaattgtatgtttcctaactaattggcaacacgcgccaacgtatgagtaatgtgtaaagaccatgcggcgtatacgtcacataagcagcgatttgtgggcgtgacactttcgagacaggcttaagatttttcggtccagtgacgtaggaacggtactcaaaacttaccggtagttgattgtttggcagcaaaggtgtgggctttttggataactcgccaagtacttggcaacacgtttgtttgctggaaactggttctagaatgcagagttcttgttgtatttatacgctggatctcgtgcgattgtttgatttgcacaggcaaattaatcaatttatctcgccagcaagtccacctaattgaatatgtgcaaaatggcaaaatgtcacttccgctggctggctggctggctggctttcttgagtgcttttcacagcggtgttctgagtactcgatgttacttagccagtttaattgcgtttctttgagctctggtttcggcctggtcagcaggttgtagcccaaaacaggaaatgatactgccgaaaggagtagtttttccaacagtacgccttgttgggttagatttatttctcagttgcaagtattagcaaaaaactaataaataagctttaactagcatagtcaataaatcaggaaatcacgaatgggtggaaaaccgaactgtgtatgtaagtggctattttttttttgtttatgcttttgggttatatcaaatatttattttaaagacgtaggaagcatagaacttaattacaatgagcatagatgtataagcactaaaataatttaacatatggcgtaattataaattgagttaagtttttttattttatttttattaatttataaaaacaaatcctatttacatgtatgtacatacgttttaacagaaatcaaaatattttttcagaccgttacttgaaagcagtgcatatcgacctcaagcagttcgtctttcattttaccgctaggtgtcgtctttaatatagatgtagataaatgtgtaaaatgtgttctccgtaagccatcagcaggtggccacacatgctgaaaatgtcaaatcgcaaatctagattaaaatataacgcagctgagaagagtgaagcaaataatgtattctttaaaaattataaattttaaatagattatttgagtctaaaatttagttttttttgtgctacatatatttccaaagctagagaggaatgttactgttttttaatgtttatcccc

SEQ ID NO: 11267 - DNA, 702 bp, DROSOPHILA
gaaccagtttccagcaaacaaacgtgttgccaagtacttggcgagttatccaaaaagcccacacctttgctgccaaacaatcaactaccgacagacaacggtcgcaagctagtcagctccccaaacacatccgttggaatcaaagtaccaatatcaccatcatgaactgcaagcccttgattttgtgcacctttgtggcagttgcaatgtgcctggtgcattttggaaatgcattgcccgccataagtcattatacgcacaagagatttgactccatgggtggcattgattttgttcaggtgtgccttaacaactgcgtccagtgcaagaccatgctgggagattacttccaggggcagacctgtgccctttcctgcctcaagttcaagggcaaagccatcccggactgcgaggatatagcctccatagccccgtttctgaatgcgctcgagtgaagcgataagaggcgcctcttgtgcgatgtgcggtgtgtgtggcggtgtgtgcttttatggcctgtgactcaggtgtggatttgggtcaatgtgatgctcaacacgatgctcaagtcttggcgatcttggctgctgatatcgaccacaacgatgatgaaatgacttttgctaaacaactgactttctagcgtgaaaccaaagagttcctattaacttgtaattgtgtagtaaataaacaaatattaag

SEQ ID NO: 11268 - protein, 97 aa, DROSOPHILA
MNCKPLILCTFVAVAMCLVHFGNALPAISHYTHKRFDSMGGIDFVQVCLNNCVQCKTMLGDYFQGQTCALSCLKFKGKAIPDCEDIASIAPFLNALE

SEQ ID NO: 11269 - DNA, 2932 bp, DROSOPHILA
ctatatatcaaaatgttatgattgaatatgtataatcacagaatgcaacctacctgatggtgcagcctctgaagcggctgagaatagatctgattattgggttaatgtccatgcttacgaaaatgaaaacagctaattttgattatctctaaaagtttgaaagtaattgcaaagtgttgaagatacttcaaactggcaaactgctgatatggagctgaaattctgcatataaccacattttatagttatctcattcttcgctatgccaaaaactatgctacgcattcttgctgtcccataggtggcgcgttggttacgcatgtcaaatgtaaaattaccatcgcccttgccagtacaaacaagttgttgcaatcatttagttttatgtttatttattcattcttatgtttcggagggcttgtttcaactctttgagcactaatataagtttacccctcgcagtcttcgcctcggacgacttacttttctcaagggctttgatttgcatttcaagtgactcgatttgtgcggtcagttccatgatccttgcctcttttcccttgttcccctgcaaatgtttcttggaggtaaacgttctttatgagtcattgaaatgtttagttaggagatactcacaacatgatacgtgtcgataccgccactgcctcctttgtcaaaaagatcgctaaacggtcgtctcttgctgcatggaaattgtggatttaagggaactcacattgcggacgtacttaccatagaaacatggtatctcttgtctttaaaaaagtaagaatcttataagccccccgaaacatactttaagctctgcgtcaaatttgtgtacttatgcttttttcgttaataagtttctccacgccaactaggtgaggcaaaaacacattcaaaaatggctaacaaatgatccaagtaaacctaacccctcttgctttgcgaatatatttgttaaacatttccaatatacgaattcggtaggagaatcaatactcagacatacatagttagtcagtgatcatttagttagttagttttttccttaaattgtctgtgatacattacatattacggataattcacgatgatctgggacttctttacctttatacgcggagccaccgagttcagtgccactgcgctactgattttgctcggttgcatgggagactcaacgaaccaaggtggtgagagcaaattcttggtggccaggtgatgcttagtgagatttctataatagaatattgttaaatactctatcgtatagcgttcactatggcctgacggtgatggtggtgatgcacgtgtttggcttcgtatccggagcccattcgaatccatgcatctcgatctcatgctacttgatgggctacatcgccctggaagtgatgatgatgtacgtggtgtgtcagatggccggtgctttccttggttacttcctgctaatgcaactgctgcccaaggagctggtggacaaaagcaagccaggcatttgcctggtacaaccgatggacactctgtccacataccaggtcgtcatcatcgagtgcctgctgaccgcggtcctcgtgctcggatggtgctccttgtgggacgtgcgaaacggaaggttcctcgactcggtcgccattcgcatgggtctcctcgtgatcgcttgcagtttcgcaggggtgagttgaaaggctttggattttgtatctatagatactatagctatatatgcatttattgcagattcaactaactggagccagtatgaaccccgccaagacattggtgcctgccatattctacggcagtccgaattcggttctaatgcagctgactggccagatcctggccgccatcatggtgcccttcgtgtggaatcatgcgtatacgccaccttataagcccttggaaattccagtgtgcaactgagctgtgacaataaacataagctcgacgtttttggctaccgtgtggcttatttgatcaagtgtatgagcaattaaatattaacgataagcagttcgccgtggcgtaaaaataatctggcttagataagcatagcatttacattagattaaatatatagtcgtcaggcgttggaaattatttaagctatttatttgcacgcttcgcaacttaaaactatccgctctctccgctctcacgaacacgaacttaaacgataacttgtcctatgtgtagtaaatccatttaggcgagctccgcctccgaggtcctcttggttgacatcgtcgtctcgtccacctccgattcctccagctcccgccggaaggcgtgcttgtagatcaccgaggtgatcagggcagccgccatgggacccacccagtagatccagtggtcatcccagaatccgttccaaatggccggagcaaaggatcggactggattcatactagccccagtcagttgtccctgttgggggatttacaattgtttattaagaacatttttttgatacctattgattgcatttcatgggatggctaaaatgtctatattaaaagtgtatatatgccatttaaagaaaggttatcatcgataccgagaaagtcaagtgcatttgcctgataaattgaaaacagatagtgaatggaattttagcatagcggatcgtcaatttgatatttcttaagagcagacagtcttatctgtatcggtattacttggacaaacagacattaaggtggattacaaaataagatatatctaatactgtatctgaattattccgaacaataatcaacttaccgctgtgagcgacaggcatgcgatggccagaccaaatcgcactggcagcgagtcctgcttggtggcattgcggggatcccagacgccgcagcacacggagatgaggacgcaggtgatcaggaactccacggccagtccctgccatggggtcaaggtgctg

SEQ ID NO: 11270 - DNA, 813 bp, DROSOPHILA
aatactcagacatacatagttagtcagtgatcatttagttagttagttttttccttaaattgtctgtgatacattacatattacggataattcacgatgatctgggacttctttacctttatacgcggagccaccgagttcagtgccactgcgctactgattttgctcggttgcatgggagactcaacgaaccaaggtggtgagagcaaattcttggtggccagcgttcactatggcctgacggtgatggtggtgatgcacgtgtttggcttcgtatccggagcccattcgaatccatgcatctcgatctcatgctacttgatgggctacatcgccctggaagtgatgatgatgtacgtggtgtgtcagatggccggtgctttccttggttacttcctgctaatgcaactgctgcccaaggagctggtggacaaaagcaagccaggcatttgcctggtacaaccgatggacactctgtccacataccaggtcgtcatcatcgagtgcctgctgaccgcggtcctcgtgctcggatggtgctccttgtgggacgtgcgaaacggaaggttcctcgactcggtcgccattcgcatgggtctcctcgtgatcgcttgcagtttcgcagggattcaactaactggagccagtatgaaccccgccaagacattggtgcctgccatattctacggcagtccgaattcggttctaatgcagctgactggccagatcctggccgccatcatggtgcccttcgtgtggaatcatgcgtatacgccaccttataagcccttggaaattccagtgtgcaactga

SEQ ID NO: 11271 - protein, 238 aa, DROSOPHILA
MIWDFFTFIRGATEFSATALLILLGCMGDSTNQGGESKFLVASVHYGLTVMVVMHVFGFVSGAHSNPCISISCYLMGYIALEVMMMYVVCQMAGAFLGYFLLMQLLPKELVDKSKPGICLVQPMDTLSTYQVVIIECLLTAVLVLGWCSLWDVRNGRFLDSVAIRMGLLVIACSFAGIQLTGASMNPAKTLVPAIFYGSPNSVLMQLTGQILAAIMVPFVWNHAYTPPYKPLEIPVCN

SEQ ID NO: 11272 - DNA, 5084 bp, DROSOPHILA
cagacgatcctttcccacatgccttttaccttcgcaacaacaagctgaagcactataaccatgtgttctccgagggctttagcaaggacttccggcaggtttgtctaacataattgtgaaaacttcatactacaaattctctgtcttccttacagccctgcgtggtcttttgtggccatcctagcttgcgtttcggcgacgctgttcactttatcgagatgtggggcaataaccctaacaactccatcatattcacggagccggactttccgtatctgcaagtactggcgcccttccaaccactggccatgaaggctttttactgtcccatcgacacctctttgaattatcagcaggcaaataagctgatcaaggagttgaaaccaaatgtgcttgtcatcccagaggcatacacaaaaccacatccctcggccccaaatttgttcattgaacagccggataagaagataataacgttcaagtgcggcgagatcatacgtctgccattaaaacggaagctggatcgaatttacattacctcggaactggcccaaaagatatcgccaaaggaggtggcggccggcgtgaccttctccacattgacaggagttttgcaagttaaggacaaggtccactgcatccagccatgtgcggatagcgttaaagacgagaccatctcgagcaacagcgctccgacaaaggaggatgtgctgaagaacgtcaaatacgagtatggcagcattgatgtagatgcagtgatgaagaagctggcacaggatggcttctccaacatcaagctagaccgcactggcggcgctctgactctgaaccttgtcaatgaggacacagtcattaagttcgaggacaacgagacgcatattatctgcggcggaaagccaacaacccggctcaagctgcgagacaccatcatgaaatgcttacagagtttttaaaaacataaatgtattccttacacctaaataacaacacatcattacgcttagttctttgcctccataacgtcagagcaacgttgacacgttttctgctcatcctccagaccatagcgacgacaacgtgggcacagtgatatctgaagtttacttaaagcaatatccaagtcgctattatgggactgtaagagcgtaactgaccccacttgcaatatctcgcataattcagaattgctcacagactctccaagagggctgtgaagttctcgcagcaaatccagctggcttctttcctttcctttgatggtcacggccaagtgccaggtgttaacatctccagcctgttggttaataagtcgtttaacatcgaacgctgcattaatcacttcagtggctttggtgtcctgccattcaggattagtctgaacaatttgctcgtggaatgcaccacctgtggtgtcatagtagctccagctttcctccaccaggaagggaacaatgggccataagctcttgcagagttgttgatagcagtgggtaagagtttgacgaatggccagtagctcgtgatcatcaccacaataaagacgatccttgatgagatgcacatagacggcggacacctgatttgcaatgaagttttggacacaggcgacaacacgattgtactcataagcttggtatagcttctccaccttaaaagcgattgacatgattagttgaaaaactaagattaacaaaatttcctacctcagattcaaattcaaccagctggcttaacaaataacgattaagatagctcttatccgaagttcgtataagcttctcccccgattgtttctctccaattacgccttttaaatatcgcatagttccgcggatcttgcatagattttctgccgcttgctgcagtagcttatcgctcactgtaatggacatgtgctgcgttccatgggaggcaacccaccaacgcagtgcatccgtaccatatttcttggttatctgctttggggaaattacatttcccaaagatttcgacatcttgtatcctttctcatccacggtaaatccgtgaacgaagagggccctattggatattaatattgaataggtttttcattaaaaagtattacactagaatagagtctttggtattacgtatctactcacttgtacggtgcacattcccgagcagcaatgctcataagcagtgatgattgaaaccaaccggtgaattggtcataaccctcaagatacagatcggctatcttatccttgcccagcacagcggaccatgtgctaccagagtcgaaccaaatgtccagtatgtcagtgcccttgacaagatctttggcttcatggtgaagttcacgaagtaaatgctcgggtaccagttcctccacggattttacccaccagaagtcgattgatccctccttgcggagcagattgcaaagatgttcaataagagcggaattaagtaccacttttccggactcccgactgtagagaacaggaatgggtacgccccacgctcgctgcctggagatgcaccaatatggtctcttctggagttgtgtgagcaatgccttcttgctggcctcagcattggctctaggatagatctccacttgttccaaggcatctgcagcaggcgtctttagcttttcggtattaatgaaccactgctcactggcacgaattatcacaggcttttttgtgcgccaatcaataggataggaatgttccagctttgaggagtggactacatcctctgctatgcggtcgaggactagggaatttccctgatccaacactgattttccgcgtagaaaatcaggagcttccttggtgtaagtgccctcctcattcacaaaacactttacaggaattttctgggtcagactaacaaggaaatcttctggtccatgggcaggagctgtgtgcaccaggcccgtacctttgctatcctgcacatgactggcgtcgaaaaagggcagattcgattgttctttatcaattggatgattatagctcagcttgctcaataattctccactcaagtgctgcactatctcacactttagctgagtattggcctcaaagtccgccataagagctgaagccatgaggtatagctcatcctggttgcgatccgacaacctgactataacgtattccaacgaggcattgtaacagatggcttggttactcggcaaggtccacggagttgtggtccagactagggcataaatttgcttatcctttacatcaaagctacttggattaagagcaaatctcacatacaccgaaggacttatgtgattagcatcatattccagttccgcctcggccagggctgtcctaaaaaatataagatagtgttaagtatcaatttaagttgtattcaactcacctggatgaaggtgaccagtaaactggcttcaagtcgcgatagaccagtcctttctcgtacagattgtagaacatttccaattgattgactataaactctggctggaaggtcatgtagatattgtccttctgccagttggccaaaatgccccagctgctgaactcctctttttgcgatttaatggcctcccaagcaaaggcacgagctttaggaaataataaagaattagcaaagaatctatactaatgggattaactcacatttctggcggatttcttgagcactctgacctggagcagtacttgtggccttcagttctattggcaggccatgacaatcccagccaggaatgtagttgactcgctggccatgtgctacccgctggcgcagagtgatatctttaaggatcttgttgacggcatggcccatgtgaagttgtccgttggcgtagggcggtccatcgtgaaggacgaaggtgggtttccccttctccgccagtcgctgctcctggtacgcataggaaactgcaatcttgttctgcaatgtgataaagtgatacataagatttggttacttcacatatccaacaacatgcctccagaactagacgctcctgttcctcgcgttttgctgcggtgagacgattgggaaacttggtctttggcaggtttatggtgtctgtgtatttctttgcatcctttttggccgctttcatagaatataagcggtttccaacgcgaaagtagaaaatcctaagcattttgctgccgaataagaagagacacaacgtaacaacagccggcaaagtggaaatcatatggtcttgtggaacgtaagcactgttcacacagtgcacagcccgcgatgtagattgtaagtttaaaatgtaatttgaattgatattattttattttgtaactactttaatataaattgaatataacaatgtaaattcaaaataaatacaaattaagttaaatttaataaaggaatattattttttaagatatcaaaaatgcacaattgtaaaattggttatgtttaatggttggtggaattgctgatcgaattccttaatctttcttttccggttcttttggcttgtcatcctttgcctcctcctttttgtcttctcccttgggcggctcctccttcttgccctcctctggctttgtgtccttcttttcgtccttcttggcttccgccttggctggaggagcatcccctgacatggaggcggccagttgggtggccttggccagcacctcttcggcatctccgaccatgtagaaggcaatctccgggatatcgtcatattcaccattcaacaaacgtttgaagccctccacacacttctccacaggcaccagctttcccgggtgtccagtgaagatctcagccacttggaacggctgcgaaaggaaacgctgcatcttgcgagccctggccaccgtcaacttatcctcctcagacagttcatccattcccagaatggcgatgatgtcctgcagcgacttgtaagcctgcagagtcttctgaactgctcgagccacattgtagtgctcctcgcctacaacatcgggatcgaggatgcgggacgaggagtccaagggatccacagccggataaatacccaactcagcaatgggacgcgagagcacggtggtagcgtccaaatgcgaaaaggtagccgccggagcaggatcactgagatc

SEQ ID NO: 11273 - DNA, 2673 bp, DROSOPHILA
atgaaagcggccaaaaaggatgcaaagaaatacacagacaccataaacctgccaaagaccaagtttcccaatcgtctcaccgcagcaaaacgcgaggaacaggagcgtctaaacaagattgcagtttcctatgcgtaccaggagcagcgactggcggagaaggggaaacccaccttcgtccttcacgatggaccgccctacgccaacggacaacttcacatgggccatgccgtcaacaagatccttaaagatatcactctgcgccagcgggtagcacatggccagcgagtcaactacattcctggctgggattgtcatggcctgccaatagaactgaaggccacaagtactgctccaggtcagagtgctcaagaaatccgccagaaatctcgtgcctttgcttgggaggccattaaatcgcaaaaagaggagttcagcagctggggcattttggccaactggcagaaggacaatatctacatgaccttccagccagagtttatagtcaatcaattggaaatgttctacaatctgtacgagaaaggactggtctatcgcgacttgaagccagtttactggtcaccttcatccaggacagccctggccgaggcggaactggaatatgatgctaatcacataagtccttcggtgtatgtgagatttgctcttaatccaagtagctttgatgtaaaggataagcaaatttatgccctagtctggaccacaactccgtggaccttgccgagtaaccaagccatctgttacaatgcctcgttggaatacgttatagtcaggttgtcggatcgcaaccaggatgagctatacctcatggcttcagctcttatggcggactttgaggccaatactcagctaaagtgtgagatagtgcagcacttgagtggagaattattgagcaagctgagctataatcatccaattgataaagaacaatcgaatctgccctttttcgacgccagtcatgtgcaggatagcaaaggtacgggcctggtgcacacagctcctgcccatggaccagaagatttccttgttagtctgacccagaaaattcctgtaaagtgttttgtgaatgaggagggcacttacaccaaggaagctcctgattttctacgcggaaaatcagtgttggatcagggaaattccctagtcctcgaccgcatagcagaggatgtagtccactcctcaaagctggaacattcctatcctattgattggcgcacaaaaaagcctgtgataattcgtgccagtgagcagtggttcattaataccgaaaagctaaagacgcctgctgcagatgccttggaacaagtggagatctatcctagagccaatgctgaggccagcaagaaggcattgctcacacaactccagaagagaccatattggtgcatctccaggcagcgagcgtggggcgtacccattcctgttctctacagtcgggagtccggaaaagtggtacttaattccgctcttattgaacatctttgcaatctgctccgcaaggagggatcaatcgacttctggtgggtaaaatccgtggaggaactggtacccgagcatttacttcgtgaacttcaccatgaagccaaagatcttgtcaagggcactgacatactggacatttggttcgactctggtagcacatggtccgctgtgctgggcaaggataagatagccgatctgtatcttgagggttatgaccaattcaccggttggtttcaatcatcactgcttatgagcattgctgctcgggaatgtgcaccgtacaaggccctcttcgttcacggatttaccgtggatgagaaaggatacaagatgtcgaaatctttgggaaatgtaatttccccaaagcagataaccaagaaatatggtacggatgcactgcgttggtgggttgcctcccatggaacgcagcacatgtccattacagtgagcgataagctactgcagcaagcggcagaaaatctatgcaagatccgcggaactatgcgatatttaaaaggcgtaattggagagaaacaatcgggggagaagcttatacgaacttcggataagagctatcttaatcgttatttgttaagccagctggttgaatttgaatctgaggtggagaagctataccaagcttatgagtacaatcgtgttgtcgcctgtgtccaaaacttcattgcaaatcaggtgtccgccgtctatgtgcatctcatcaaggatcgtctttattgtggtgatgatcacgagctactggccattcgtcaaactcttacccactgctatcaacaactctgcaagagcttatggcccattgttcccttcctggtggaggaaagctggagctactatgacaccacaggtggtgcattccacgagcaaattgttcagactaatcctgaatggcaggacaccaaagccactgaagtgattaatgcagcgttcgatgttaaacgacttattaaccaacaggctggagatgttaacacctggcacttggccgtgaccatcaaaggaaaggaaagaagccagctggatttgctgcgagaacttcacagccctcttggagagtctatatcactgtgcccacgttgtcgtcgctatggtctggaggatgagcagaaaacgtgtcaacgttgctctgacgttatggaggcaaagaactaa

SEQ ID NO: 11274 - protein, 890 aa, DROSOPHILA
MKAAKKDAKKYTDTINLPKTKFPNRLTAAKREEQERLNKIAVSYAYQEQRLAEKGKPTFVLHDGPPYANGQLHMGHAVNKILKDITLRQRVAHGQRVNYIPGWDCHGLPIELKATSTAPGQSAQEIRQKSRAFAWEAIKSQKEEFSSWGILANWQKDNIYMTFQPEFIVNQLEMFYNLYEKGLVYRDLKPVYWSPSSRTALAEAELEYDANHISPSVYVRFALNPSSFDVKDKQIYALVWTTTPWTLPSNQAICYNASLEYVIVRLSDRNQDELYLMASALMADFEANTQLKCEIVQHLSGELLSKLSYNHPIDKEQSNLPFFDASHVQDSKGTGLVHTAPAHGPEDFLVSLTQKIPVKCFVNEEGTYTKEAPDFLRGKSVLDQGNSLVLDRIAEDVVHSSKLEHSYPIDWRTKKPVIIRASEQWFINTEKLKTPAADALEQVEIYPRANAEASKKALLTQLQKRPYWCISRQRAWGVPIPVLYSRESGKVVLNSALIEHLCNLLRKEGSIDFWWVKSVEELVPEHLLRELHHEAKDLVKGTDILDIWFDSGSTWSAVLGKDKIADLYLEGYDQFTGWFQSSLLMSIAARECAPYKALFVHGFTVDEKGYKMSKSLGNVISPKQITKKYGTDALRWWVASHGTQHMSITVSDKLLQQAAENLCKIRGTMRYLKGVIGEKQSGEKLIRTSDKSYLNRYLLSQLVEFESEVEKLYQAYEYNRVVACVQNFIANQVSAVYVHLIKDRLYCGDDHELLAIRQTLTHCYQQLCKSLWPIVPFLVEESWSYYDTTGGAFHEQIVQTNPEWQDTKATEVINAAFDVKRLINQQAGDVNTWHLAVTIKGKERSQLDLLRELHSPLGESISLCPRCRRYGLEDEQKTCQRCSDVMEAKN
